United States Patent Application Publication US 2005/0266459 A1 - sequence listing, part 3

SEQ ID NO: 37 - DNA, 184000 bp, Homo sapiens
gaattccttgcccagtgaagcagcctgcttttcttggatagcttttatcaccacaatgaggtttttcttttctttcttatttaactacaaatgctcagtcattacattattcaaatctaggaatttcactgcctcagtgtcaccatattggcaatctccaaaggccccaaacctttctttgctgtcagcgagaaaactctgtggggatcaccaggggatggaccagggaggctcaggactgggagatgagacaagcaccctcagaaggcgcagacttagctagattaggaaaaagaggcccagccaggcaggtggcacaagatgttagaggtggaagatatgaaggagttactgcatctgtggccttctcagtggagcccaagaacaagacttcagtagtaaccatgttagtaaagaaataggtgaagtcatgaaaatcacttgtaattcttattaagcatcctttgttcttttcaatgaatgactgaggaaaccttacagatcatttttcaatcagtacccacttggtgccaagaaacgagattcacaaatggagtaaacacagctcttgctgtgatgggcttacatggtagggggcagataaaggggtaagctatatatatatatacacatatatatacacacacacacacacataattgctatatattatacatatatgtagagagatatgctctgcaatgtacacataggaggccaccagtctgtctatgctccatgaggtcaggactatatctctttttattcacaacactatattctcagtgcttagaatgaggcctgacagactctcaatgagtatttattgaatgaataaatgtgtgagtaaatgaataagtaacatctgatctaaaaccagagccagattctttctgaccttcagcctaataatactttacttactataacctggagattcccattttgtaatgtcccctctatgaggcttgtcttaacaggtagatatgaacgaattgaagacacccacaatgccagctattgttttctatggcaacactgcccatctcagtgctggttcctggggcacatgacaagaatatctggttgagtccacaggagacagacctcatgggaagatgacacgatcatgaagcctgctcatctcctctactgtccagtgaacttgggcaaagtcactttaactctttggactttaatttcttgtttattaaacaagtgaatatcacatcggtttcacatagttattaaataatttcattctgggaaagaacttggccttgttgagaaaagatccaaattgaatcatcaggcctctttcctggagccaatcttttcagagcattcagactcaagggttagccctagggagcagctgacatcagaagggtatttgaacctatgaccttttggcttaaaagtaagagttcaactctccccacattttctcttgtgtttcgatgttggccaggggtggctgctgcaccctgtgtacaaacggaaaccccaaattgtgtttgcatctatctggccaaggtaccttccccagctccacctccagatgttccatgggggtttgaagtgggaaggaggagttaacgcaccctagtgtctctctgataggggcaactgtgtgcacccacatgtacgagagatctggggctgggagtgtcccagcctgcttctgtacatgtgggctgacagtgacatgttgctttagccagaaggaaagtgcttctgtaatcacaagagagaggtttccctgtcttctctcaaagagagtttggaggccactagtttttcaccaaactgccaagctttccccatatcagtaatatttcaatgatgtttacaaacttgcccgtctgctctttaatacacagagctatgcattgatggtacatgtgcaaggtctgaccttttcgtaggaaaaaacattcataaccaaagcctatatatagcagcttcagactggagcagaggaagatgtaggtcatctgacttttttgtgtgtgaagcataatgcacgagagacgtggcagacaattgaaaactcatgaaatactgcctctggtctgagccttgctaatatttatcaaaacctttaaacaatgacatagttttcaactgggaattataatgccacctactaaccctgagcataagattttttccacaggggaaatttacttagtttaaaactgtatttcactatgtagttaactcttaactatttcttttaaaggggaaaagaacagttaccatcaaaatttattcagcgaacaagtataatatttaaaataatacgataggtaattgaaaaacatgatttgtgtcacttatcaggctcatcgttacctacataaacataaaccaaattcctcagcattcaaggtgaacatgacctggaggttgcctgcctgtccatcagtctcctcagggtcacttttcatattctgttccactgaaccttgtaccgtttgttccttcctgttcctttgtctttgtctttgcttcccttactctctgttcttgggaaatctttttctggacatctctgtatatccagtctattctgtaatatatgaatcaaatgccatcacctccataaatcctctcttttcttcatttcccaggctgtttgtttttaactagctgaccatagcttgttctgtattataaacttattggtgtccatgtcttatatcccattctgatagactatgaaccttctaagggcaggtcaagagtcatgtctgaggcactttgtacccacatagtgcgtaatactgcagacaatgtacaatacaaaacacctataaaatgcatccctgcaaaatgtttattaagtaaatgaatttggctttggaatatactagtacaaacatagaatatttatcatatggagctactatgctaagcactatcttgtttaatgaccaataaatccatgaaattattattattgtcatcatttttaatagcagaaaaaactaaagctcaaagaagttcaaaacctcaccaatgtcacatagctagcagaacaacagaccaggattcaaacccaggtctatctggcctagtggtgtgctggaagctggcttgttccagtttataagagctaattgtgaaattatcaggaattttgggaactgctggaaaagcacagtcattattaaaaagtaaatcataaaaacataaatcatacaaaaataatggtaataaatactaaaaactcaccacttcctattttttaggacatttcatcattaaatatgctcttgaggttatttgtatttcttgcatttgtatgttagaaatattgtacaatggtgtgctgctgtgtatctcttccaaataccacattcagtgatgttgcattggtggcctgaattcaaccatgatgagaatatttacaccaaggatattggcaaacacaacaaatgagggcttcctcccagaaaggcagttattaaacattaacaagcatgccacagtccagccccagaactggactgtacttcagaaagaaacaggctttggcccaagcacacatggacatctccatttccagccttagtctgcacttggtagggcctacctttggaccatcacagataagttgctttctcagaatagaaaattgactttcacaaggctcctttgagcctcggggttggagtgaaagtaattcttagtggttattttatgcctataaaatatatcctaaacctctaccacaaatttagttatgctcttgatcataatcatatacccaggaatatataatgtagctcttgtaacattgaaattccaaaatatggatataaatgtatttccccaaatttatattaatatcataacctactgtttttaagctatatctccttagacccttgatttcatatacatagtttccacatcgtataccttctatgtctcatgaaatgaaatctgagttttgaatcagaggttgtgaatttcagtgctgttctttaactcaagagcaggtcagataacattgttaaccacatgtcaactagcacgttccattgctaattaacagttttctcatctttccaatgaggagttcggcctagatgtcatcttttgaagaccattctggttctatttctaaatgatactgcatgttgcttctcttccttagggctcagtttctgtatctaaacaacagggggttgaaccaggtagctcctaaagtccttttcagctccataaacttgtgaattcatatgaaaagctgtgttttctacctaatgtgttattcctatcagatagcattatgctttaccgctggaaaaatgccaggtaacctgctgcacacccagggctcccatgccaggagaagacctggaggtcgagcagcttctctagccaggagctctaactgccacaggccagggtgctgcagccctcgaaacaaagggaagtgtgtgggtggagggagcacctctgctgttttagatagcacaaagactaaataagtgagggtgaaatatctgtacaggagttttgatttgataccccagctgggtctgcagtgataggggtgggggaaaggaaagcacaagacataagacaggtgatacttcctcttaaattgggaggacagaggagtgatggttgtaactaaagaaagagttaatgcagaagcctctggtgtaattctcacggtgggcagagcacaggagtagagatggaacgtctccctccttaccttttacttacctattgaccctgaacctacagctcatttgtatctttatggaaaaccagaacacgtccttaattcctcatctatatctccaccttcaaactcatcatcatctattcaaccccttatcattttcagattacaaagcactttggactacatagtctcatttgatccataagatacctctgtgaaataggtattattaccttatttttttagaggaagagctggaggtttaaaaagggaattgagcttgcatttttttttttttttggcagggtcttgctctgtcacagaggctagagtgccgtggagtgatcttggctcgctgcaacctccgccttccaggttcaagcaattctcatgcctcagcctcctgattagctgggactacaggcccacgccactgcgcctggttagtctttgtattttctatagagacagggtttcgccatgttgcccaggctggtgtcaaactcttagattcaagtgatccacccacctcagctcccaaagtgctgggataacaggcatgagccaccgcatgcggcctgagcttgctcttttggctctaagattggtactgcaaaatggcctttccctgatgatgtcaagactgttagctgagatgagaagtttctgagcttctgctcacctgaggactcacagaaccacactagagaaaaaagggactgataaattctgaaagggaccctacatataacccaccccactcccatcaattttcagaaggggaaaatggagctcacagagacatgtgtcatgtccaaagtcaaccaaaagccaggatcaatgttaagactcaagcatgtgtctcctcctttcatctgcttgtcattgttcacttttgccctcttttcagccaccagcaacattaagtgatgataactacttaaaaacccttgaccatcactgtaaggacgatgtaacattttccaccccatggactgaagaaccctagatggaatgaggccagcatgctccaatctcagctgtcatttttcatttaatcttttccatgccagcaattggatttattgctggtgagaatggtgactcatgttctcctgacaccaaccaactaatttatcctgccatagctttgtaggcacaaatgtttagtatgtgatcaaaaatagagaccccctgtcattcagtaacttatgattagtattgttgaagcctgaggacttattccaacttaaatcaaggttttgcctcaaatgtaaacaaataggctttattttaggaatcgttgatttataacccagtcatgaagtctagcaaaatgtaatagggaaaggagtctcatttggaagttaccttccctgggtctattcccatttattttattagattgatctgtcacctttggcaactcatttcctctctctgagccacattatccccatctgccaaataagatggttaaagtcaatgacctttgaggagttgtctattttgatggtctccttataagattatatctttatgagagacatcttgctataatcaagttttctatagggtttgctactctttggggatgaggttaggcctgtcctctcctagagttctgctctgtttctataaggataaggaactccatgagagcaaagatgaactatattggtttaacctgtgtgaagttcactttaggatcaggagtggggtgtgcaacaaacttcagaatccaatttcacttttgaaacctattttccaggccagatagaaagaccacacaccataaccatccaggtggtaaagatgaattcaggggaaacaaaatacaacagaacattgtattttaaaagtttcaaacatttgtctcaagattcagctagcagagaacttggatctgaaacttgagtcttttcatacatttactcaactgatatttcctaggtgcctacccagtgccaggtgcttcactatgctgtggaataataggaataaatttaaaaccatcttgatcataggagcttagagtcttgcagaaatgatttggcatgtgcacagattactgtaagttatggcagagacttcagtgccatgaaaaagctcagagcaaattgagattccatctcactaaaagtgcttcccagagaaagtggtaccttgagtcttcacagtggtcaagcaggattttaattcagtgttaatgatcaagggattggggacctccttttttaattttatttttccgtaagttattggggtacaggtggtatttggttacatgagtaaattctttagtggagatttgtgtgaacctggtgcacccatcacctgagcagtacacactgaaccatatttgttgtcttttatctcttgcccccctccactcttccccccaaatccccaagtccattgtatcattcttatgcctttgcaccctcatagcttagctcccacatatcagtgacaacatacaatatttggtttcccattcctgagttacttcatttagaataatagtctctaattgcatccaggtcattctttgcgattcagtgttttcatctgcaaaatgggataataatgttatcaacctcacagactttttatgaataatatatgtgtcattatgtactaaatctcttagaaaagctcctggatcatagtaagtgctccaaaatgttgatcattacttttattcttagcatttgagtaaaattaccctaaaatttcttgcactctcaaaagagaaattcttaattcatgcaggaagacccatgctcattgaattcctttgcacattactgtagaacctactccagcctttgcaggtgcccatgctgtgtagttcacaagtgtgctctggttttctctctctctaccccaaaacttgtctttctctgtctctcaagcgcgcgcacacacacacacacacacacacacacacacacacacagtaattactctctgtagaaactggactgtttatcaaaaccctgggtgtaggagtgtctcaaatgatttctggaaactgaaatgatttcagagataccaggcatcaagaatgtgggtgtataatacaaacaataagcaagttcatatcgaaatctttacatttaggagaggtgggttttcctttctgttggtttctttttttccaaaagcatcatcatttatgtggtttgaaaatgatctttcctctggaaattagacatcgcaacatagaacatagagatgtagctgattaagtgtatgaaggggccaatagcttttcagagaggcttcatcctctttcaggcatggcagcctacaagaatgaatttgctttgagtcatacattttacataaaccaaagaggttacccctaagatgaactgtctggcttattgttccctacccccacagcatcccacataccatcacaggaaggcattagcagtttcaggacttgaactttctctcaaatttttctttacttgaaccaagcagagttgctacagtaaaaaataattgtcactgtgtcgagtgtagttaatggctgtgggcatgttgtctttttagatgtaaagataatgagatcttatttcccacacacaatgagtatggcaattagtagggaaaagtttgccctcctgaatccagccctgttttccatctttctgtttattttgtgaataaggacaagcaattgctagaggctggccagaattaggtttctcagagatcatctagttcaccacataactctttcattttatagatgtagaaactgaaggccaaaagagaaagggacttgcttacggtcacacaggtgttagaacccagaactcctgcatcacagttcaggattccaacagtaggaaaaaagacttgaacctataagaacttcttcagaagcaccaatgtgttcataaaataatcaaagcgtaatgacatgatacaataatatatgatctgaaaggattattatgggaataaataataaggaaagtaaaatattcatgtaaaatcttaaatcactggccaggcacagtggcttatgcctgtagtccctgaactttgaaaggctgaggcaggagcaccactcgaagccatgaagaggttgagaccagcctgggcaacaaagtgagactccatctctaccaaaaaaaaaaaaaaaaaaaaaaaaagccaggcattgtggcacatagctgtagttccagcagctactatttgggaggctgaggtggaaggatggcttgagctcaggagttcgaagctgcagtgagctctgattgtgccagtgcactccagcctgggtgacagagtaagactatgtctctaaaactcaaaaaacccaaacagacaaagaaaaatactttaaagcaccaactagatggctgacaaagactgcagaacatctactcaagtcaaggggaaaataagaattattttcttcttgcaaataaaacagaattcccaaggccatttaaaatgtctgtttgcctatatgccttattttagctgaaatttcctttgcataatttagtcctaggaagtttcatatcattctagaactaaagataatttgtcttagtctattaaatagttagcaatcttcagctaagcacaagttgtagctgaggtcaaaagtagaaacactaactttctctacggcatttgttgatctaaccccagggtaggaagtctaaactctgaggagagggttcccagttaaagaggttaataatatctttgtcaccacaaagacttgccccctagaaccatggagattggaagagatgactgaaagttaattcagccagaagatattttgggctcaaaaatggaagtacatactgcttatgggacctttaagatatgaatttgagacaagtagagtcgcctgtgagattggggaagacacattttacacgtgtggaagcaggatcagcaggatcaaacttgtttggagcccatagtaggaagttcccacaagacagagtgtggttcagaacttttgaataatctgaagtgtgaaaacatggagccaggctgcctctggatggagtgagcaccgccccacagaagctgttcaacagaggctctggaagggaggccaaaggggaagagtcaagttaagagtggctgcagattggagaaatctcccctttggttttccacactcctaagagtctgagagtctagaattcctttctctaaagaggaaagatactagaaaagccaggggagacagaatgacaagaggcaggatgcaaaaaccttgggcagcctctcttctctcctctcataatcgggagaatgatgggattctgcactcagggaaatgaaagggcaataaacttccaaggcaatgaaaggcgctgtctctagtcctgtattcaggcaacatgtggaagtccttgctttcagacagattgtggggattttttttaaacacaaaagcttctgtggctgaagtgatgtgatccagattgtgcagctggaattgctcaacttcaggtggccctgggttggaggactacaccgcatgacttggtgtgtgcggcattggcacggtgtggcgtggggtttgtggtgctggaatggtgcaaaatttctcttgaaatgtgtgctgctgctttgagagaccaatgggatcattagagaatgtccactgtttattaaaatgaactccatggagtactaatctcataagatccgtgttctagggccaagtaaagaggaatgttgtgtatccatatttcctccctgtagatttacattcaaaggctctgagaagggctgtagcaaagcaacctgtttcatttggaataatcctgcttttttttttttttttttttttgagacggagtctcgctctgtcaccaggctggagtgcagtggcatgatcttggctaactgcaacctccgcttcccaggttcaagcaattctcatgcctcagcctcccgagtagctgggactataggtgtgccccaccacacccagctaatttttttgtatttttagtagagacgggggtttcaccatgttggccaggatgctctcgatttcttgacctcgtgatccacctgcctctgcctcccaaagtgctgggattacaggcatgacccaccgcacctggccaatccttctttttaaaaacttatttgatggtggtgtcaatttttacctaaaactactgtcatcctgggaactgatgctccgtggtgaacactgtggtaacacttttgggcaattccaaggatgacacatagactcacaaaatgttagaactgaaagcaacacagaatttaatgccattcccccactttttgaataaactaagcagaggcctgcaagggttataccaaagtaatgaccaacaaccattaactctgacctgcaagaacttgaaattttaaaatgtcaacaaatgactgtgtaacattaggtcatggattatgatgtaatattatattatacataaggttagacagcagttacaagaatactggacttagaatcaataaagctggggtctaatcggaggcctctggctctgtcactgtcactgcttaggtccatctttctacttttgttagtgttgtgtgcccccatctctaaaatgggaagaataatgcttgtgtggctgatctcaaaagttccggtaagaatcaagacagaacgaatgtgaaagtggtttataaattgcactgtgatatgtaggaatcttccttcctcctaacatattgatgttacagcagcatcaggaggatgtgagtattttccattgcttttctcattgtgagggtagtttgcatgaatctgccacagactccatctttcaaccactttcactgtttagtgaggtgactggttacctcagcgagccctcagcaaatctagttacccccttgagtggaatgctggatctgtgatcttacacacacctgactagcaagggaaagcagaaagttatgagcaaggtgaaagtctcagcagatttttggacatttgacttctagtactcacagacacctatgaaaaaaacaaaggcttccgaattttgtgttgttaggactcaaaaagaagaagaaaaagaagaagaattcaataacagtcatcaccaaaagacagaaagagaggaagacagaatgtctgcattgagaaaatcttggtatcttatctctgggatgttattgatgatctgagtatagtgcaaaatcttaagtgaaatgaattggtggtttcagttccggatatggtatgcaaagaaaaaaaaaatttgctctttgaaattcaacgcttcctcgtctgtgcttcaggaagccacacgcctgatgttgagcgtggaaactgactcatttctagccctttgagattagcctctctagcccccagactgtgggcaggatctgggccctaatgggaaactagaattgggtctgtccaaacctggaggagaatcagacacaacctcatcggatgcacatctcttttagggtactcagcctcccagaagtttctgtaggcagaggaccttctatacaaactatctccaaagcttttcaacttgtaattggcagtaggtaggttgcctgaagtggcaaaaagcaaaaatacaaatacagtgcttaccaagcacttatcttcagagtcgtgttaaagtaagctggccaactgccccccactcctcccttggtggaacaacacgtctctgacactttcaatttaaagactcacatgtgttttctcaccaacaagccctagggagtaacgaaactttcttctccttgactctcccagcaatctgttgatttggtgtcaacaggtattacaggtatctgtgtgtcacttaggcattacatttatttagaaaagaaaagtatgttagagactggatgtctccccctgccccattaaactgacacagggaaccccaggatgacagggagttcagatcttctagaagtgaccactccaagcttcaagcttgaccctttagaccttaaatcagtggtttccaaactttttgcataccctcccagtaagagaaataaacacttgaaatggcttttttgcttaattctgatggacacattaaaaaaacaaagcgtttgtctagaggtagtgagaagaatgctgatttaaatgagaagacaatgagaggcaaagtgatgttgggggcggggtggggagaacaactcgagacttggcctagggtcagaagatctgagtttactaacttaatctcactaagcctcactttcctcatctgtaaagtgtgaatgctaattacaaaatgagatcacatatgtgaaagcgtttgccttataaatggtaagggatatgcaaaggttcatagctattactatgtataagcttttaaatattaatgattaatttgtgttagaaatgaaatttcagacttcatcatagaataaggtttaatctttccgattttcttatctgcaaagtttttataaaacatagttgtccgcattattgatttatttgcatgccacttactttaaaaaaggatttgaagtaacatatactgttagtcacagaaattacaggatcattaaaacacagatgaaagattaagaccttgtcatgaaaggacagctcgaagaaaaaaacacagaataagaataattttaatcaagcatatgatgtgattttgagcttcccagcagcttagacaagaaaggaacatgcattgcatttcacagccctcttcctctagtaaaggaagaatagctatggatcaagggggacccagccctttctagccctaaactccacaagaaatgtatcatgtgcaaccttatataagaaatatcaaaaataaattgggtggtatcttcaaaccgaaatgtagcaaagatactattcaatctgaccactaggcgagattttcctttgtgaatcagtgcttgccttcccagaactaaacaaacagcaagatgattaatataaggagcaggctgccttaaaaaaaaaaaaaaaaaaaaaaaaaaaaaaaaaaaaaaacgaaaacaaaaaaacagagagagagagagaaagaaaaagaaacagagcagtgaaaatcagaatgcctgccccagccggctggggcgtgtcgctgtcaccattcattagggggtgtcaagaaggcgaggcaatacgtgaggtgccttgcacaaggtcacttggtgtctgtgaaactgactctgcattctgagttccttaatatgattttttaggtcacagtgttctaggcaaagctccctgttgatgtacatctctcatgcaagatttagatcacctcttttcgggcagagctccatggaaacaccgcccatgatttctgaaaaggagtctgattgggccctggtgatacccggctggagtggacagtgatctctgcagtggacacattgctggactgttggcaaggctacagctaccagaatctagtccttgtaggctattattattctaatgccatagtaaattcctgtttatccaaaatggctaggaaatggggcattctgagcaatggaaaattctggttcattgggttaccctccatatcatttactgattcttggtttcaaaataagtaaattacaacacactttgctaatcactaaaatgatagtgggtatgatttaagcttttttttttatgatccataaggtacttcaggatctattagcacctaataccattgttaagatcgcgacttgtcattttcaaggatttgaggtagaaatgcaggaggtggggacaattgggctgcatcagtattaactcccaaccagatcgctggaactgctgctgcagttgagttgaatcatttcttccttcataccagtttgttggcaagtgaaataataagcataaacatattatcatagtgcctggtatagagtaagtcattattttgttattatttttttcctcaagaacatcaggggaaagaagaaaagaatcgaattcttaactagccaatttggtgtctgaacaaattcaattcatagagcattagttctgacaggaaccacgaagaaaatatgcctaatttcatcattttctgtaaaagataattaaggcccagagagggaatgtcactatagcctcatgtctgtgaggggttagagttgatactagaacccaaatattctggggctaagaccagggatctttttagcagaccaactcttacctttatgcagagtttctgcacagcaggaaacagagagctggaggagaaatggcctgtttgctcggggactctaggaacttaccctatcaatacggtttgaaggtcatcaaagtccccttctgtacaaaagccctggctatgactccaaaacacttcacagggtaaaggattaatgaagtccccatgattcagtcaaaatgaaaactttttaaaaatagcaaagagtcacacaactccccacatctgcaagagtaactttttaaaaagtcaccaagacaggtttaaattcctagcttcgtcctttactttgcttatgttttgaagcttgattcatccctagttctgtctcttacatacttttaaagataaacttgtactcacttaacttccaaattaatttactgtaaactcctccctctgaaggaagaggaagaaggaaattagtgattttaatgctgattgcatttttgaaaggactcagtttctcgaaaatgagcttctttgttggttaataaatgttttctctgccttagtttcagattctgattgttctcttttcctcttgccattctctgagctctccttctgcctttgatcatgggcctggaaatctgccgtttgtacatgagaaaagagagggctgggatttccattaccttccagagtgcagaggggactatcgcatgaaatctctgtgagggaccaactcctataactgctgccagaagggtgctttttgatatctggccttctatatcacatctttattaactccaggagacttattttcagagacatctgggtgtgtatgtccatgcacatgcatactcacgtttttctattttctgcaaatgccttgtgttgactataagcacagagttgatcacagacactcttaggagagtatcagagaggtcacgtgtccaaccctccatgaggctcaagtccctgccaagccaattccaccacttggcatccaggtaagaaagggaagcaggcagggaacaagtctcaacactttctaccccaccctgctctcaagagcctccagagacccccattgctttccaggtgcattctaaaccctggagattggcactcagaggaaggaacagggtttcctgtttggcaataactggcactagataatattttattttaataatgatgaggctggtctctaagacccggctgacccctcctgtccttcatctttcaacattgtgaaatacctcccttccttctcttacccatcctctgctgtgcccaagtctctgcttaccttcccccactgctctgtactttgacttctccttaccctcgttcaagcatttttttctgactgtcatagtcaatctccatttctctctgttgaagacacttcctcctttataaagtattccttccctcttccttcaaccttccaaccttcatccacatggactgtcctctctgtgccccaaataacttaccttaggcacattagcaatctctcttactagagtataaactccttgaagacaggaaccactttatctctctccatattctcctaacagaggactaggcctgtagtggtgtaagacaggccttcttgcatgaatggaatctcaggtcagtctcacctttattctcataagagggaatggtgtgtcctcactcttttctcctccactgaaagctgaattaggaattatttctctcctgacctctgacctaaatctatacaggtctgtcctgaagccacatccacaagatgatggggtgaacaaaaataaccacgggagctgagtgacatagcggaatattcacgcctgtcccggccttcacatgggcctggaaatttacaggaatgtatagctgtgctgttgctgagctggctcaaaacctgttttgctcgagccttcttccctcaccagatatgttgggtatggtgagtgttgccaattgggacaggagaacacccagcccaggcccaggttttatttatcccagtgcagcaggcttgcaagttaaggatccacagacttttcagtccttaatatgaacctgggagcgttttgagatatctcaagcagccaagccaagaaagctttctgattccaacggcaataaccagttgtgatttattgactatcagaccctggagctggaagtaaccttaaaaatcaccttatgtgattcttttcacagataaggaaacagatcatatttgccttgcttttaaaatgaggatagattgtatttatttgcttagtaattcattcatccacctatccatccttttatccaatgatctattaccaactcattcattaaatattcactaaagctaggtgcccagcttgcacttagttctagacataaaaacataaataagatatggcttctgctctctaagagtttattatacctacatgcatacacaaacacataattatgattcaatgtggtatatcctgatacaagtgtaaacaaagcatgttatgagcacagagaaagcggtgactaatctgctgtgcctggaagagtgaggggagaggtaacattcaaacaaaaccttaaagggagagaaagagttctataaacaaggaaggaggaaagggtcagattctgaacagcatctcaaaggctcagcctgaggggagtgtgcagctggctgggactcctgaagagggctgtggtgcagagtgcaagacctgcactgtggcgggggtgaaggtggtatagaagcctagcatgaaaatttccatagctgtgctgaatgtctgagctttagcttggggctgacaaggaatcttaaaaagttttcagatggagcagtgtcacgtcaaatttacattttgttaagacctccttggccatagtaagaagagacagagactgttgcaattatcctagaaataaagtcagccagagtaagctttcaaacatatgtcagaccatgttacccacttgcttataagcctccatgccccatactgtctgtccccatcacaaatccctgttttgtttgttaaggtagtacacattgccttattaaatcattttatttatttgttagcaagctaattgtctgtctcaatcctaaagtgaaagcaccattagagcaagggctatgtgtgtcttagtcaacattgcgtctccagtcctagcgcagcaactggggcatcactggccccacagagagtttggagaataattgccaagaacttgacctcaggaggtggtaatggggaaagagagaaggtgagggaagatgaccctcaaaggcagaaaaccagatcctctcttttcagacccacagcccactcagtgagtggacagtagctgttttcaatagacggagaatggggtgtgttcttcactgactgaatttgctgctcacatctgagaatttttatgacaggcaatcctgttttctctcttgccctcttcaccctgtgtgtttcccacattatccggctgttcaatgtaatcttccaaggatcctctactctgtgcttctgtgttctagcctcaaccctgctgctaactagctgtgggacagacaagctactttcctcagggctttggtttccttaaccgtacaaagagagcgctcgccaaggacccatacaatgctttctaacttacatgctgtgattctcaaatttccccagcgacggcaagagttcttctgtgttttcattttataaagtgtacaatgattatgcacaaaatctcacaaaacaataatttttttatatacccctattgtccctctcaatttctagccataagtgtttttacagtgataatcagagcatgtgtacaattttgcattccactctcatgcttgcccattatttgttatatgtctttcattttgccacagagtcttctcatttatcattttaatggctacataatttttcatggagttaatatatcataaattatttaaccattcctaaattgttggaaatttggattatttccaggttttgctattttaaagcaccttgaccatatagggttttttttttctttttttttttttttttttaagaggcgttttacttagagtaaatccctgggactgagattattagctgagttttatgaccttgaaaggtattgccaaacagctctccaaagggattgtttccatttgcgttcagtttgtgttccacacacgagcatgccagtgtcacagaaagcttgccaacatgtttttttaaaatcaatttcctttatttttttcaagttcaacttgtatgaagtggggctttctgattgttgctgtatcagggttatcatcagtgaggctaaaattatgatacagagcttggtaaatagaagcacttaataatcagtattgttattataaaaagaggaatcctaggaggatgaagcatgcttgttctatcctcaaacctctttcttttctactcctgcctccatttcaatttactgcaaatagtttctccttaccttcaatgttgcctccaattaaagtgctaccagttcttctctattctaaggtagcagaggctccttaaagttagaagtcttgggccacgctgtttccccactgattgtcccctcctttccatatctctgtcaagagaggatcctcagtaaatatgggttgttcccaaagcagattcttatgttcctctgaagtcctcctttccagagttgccttctcctacttctcatcttcccaaagacacccttttgttatttgaagatgatgatcatttccccagtgaacattttcttctccaagttgaatatctcttctttttaaggcatcccttatcctactcaaatgttcatcttctcacagtcctggttgctgctcactgagtgagttccagtctgtaaatttcttcctataagtgtttggcccattcatctattaaaatttagtagacatcatccaagcaacaagcaggaaatgaagatgagtaagaccttgatcttggcctccatatgctcagagtccagtgggtcagagggaagcacaaccccccaagactttggctctagagacctcctagatagcaggctgatgagtaagtcagggaacgacacccacaggtaagtctgatggtctcctttgatgaaccaagcctatctatggctcattggtaaaatgatgactgtcctaccaagtggaagctatcatataccatttggcagaaatgtcatagcatcccagagcctgaatttctgaggcttaaaccaggagaagagttctaagcaggataggagatggctactcatcaagcagagctaatccagggccatgtttaaagatggaaagtgaaatacctaggcctctgccaaggtgaggctcctcgctatttaaagagcttgcaaaagtctaaggaaagccagtttcttaagtaggaagaaaaggagtctgctattaaccggagagaaaaagaatagagaaaactttggttttgccctgccattgttgggtgacatgggttatgtcacttagctactctagaacttagtttattcatatgtgggaatgggcagggttggactatttagtctgtaatgtaccatccagctctcataatctatgatctaccgaacaccaaattctgattagtccctcttgacttcttgaatcctccctcacccaccctagaaaagcacaaagaagaaagtgacctcactgattactgcacagatgttggagagcccgctaggactccatgatccctgtagcgactatggtgatcatgcccagttgtggctaaaatatgttgctggcaggatttgtactcagtgtactgagcctggtgctgtggctgctgcctcttacttcctctcattaaggcaaaccaccatctaattttttgttttccccacatgttttgagtttgctgcttcccagctcttgctattagaacaggcataattaataactcctggcacctggagcagccagattggacaatctgccttttgctttctcgaactgtcttatgaccaatctgaacgtctgaatttatatcctggacttaataaatggattgttttgtaatctccagaaagaatcagaaactcaccacattaccagcaaaaacaaaaaaacaaaaacaaaaaacaaaaaaaaacaaaaaaaaacaattatttatagttcctagtggaagttttatcccacctttaagttaagaactgaaaacaaactgtggtctcatcctttctcaaacttctgctgagaagatgattttgtggctttctttggtcattgttttccattctggggtcatcaagagtttattcctaaagtgtaactcattcaacttctgtggcagcctagacctatttccttagcagaattaaaaacaaagactcatcattctcagtttacttttcttgtgattggagaaatttaaggatcttattagcatgctctatttttaccctaagcaatcacaatttccacctcagggctcccacacccaaacatctggcatatctcattctgtcatttgaaatcttattaatttgcctatttcacttaatttgtagaacgaacatgatcatttaataatattcactgtgctactctattttcctagtgttgtggggaacacaaatttgaagaaaataaggtttctgggccaagtgcagtggttcatgcctgtattctcaacacttttggaggccaaggcaggaggatcacttgaggccaggagttctagagcagcctaggcagcttagtgagaccctgtctctaccaaaaaaaaaaaaaaaaaatagctgagtatggtggtgtccacttgtaatgttagttacttgggaggctgcgatgggagaatcagttgatcccaggagtcagaggctgcagtgaactatgattgtgccactatactccaggatgggggaccctgtctcaaaaaaaaattctgcttaagtagcttacaatttataaacagaggtaaattactgaatataatacagggttgagttatgccaaaagttgtaacagtaatataaactagtgcttccagaacttttctgcacattgaactgcctaaggagcttaagaaaatcgtgactgctgtatcctattcccagagattctgatttaattggtttgaggtgtacgctgggctttctaagttttaaaagatccccagatgattctaatctgtactggcctagtagacgaactgggagacacacacacacacacatacacacacacatacacacacatacacacacacatacacacacacacaaagatattttaatagagaaatttgaaatgttttcatggaggagtagagtatagaattctacttgaggcctggtgtgatggctcaagcctgtaatcccagcactttgggaggcccaggtgggcagatcaccaggtcaggaaatcaagaccatcctagccaacatagtgaaaccccgtctccactaaaaatacaaaaattagctgggcttggtggcgtatgcctgtagtcccagctactcaggaggctgaggcaggagaatcgcttgaacccgggaggagaaagaattctactggagattcagtttaatagtgaggattaagttgctggctttgcagttataaactggaatttgaacttcaactctgtatcttagtggctgtgtgttcttgggtgagttacctgccctgtctgaggagcagccatgagcagcagcacacagggtctgcaggagtgcagagaatatggagaaggcaatgtggggtaaggggcagggagggggcacatagcttttcctgctgagaaaaggtggagatttacaagagagcatactcagaggagacagaaaagaagtggtggatgaggtagatcttgaagaggaaagattgttcctaatatccagaaaaatctcttctccccatccagccctctcacccagataaaaagtcggtttggctgagtttctgctatgatctagaatacaaatcaagaaaccacggctaaagagccagaccagagtcacattcttcccaacagatcttcacaagctgggcgcaggagcctcttcatcagctgcttcctccagttgcgtttctcgggcccttgggcagtcccaatgagaacagaggaaattattgaaaaattgcctattaagtatataatgaaaggtcaacaaactaaaaaattgaatataatgaacagaatactgagaataaaatacccacactctgagtaaatgcagatctgctcaagttagcaattgattgcttttattggttctattgtaaggttggcttaagtaataagtggctattacactgagaatgttggttccttaagttctgtcaggaggcccatgacagggttgaaagaaataaaactacattttcaaatgaaaaactagttttgttagaggatagcaaagaatttcaataagattgtcacatgaattgcaaatgcttggaggaggatgctgtagacgttttgcagaacagaatcaagttataaaatgtagaggctacaaagggctttggggttcatctcatccaatcttctgtgtgtatagatgggaacatgagagtccagagtggtgacatgatttgtgcaaggtcacatagtaaaataaatgctgaagagggaaggcaaattagtttctttgtcacctagatctcattttccacaaggaataaaacacctttgaaaaaaaatattttcagtcaggaaaagctgggcttttcttgagtgacaggttacttaacaactgttgaaccttgtcacacacctatgatatggccacaggactccgtgaattttgtaaaacaatcttatttcttcaatccctcttcctatctcacctttaccttttcttgcctcattttctttcctttttttttgcattaatttatctttgttatattagaagtatcagtacaatttatcttaaattttttgtggaacaagataggataaaaagatgtaagtagcttcatttgacttgtaccatgctctcatcatagacagaatttatatttattgaatattctctatgtgtgtatatatattattatttttaaaaattctcttgacatcaccgtgaagtgtgctatatcgttattttcattttgcaagtgggaaaacgaatcttgtagatgtgaagaaattgtctggatcatacaactggaagggaggaggttgaattcagctgtgggtgacctcagggttcatgatcctcccctatgctgggtgacttactgtagatcttcattgccctggagcaggaaagctggctgtgtgcactgagtggcccgaatacactgtttctccacaattctctgttgctcgattcttcagaagtgtctatttatttcactcagcaagacctcaaatattactccaaacaactggcttccaaagagttggctattttccctgtttttaatgttgggagaagaaactcaaccagtcatttttctttttttactccgttactttacaagaataaaaataatcatattaagatgtcaaaaataaattttaaatgtgcaaatgtgggagaaagacacctcctctctgggagaatccaaagtaatttaaatatactcctgtgtgctctttgtgtgaaatgcagtggccacagttcaaattaagatgttaacaagatattaataagaatgagctgggaataaacacgggattgcaaaatcagttcacaaagtcatttaaattaggagcacacgatgtgattgggagtctgcatgccctgcccctgttgtctgtgctggctcctaggagacaggcctcctttccactgcttcttctactgacaagttgatgggcgtaccttctctgtgcccagtcctgagccagaaatgaataggagaataaaagaactagctcttgcccttagcgaggtccagtgtggttgatgaatttgactttggttagagtgagcaaagcttacgcccaagaaactattagagttcattatacccaagcagggttaatttcagagctgaatggctgatactataaattttgactactgtaaagttctacagtgatggagcttggggtaacctcagggatacttgtgaaaaccctcattatatagagggagtgggttccaggaagacccagggagagaaagggactggcccagaatattacagctagttaatggtaataatcatggctattcatttgttatcagaccccgtgctatacagtgtatatattcaacttcttatctaatccatgacagtgttgtgaggcaggcattgtcctgtttagggataaggaaactcaggcatagagttgggagcttcttgcctgtgatcacataagatagctgtagaggagggatttgaatcccctttacgtctgactgcaaagaccattttttttaacctttaaaaacagatatgggactagcatctagaatcaatttcactttggtgtaatgcttcctttagcatagagaacctttggtatattcactgatttatttgatatgcatttttccgagggctgactataagcagatcttgggctagaccctggggatataaaaaattaataagtgtaagttcttaacctcctggagctcaaagtataatgtagtgactgacacatgaaaaggaaaattacagtacagtgtgataagtgttattatggagacataaataagtgctgtgagagattggggcagagcgaagggttctgcctggaggaaataaggggcaacatcacagaaatggtgaaatgggagtttgggccttgaaatatgagtttaccaatcacaggaggccagaagtactttccagaaaaaggtaacagcacatgcaaaggccccaaattgtgaaaggaattggtacgtttggttaagaagttcagagtggctgtgtggggtggcaaagctgaggatgaagcttgagatcagattgttaagtgttatgttccccagccaaggaattttgtctcaagtttatgggcaatagatcatcaatagggattcctaagcaaaagtgtgtcttggttagatttgctttttaggaagataacccaaggagacatggaggacagagagcagatgttgccgtggtcctgctgaaaactaatgagggcttgagccaaagcattgtggatggaggggaggggtggatgaggcctattaatttctgaagttaaactcctagggtttgttgactgacatgcggagggtaaaggaaaggaagtgtctaaggaagactctgtgatttctagctttagaagtagagtggaaaaatatgctgttaaccaaggctgaacacaaaggacacagagcacatttggtgaatctataggagagggctctttggagcacagtattttaagtttctgtaaaaaacaccccactagagatgtgaataggcttttgggaagacagagatggtttttgcgggagaagtagggactagagtcatcagggtataatggtacttaaagctctagaaccaaatgagtgttcccagggaactttgggtggtggggtcagggggaatagataggctcaaggtgaaatcttgaagcatcccaacattaaagtgtgggcagcatagaagagactgtggagaaccaggagagaatttcaagactgatgaagagttggtttttagtgcaaataccactttgggaatgaggaggatgaagactgcaaagaaatcatttgatttgacaatgaggaggtcaccagggacctcatcaagagggttttcagtggtgtgagtatgtgtgtggttgtttataagccaggttgtagtgggtggggtgtaggcaaggagtgagatcatgaagatggcaatacatactcaataaatttagctgtgaagaggagacagctttatcaattactggatgaaaaaaatggttttaagaatttagagagattcaaggacactgataggctgaaagaaaggagttccagaaacaggagagactgataatccaagaggtaaagaggataactggtgaagcaggtccttgaagaaggctgaagagaaagggactagttcataggtggttggaccagccatggtgagaagagatccctccacctctcttcttaccatcagggaagaggaacagagaggtttgctggtggtgtgtttagaagaggaggagcaggagaaactcagaggaaatatagtgattgttatggactgaacgctcatgcttctcacccaccaccaactgtatatgttgaagcatatccaaagtgtgatggtatttggaggtgaggcgtcttgtagataattagagtaggagggtgggacctcatgaatagcatcggtgcccttataaaaagatctcagggagctctctagcacctttactaccatgtgagtgtaaaacaagaagttggcagtctgcagcctagatgacggccctcaccagcacccgaccatactggcactctgaccttggacttccagcctccagactgtgagaaatagatttttcttgttttttgttgccatgcagtctacaccactttgttgtagaactcaatctgacagtgagattctagttgcatcccatcattgcatagatggggaaatggagactcagagaagtggagcaatttgttccagtttgtgatacaagtaaatgggggagccacggctgtgaatggcatctcctgacccccatgcctgtgctcttttcactccccacctgcttctcagactctcatggcctggggaagatcctgaaacaagggaggatgagcagtgatatctaacaaatatgccaaaagcgaggtgaactgctttgagatttcaccttgagtctatctaacaaatgatatctaacaaatgtacctcctcacaaccaggcacaagctcctcagagacaagacccttcggaatgtcttctgggcttgtcaaataggctcaaatatacttaatactctgtgaatctcctttgaggcacctggccctgcattcttcacaaataaccacataaaataagaactctaagaccctcatctttttctggtgtcagctctcacttgctttctctcagctagttctttccataccatcctcacttgcttcttacacctacattctatggcttccagcagatgcctggaattttcttgccagattctccctaaatgaagattcctctggctcaccttcctgtggtcaccctgagtaaggctctcttggcactttgcagtcccagagtccctcatgcaggcagggatcctctaagggcaggttttcactgacatcaccctaacttcctcaagtggaacttgaacatattagtcatttcatgctaatgccacagtttttactaatttatatttttttaaaatagttttttaaaattttttaaaaaattattaatccagtaactgttgagaggatagtgcctggtgggggaaggagcgatgagtcagacacagtctctgttttcaaggagtttttgtctaatattagggagcaaaacagcaaattaaacagcaagtgtgaaagtgattagcagggtgcccagcttaataggtgagaaattattttcatttaaaaactgatatacataaatatctgagaagggataaaggtggttctaagaacaaggagattcctagatttagttagaagcacaagggaagaagttgaatatgaacatgaagcatgagtcaggtttgagcaggcaaaggtgggattgttgggggggtgggcacatttcagatgaagagagcttgtctaatatgccactgtgtttacaggtgaagccagctattgagagaaaacctggaagtttagtgtctcttgtcccacagcaatggagtacaagaactgagacccatgccaaatgctgtgattcccagggctggtggccatgtgcaggactagttcccaaggagaagggccagagggctttgggcgctcctccctgcccccattctgactcattgtgggaccgagctgagtttagcgcttcatttcccttcttcaggccagcgcgatttgaatgcacctgcctcccttctgtccccgctgcctggtgaggatggccgttgtgaggggcagggagtacttcctaattgtgttcctgtggtctaggtcccacgtgaaggctcttggcggtctcactcaaatgaggtgggggcagcctgaccgctcagtcacacttggaggatgggttggctagttcttctcaccctctggtctggttttgaagttgcaaatttcttaagttgctcttaagaaaggtgtgggccagggctggcggcggtgaagtggagtggcggcggtgaagtggagtcttcagagagctgtcaggtctcagccactgtgctccgtatcttcctcctgtgcatcctattagctccggagctcccaaccttctcctttccacaaaattagacacatctgaaatgcagagcaaatagtctcacaggggaaaaaacaaaaaagatgaggcagtggaggaagggggagacagtaaaaactacaaaatatttccatgcacctggaagggttagtgtccttccatgcaaagtgagtttgtctggaaactcctgctacacggattgagggttcaccttgtttatctgccaggacacaagagcttggcttatccatccagggcattgctcccaccaaccacacctgcacagtggtgaagaaactacagaactctgagatgtattattatcacaccatcctcaggaactgggagacagtagggtcaatgttctatacagcaattagaggtgctgacctgtttgaattctcttggtctccagggcagaggatgttggtggtgatgatgataatgctatcaataactttctgtcatagtgagtcatactgctacaaaggactttcacatttattgactcattttatctcaaaagcgcaatggagaccccattcaccttcagagtatccccaaaagataagccaccatggctagtaagtggacttcagtatagactcattatttagagcggaatatagtggaacttttgggatttgcattgtggtcttgcccttaccagctgggtgaccttagacaaaccacttcaccccgctgagccttagcttcttcatatgtaaaaatgtgttaataataactgtctcagagggctattgtaggggtttaagtgacttcatgtaaataaaaaggccattataaactctaaaacattatgcaaatattaattgccttctatacaagaatgggctatttgcaaaaatgaatgtaaatatagtttgagatggcaggtgtgacgtgcctgaaagagcactttacttgggatctgaagatgtgttttctattttggcctctacatgtcaggtggcagtgaggagtgtggctttcagacaggcaaacacaaccatgcaaaaaaaaacggtggccaccatccgcctgtcaccttgtcacctatggtagactgaatgatggtcccaaagatgcccatgtcctaattcctggaacctgggactatgttctcctacatgttaaagggactttgcagatgtgattaagttaggggtcatgaagtgcagagattatcccatgtcatccagatgggtccattgtaaggtgtaggaggagagttgtgtgacaatggaaacagagattatatgcattgaagatggaggaaggggccacaagtcaaagaatatgagaatctctggaagctgaaaaaggcaaggaaatacattctcccctacagcctccagaaggaactctccctgctggcagcttgatttgaaagcccagagaaattaatgttggatttttggtttccagaactgtaaaaggataaatttatgtcattgtaagccaccaagtttgtgctggctttgttacaatggcaataggtaactcgtgtataccacctcaaaataattcggctcctattttctttctcccaacctgaatccaacttctgaataggctagtgggcattcccaagttttcctctacttttttggtgggccagcctggagctgacctttctaattctgcacagcttatgcatcactgggattgataaatgataaactaactcattggttctgcaccctagattggctggagctcttcctaggggtactcaggctcaggaaatgcagcctttgtggctttgagcaagtcagttaaactcatgggctctctattttttcatctgtcatttggggataaaatttctttctatgcctacctcacagggtgaagacttaagagaaatgatatcaatgaaagctctctgccacttgtaaaatgctctacaggtatgaaccctgttatcatcatcattagcattattttatttttaaaagagtaaaaacgttattaaatgaaatgagttataagtaagagtttctgtttttttctttctttaacttttattttatgtttgggggtgcatgtgaaggtttgctacataggtaaacacttgccatgggggtttattgtaaatattatttcatcacccagtacccaatagttatcttttcttctctttctgctcccagcctctcttggtattatttttaaaatatcgaattttccagcttaatctctttcaaacttaatatatatgttgtggcaattgacagacactctgattctagacaaggctaaaataatcctaaggagaatatccagttgagcattggcttttaaatatctggattattcataagcttgaacttccagtatggaccccaaaatataaaaaacagatgctgtggggccattaaataattgttcagtaatatcacccatttggagatggtgaggctgggcaaatttcacttgcctttctcttcgtggaactgaaaatggaaaagacacatgctaatcagaaacacggtcatctgaaaacaggggctttaaaaatatctttcggccacaagattgccaagagcagaggagctgtgcattactgcaaagccctgcttgttatatcttgccagtgaataatgaagactcccactagtgacaggctctttctcaaacactaaaaccacaatttacctaaagctcgccctggaccctcagaatcatttatttgccacaacctcactagtcttctctgacttgatgaggattacaaaaaactccaacaatcatctggtaaatttgctcagaggagcagagaatattagaatgcaaggggaaggcattggtggagggggctaacattcatcaaccacttaagtcaagtttcaagactctacttttccacacatactatctaattttacactactgttctatttttgtggctattatccccattttacagaagaggaatctggggttagagagattaggtaacttcagaagatcgtaggagaatgtggtaaagctggctttccacactgtgtctagttcatccctttacaaaaaaaggaaaacgagaggaattgattgcctcaggatcatgcacttacttggtgccccttgagttctaaaagtcaggctcgctgaataatttgtcttgaccccccactttgaatctactcccaaagggctttcccctgttactagagatgcccctggcatgtgtctctgctgctgtaaccagattcagcagcagaatggagaaaggggcatgtcccagttgctattgaggcataacaaagcaacccaagcttagtagtttaaactgtgggttagaaacttaggggagactaggctgggcatttatggctcgggagctctcatgtggttgcagacagtggctgaagctggaagagttggggaggagggtactggagcagtgggaggcaggccaggcatctttcagggtccctccacataatccttctttatggaccactttgggtttcctcacagcatggcagcctcagggcagttggactgcttccttggcagttcagtggtccacatgctagaccctagagaacaaggaggcaatggcatcattttctttatgacataccttcagagatcacacaacatcacttactctatattagaatgattgaaagtgagtcacaaccccacccagattcagaggaaggagacttgacctcacctttcgatgggagaaggccatgtagtatggcagtctgtcatggcgagaaaaggctgcaacagtcggagcaagatgagggatctcaaacactgagaagagggccagttatttgtgcacaagaatataaacacagtctcttattgacagagaagcgcctttatgaagagaacctggaagaacactagcaataccctattacttagcaaaagagtgtattaagctgacagcgggacaggggcatattagagaaggtccccagattatgtctgggaagatcaatcagtttggcaaaaagctcacagagcagggattcctggaagctagtagaaagagttctatacaaattgccagattatatcttacagactcaaccttttctttgaaaacattaaagaacttaagttttctaaatcgcttagttgccttaaaacatccctatgttccccccaacttagccgaacgttaatagattctggatatatattaatgaccatttccattcaattatccttcgataaagctattttaaaaaaatgaaaaggaaatgctatctaccaggttgctttttactttatttgatgtatttttatttcttaaatgagcatttacctttaccaagttctattctatgttctggtataaacaaacatgagagcaccctgccctccacaggtgagagccacccactcaatacagagggggcagggggtacgggggggggagccatgtgtatcccatgaatgaaatcccaggcccacgtttctgaaggtaccatgtggaagatagtatttaaatcctgctgtgtgtatgactgatttaaacccctggttcaagtacatggttgttagttgagcgttctcctcgggtcattcattgtgtgaattaaaagaaacaaggtatgtgaagtacttggcacttggcatgtggtgggcattcagaaaagtggactgcttttattgggttgggttttattataatttaatattaacattgtggtatgaaaagtgacttcctgtttacaaatcactttcttatttttcatcttatttaatgatagcaatccagtgattcaggcattgtaattatggtcccgactttacacactgggacattgatagtcagggaggtcaagtgacttacctggggtctcttagctaatacgcggcagagcggggatttggaacccagcaatgacaccaaagcgatcccttttcaccttaccatgctgttccctaaattgacagatgaccttgtgcaagcattccatagcccacccttcaatctggccttcaatttctacatctgcaaagtgagaggactgaattaaattatgtttgaggccccatccaggttccagcgactctgattaaaagcgtatgttcaagcacagaccctgcttgctgcagagctccttgtgaagatccgagcccggctccagagggggctagagcctggacctgtgcccaaatcacaggcctggcttggcgtccatcactgtctttgactgccaaaggacagaattctctagaggacctaactccaatctggccaacttctgatggcctaaattatcctctgacctcgaacttttgatcatctgaagcttattttaaaaatggcttagaaatagccattacatctctctggagaccccttcctttcttaccctcattacgttcctccaacaacagggaagggaaactgcgagacaggcaatctgtatgtaatttttgtctctactgctgcctttctgtgtgaccctgggcaagtcatgtcataaacagaggcttatcaataagggttatcctttcttaaggatctaggaagccatgtggcttccccttcagagagaattggaagacctagtacacatgacttcaaggtaagaaaaccatcagattttctgtaacaattagaaaaatcattcagggctagtctactttaattgcccttctttaaaaacagtttttctactgttttgaaaagaaaacaggtgaggaaaatgctttctgtatctggccccaagagagattttaagtctttttttttttttttctttttcttttctgtttttctaatatggttttgccttttttttttattatactctacatgtgcacattgtgcaggttagttacatatgtatacatgtgccatgctggtgcattacacccactaactcgtcatctagcattaggtatatctcccaatgctatccctcccccctcccctcaccccacaacagtccccagagtgtgatattccccttcctgtgtccatgtgatctcattgttcaattcccacctatgagtgagaatatgcggtgtctggttttttgttcttgcgatagtttactgagaatgatgttttccaatttcatccatgtccctgcaaaggacatgaactcatcattttttatggctgcatagtattccatggtgtatatgtgccacattttcttaatccagtctatcattgttggacatttgggttggttccaagtctttgctattgtgaataatgccacaataaacatacgtgtgcatgtgactttatagcagcatgatttatagtcctttgggtacatacccagtaatgggatggctgggtcaaatgtatttccagttctagatccctgaggaatcgccacactgacttccacaatggttgaactagtttacagtcccaccaacagtgtaaaagtgttcctatttctccacatcctctccagcacctgttgtttcctgactttttaatgattgccattctaactggtgtgagatggtatctcattgtggttttgatttgcatttctctgatggccagtgatgatgagcattttttcatgtgttttttggctgcataaatgtcttcttttgagaagtgtctgttcatgtccttcggccactttttgatggggttgtttgtttttttcttgtaaatttgtttgagttcattgtagattctggatattagccctttgtcagatgagtaggttgcgaaaattttctcccattttgtaggttgcctgttcactctgatggtagtttcttgtgctgtgcagaagctctttagtttaattagatcccatttgtcaattttggcttttgttgccattgtttttggtgttttagacatgaagtccttgcccatgcctatgtcctgaatggtaatgcctaggttttcttctagggtttttatggttttaggtctaacgtttaagtctttaatccatcttgaattgatttttgcataaggtgtaaggaagggatccagtttcagctttctacatatggctagccagttttcccagcaccatttattaaatagggaatcctttccccattgcttgtttttctcaggtttgtcaaagatcagatagttgtagatatgtggcgttatttctgagggctgtgttccgttccattgatctatatctctgttttggtaccagtaccatgctgttttggttactgtagccttgtagtatagtttggagtcaggtagtgtgatgcctccagctttgttcttttggcttaggattgacttggcgatgcgggctcttttttgcttccatatgaactttaaagtagttttttccaattctgtgaagaaaggcattggtagcttgatggggatggcattgaatctgtaaattaccttgggcagtatggccattttcacgatattgattcttcctacccatgagcatggaatgttcttccatttgtttgtatcctcttttatttccttgagcagtggtttgtagttctccttgaagaggtccttcacatcccttgtaagttggattcctaggtatttgattctctttgaagcaattgtgaatgggagttcactcatgatttggctctctgtttgtctgttgttggtgtataagaatgcttgtgatttttgtacattgattttgtatcctgagactttgctgaagttgcttatcagctgaaggagattttgggctgagacaatggggttttctagatatacaatcatgtcgtctgcaaacagggacaatttgacttcctcttttcctaattgaataccctttatttccttctcctgcctaatttccctggccagaacttccaacactatgttgaataggagtggtgagagagggcatccctgtcttgtgccagttttcaaagggaatgcttccagtttttgcccattcagtatgatattggctgtgggtttgtcatagatagctcttattattttgaaatacatcccatcaatacctaatttattgagagtttttagcatgaaggttgttgaattttgtcaaaggccttttctgcatctattgagataatcatgtggtttttgtctttggctctgtttatatgctggattacatttattgatttgcatatattgaaccagccttgcatcccagggatgaagcccacttgatcatggtggataagtttttgatgtgctactggattcgttttgccagtattttattgaggatttttgcatcaatgttcatcaaggatattggtctaaaattctcttttttggttgtgtctctgcctggctttggtatcagaatgatgctgccctcataaaatgagttagggaggattccctctttttctattgattggaatagtttcagaaggaatggtaccagttcctccttgtacctctggtagaattcagctgtgaatccatctggtcctggactctttttagttggtaagctattgattattgccacaatttcagatcctgttattggtctattcagagattcaacttcttcctggtttagtcttgggagagtgtatgtgtcaaggaatttatccatttcttctagattttccagtttatttgcgtagaggtgtttgtaggattctctgatggtagtttgtatttctgtgggatcggtggtgatatcccctttatcattttttattgcgtctattagattcttctctctttttttctttattagtcttgctagcggtctatcaattttgttgatcctttcaaaaaaccagctcctggattcattaattttttgaagggttttttgtgtctctatttccttcagttctgctctgattttagttatttcttgccttctgctagcttttgaatgtgtttgctcttgcttttctagttcttttaattgtgatgttagggtgtcaattttggatctttcctgctttctcttgtgggcatttagtgctataaatttccctctacacactgctttgaatgtgtcccagagattctggtatgttgtgtctttgttctcgttggtttcaaagaacatctttatttctgccttcatttcgttatgtacccagtagtcattcaggagcaggttgttcagtttccatgtagttgagcggttttgagtgagattcttaatcctgagttctagtttgattgcactgtggtctgagagatagtttgttataatttctgttcttttacatttgctgaggagagctttacttccaagtatgtggtcaattttggaataggtgtggtgtggtgctgaaaaaaatgtatattctgttgatttggggtggagagttccgtagatgtctattaggtcctcttggtgcagagctgagttcaattcctggttatccttgttgactttctgtcttgttgatctgtctaatgttgacagtggggtgttaaagtctcccattattaatgtgtgggagtctaagtctctttgtaggtcactcaggacttgctttattaatctgggtgctcctatattgggtgcatatgtatttaggatagttagctcttctcgttgaattgatccctttaccattatgtaatggccttctttgtctcttttgatctttgttggtttaaagtctgttttatcagagactaggattgcaacccctgcctttttttgttttccatttgcttggtagatcttcctccatccttttattttgagcctatgtgtgtctctgcacgtgagatgggtttcctgaatacagcacactgatgggtcttgactctttatccaatttgccagtctgtgtcttttaattggagcatttagtccattaacattgaaagttaatattgttatgtgtgaatttgatcctgtcattatgatgttagctggttattttgcttgttagttgatgcagtttcttcctagtctcgatggtctttacattttggcatgattttccagtggctggtaccggttgttcgtttccatgtttagcgcttccttcaggagctcttttagggcaggcctggtgttgacaaaatctctcagcatttgcttgtctgtaaagtattttatttctccttcgcttatgaagcttagtttggctggatatgaaattctgggttgaaaattcttgtctttaagaatgttgaatattggcccccactctcttctggcttgtagggtttctgccgagagatccgctgttagtctgatgggcttccctttgagggcaacccgacctttctctctggctgcccttaacattttttccttcatttcaactttggtgaatctgacaattatgtgtcctggagttgctcttctcgagtagtatctttgtggcgttctctatatttcctgaatctgaacgttggcctgccttgctagattggggaagttctcctggataatatcctgcagagtgttttccaacttggttccattctccccatcactttcaggtacaccagtcagacgtagatttggtcttatcacatagtcccatatctcttggaggctttgctcatttctttttattcttttttctctaaacttcccttctcgcttcatttcattcatttcatcttccatcgctgataccctttcttccagttgatcgcatcggctcctgaggcttctgcattcttcatgtagttctcgagccttggttttcagctccatcagctcctttaagcacttctctgtattggttattctagttagacattcttctaaatttttttcaaagttttcaacttctttgcctttggtttgaatgtcctcccgtagctcagagtaatttgatcgtctgaagccttcttctctcagctcgtcaaagtcattctccatccacctttgttccgttgctggtgaggaactgcgttcctttggaggaggagaggcactctgcgttttagagtttccagtttttctgttctgttttttccccatctttgtggttttatctacttttggtctttgatgatggtgatgtacagatgggtttttggtgtggatgtcctttctgtttgttagttttccttctaacagacaggaccctcagctgcaggtctgttggaataccctgccgtgtgaggtgtcagtgtgcccctgcaggggggtgcctcccagttaggctgctcggtggtcaggggtcagggacccacttgaggaggcagtctgcccgttctcagatctccagctgagtgctgggagaaccactgctctcttcaaagctgtcagacagggacatttaagtctgcagaggttactgctgtctttttgtttgtctgtgccccgcccccagaggtggagcctacagaggcaggcaggcctccttgagctgtggtgggctccgcccagttggagcttctgggctgctttgtttacctaagcaagcctcagcaatggcgggcgcccctcccccagcctcgctgccgccttgcagtttgatctcagaccgctgtgctagcaatcagcgagactccatggggtaggaccctccaagccaggtgtgggatataatctcatggtgcataaagcgcagtattcgggtgggagtgacccgattttccaggtgccgtccgtcacccctttctttgactcggaaagggaactccctgaccccttgcgcttcccgtgtgaggcaatgcctcgccctgcttcggctcgcgcacggtgcgcgcacccactgacctgcgcccactgtctggcactccctagtgagatgaacccggtacctcagatggaaatgcagaaatcacccgtcttctgcgtcgctcacgctgggagctgtagaccggagctgttcctattcggccatcttggctcctccccccgagattgtaagtcttaaatgtaatattagtttgaaataacaccattcctttttttttttttctgtttgcctcttccctgtttatggatgggatcagatgtgactgaaggtcacacagaaagtaagtctgtgtaccatgctgattgaagtctttctgcaccatgtccaggtattgcttttcccgggtcatgccactttgctcaggttctaactcgtcatctggcttcattctgcagagactcaggcaggagacttctctatcccctaaagaagggaaagagatgctgggctttgcagaggatgaggagcatctcctttctggcccctctgcctccaaattaagaagttttgtttcggtttcatttcaacagagagagagaagaaagagctgcctgacccatgctccacttccaggacagagacagctcagacccctctccggtagctctctgaatgctgccagcagtccccagagatagagaagaggtcaattgcaacagccctgtgagagcaattgcacaatctactacaaggccacagggcaggggatgagatgattctggccatgtggggcagtggataaaatgctggccaggcctctggtcaccactgtgccaccaactcactttataacctaaggcaaggtatcagacctctttaagccttcatttccccatctgtcaaagtaggaaatgtagtattttgcagaacaaaaaactatcagatagtaccagatatccgaaagtattagataataccttagtattatctaacccaacctgtttatttgatatgcttggtaactgagtactggagatggggagtgtcttgcctagggttacatggctgtaagtagcagggtcacttctagaaggcaagacctctcctgcatgctgaagtgctgctttctattttagatgctctccaaggttctccccggctccaggagtctgcagttctaaagacatctccccctatcagctctggctgccgtctttggacgtagtcttgtgtcagtcaccatatgtttcttttgggactcttggggacatattatgtccagctacttccatcattacagagttcttcaatgtcatggaaggccatccaaatggtctcagtaaagcttctggtgggtccttgtgatgtttgcactcatccaggatcatttcagggaaaaccttcagacagatgctgagcaagatcaggggcagcatggccttatgtttatagagagagacattatagtgaccaccaggagacctgttttctagtctgacttggcccttgaatcgccttgtgacctcagacaagcttccaagacagtgtcatattcaaaacaaattgtttgaactagatgatccctaaagtatcttccagctctgacattccatagcagaatattaccaaatctctccattccttggggaattttgtttagaaactaggaggataatctttgctccaggaaatctgggaatgcttgcaggcctgaggatcataaaaccaatattagaaaggaaacctaagaatataatgtacacttgggcctacctgagggtgaagggtaggaggagggagaggagcagaaaaaatgactattgagtactgggcttagtgcctgggtgacaaaataatctgtacaacaaacccttgtgacacaagtttacccaaataacaaacctgcacatgtgcctctgaacctaaaataaaagtttaaaaaatatatatagtgttctgtactttagctcatattttccagggtccataacaaatgttcataacataattacatcttaattttcatatgcagagaggtagatggggagattggaataatgcttgttatggaaatgaattatactgtaacagaatattattgcacttgattatactggggcgacatgatcggatccacagcttcacagacgtagatcctgccttcaaagctcatgtcttctcagggaagctcaggcataggtataactaactcaaatacaaaatatgacattttagacccaataggaaggattttagaggggagaaaaaacacctcctgttgtgggggtatcaggaaagtctttatggaggagtttgaatgtgagattggttttgggaaagaaatgacaaggagaggtaaaagggggccaatcagaggaaatctatgaatcaaagcagaggcagggaaattatgtgaggtttagccgctagtgaatgggccatttgcctggctagggcatagggctgtgaagagaagtggtgagaaagaagactaattatatttatatgtcatatctctttggctagtacacaagtacctttaggtcaaaatctttgttcaattcttctttgtttccctactaaggatgacacataaccatctctcaaaacttttttaatgaataaatcagttatattgcatggcacttttcctcccaaaccaccaaggtacagtatagacacagccatatcttagactctgaaatcaggttgaatacaatacttatcctgtagatgtgaagtaccatccctcagccctataactgcagataggtcatctctcacctgaggaagggagttgtgtcatgttcaccagcccctaatgttaaaatgtgacatatacatgacctgtacaagatgctgaatttagcaactctgatgcagaaaaaagcccatcaattacagtgctttgcgatggcctgtggggccagttctagggacagcaaaacaaagagaatcttagtaatcatcactgggttgcaacaaatgaaatcccctaagaaaatgtgttgataaatatttactgagattctgtcacttagcaatgtagtaaccagactgctgccaaaagaaaaaaaaaagactaggggggaatctggactttcctgtatccagagtatagtggtgggtaagaaacccatatttctattgacatgagaaaattgtacagaactacttatatctgtgtacacatgggtacaagtaaaactaaggaaatctgaataagatacatagattatatctatgtgatagcttagttgtgatattgaaccagtaagcaagatgttaccatggagagaaactgaataaagggtacatggaatctctctgtattatttcttacacctgtatgtgaatccacaattatctcaaaaatttgttttaagtcccagatggattcactggtgatttttctaaaaaagaaattataccaattttccacaatctcttctagaagataaaaggaaagggaatacttcctaactcattctatgaggccagcattatcctaataccaaaaccagaaaaagacattacatataaagaagtaaactacagaccaatatctctcatgaacattgatgaaaaaatgctcaacaaaatattagcaaattgaatccaacaatgtattaaaaaagtataaaccaaaaccaaatgggatttatcccaggtatgtaaggctggttaaacatttaaaaatcaattaatggaggccaggtgcggtggctcatgcctgtaatcccagcactttgggaggctgaggcaggtggatcacctgaggttgggagtttgagactagcctgagcaacatggagaaaccctgtctctactgaaaatacaaaattagctgggtgtggtggcacatgcctataatcccagctactcaggaggctgaggcaggagaatcacttgaacctgggaagcggaggttgtggtgagccgatatcgcgccattgcactccagcctgggcaacaagagcgaaactccgtctaaaaaaaaaaaggaaaaataaaatcaattaatgcaattaatcacatcaagaggctaaagaagaaaaatcgcatgattatatgaccagatgcagaaaaagcctttgacaaaacccagcactcatccatgataaaaactctcagcaaaataggaatccggggaaacttcttcacttgataaagagcatctacaaaaatacctacagttaaaatcatacttaacagtgagaaactcaaagctttcctactaaaaacaggaacaaggcaaggatgtaccttttcatcactggttttcaacatcatactggaagtcctcactaatgcaataagacaagaaaaggaaacaaaagggatacaaatttggaaggaagaaatacgactgtcttttttcacagaaacaaatgacgtaattatctacatgaaaatccttaaaaaatgacaaagaataccctcctagaactaataagtaattatagcactgctgcaggacgcatggttaatacacaaaagtaaattgctttcctaaacactggaaatgaacaagtggaatttgaaattaaaaacacattaccatttacattagcaatccaaaagtgatgtacttaggtataaatctaacaagtatgtgcaagaggaaaactgcaaaactctgttgaaagatatcaaagaacacatcaatgaagagatattctgtattcatggataggaaaacaacagtgtcaagatttcaattctttccaacttgatccctataaaagtatcagcaagaatatcggcaaactgatcctaaagtttatataaagaggcgaaaggcccagtataaccaactcaatattgaaggggaagaagaaagtcagaagacagacactaccagacttcaagacttactataaagctacactaatcaaggcagtgtgatattggcaaaagaatagacaaataaatcagtggaacagaaaaagaagcccagaaatagatccacacaaatatagttaacttatctatgtcaaaggaggaaaggaaacacagtgctgcaaagatagtcttttcaacaaatggtgttggaataactgggcatccatatacaaaaagaatctagatacaaactttatacccatcacaaaaattatgatccacaaaatggatcataggtctaaacagaaaatgcaaaactataaagctttttaaagataacataggagaaaacctaaatgatcttgggtcccatgatgacttttcagatataaccacaaaagcatggtccttgaaagaaataattgataaagtggacttcattaaaattaaaaacttatgctctgcaaaagacaatgtcaagagaatgagacaagccacagactgagagaaaatatttgcataagacacatctcagaaaaagactgttatctaaaacataaagaggagtcttgaaattcaacaataagaaaatgggcaaccttattaaaaacacaggcaaaagacctaaacagacacctcatcaaagaagatatacatatgacaagtaagcctatgaaaagatttacaacatcatgtgcaattagtgaattgctaattaaaataataatgagatacccactacatgcctattagaatggccaaaatccaaagcactgaaaatactgatcactggtgaggatgtggagccggaggaacttttgtttattgctgatgggaatgcaaaacgatgcagccacttgagacagtttagtagtttcttatgaaacaaaacatacttttaccatataatctaagaattgtgcacttggtatttaccaaagtgaatcgaaaatttatgtccacacaaaaacctgcacatcaatgtttgcagaagctttattcatgacagccaaaacttggaaataaccagtagacgaatggacaaaaaaaaaatatatggtgcataaagataacggactattcttcggtgctgaaaagaaatgagctggccaggtgcagtggctcaagtctgtaatcccagcactttgggaggccaaggtgggtggatcaagaggtcaggaggtcaagaccatcctggctaacacagtgaaaccccctctctattaaaagtacaaaaaattagccgggcgtggtggcacgtgcctgtaatcccagctacttgggaggttgaagcaggagaatcacttgaactcaggaggtggaggttggagtgagccaagatcacgccactgcactccagcctgggtgacagagtgagactttgtctcaaaaaaaaaaaaaaaaaaagaaatgagctatcaagccatgcaaagacatggtggaaacttaaaatcatgttacaaagagaaagaagccaatctaaaaaggctacctactatatgattccagttatatgactttctggaaaaggtaaaaccatggggatagtaaaagaagcagtgatttccaggagtgaaagggaaggaagaaataaataggcagagcaaaaaggatttttaggacaatgaacccattctgtatgatactgtgatggtgaatgcatgtcatcgtatctttgtcaaaacccatggaataaaatgtacaacagcaagagtgaaatctaatgcaaactgtgaagtttgcataataatgatgtgtcaatataggtctacagattataataaatgtaccactttggtgcgggatgttgatagctggggaggttgtgtgggtatgtgtgttgggggagtggggagaacaggcagtacatgggagcactctattttttgcccacatttgctctgaacataaaactgctcagaaaaataaagtttattaattaaaaaaagaagatggtcttcagcagcacttctcaaagttttgtcttggaacctccctaaatctctggaatcctatcagaaggttaactaatttcatgatagcactgacacattatttgcctctttcaaactcattctatcatgaatgtacagtggagttttccagaggctacatgacatgtgattttgcaacagactgaacacagcagcagctgggagaatcaagcagtcctcaagccagacattgaagagataactgcaaaaatataaaacagcatcactcttctcactgtatctgttttggtttagaaaaattgttatttttcaaaaaatatgttatttatttaacatgtaatgtgtttattattttaagtaaaataataaatactttttaaaaagaattctgatgtttgttactttgtgcaggagataagataaaaacacagcagtgaaaagggtatgcattggggctgaacctctctcagccagcgtaagtagagaagacttctcatcaggcagaaagttgcatttggatttgcctttaaaaatgggtaggatttagacactggaagattgctgagaaatgagaagaagacattaagcagagtggaagcatggtagacaaggccagtgcgcaacgaacatggagtctaaagcacagcatagaaaatggaggacaacattgggaagttggatgggtcaaaagcaggtgaacacgtgtggagaaaagaaatatgggaaactttatatcctgaagtcctggtaaaagggaggaagtggtttttcctttgtttttattgttgttgttttaaatcaagtttattgaagtgtaatttacatacaataaatttcatcctttttagcattgaattctctgatttttgacaaatgtgtatagtcaatgtaaccaccataatcaagatctagaacagttgcattaccccaaaatattgcttcttacccctctgtgatcaatgcttctcctcgcccccagttcctggcaaccaatggtctatattgaaggccagtattttttccgttcctaaaacaccataaaaatggcatcataggataggtaactttttgagtgtagtttcctgcacttaacataatgcattgaaaatttatctgttttgttatgtgtatcagtagatcattgccttttattgttgagaagaaactggttgtatgcattttccagtttgtttaaccactcaccaattaacagacatttgggttatttctagtttgggtcaattatgaataaaattgttgtatacattcatttataggaatttatgtgaatgtgaatataggttgaaaagtggttttatttcaagtaaaaatggtgaacttagttcaaaaaaaccagatgaatagaatctcagctccaacagtgtgcttgccttttttatatcctgcatgttggtggtttaatgactgtagcgtcaggattcctagaattaattattttaaacccaattttactaatgagagacatgaagctaatatctaaaattaacttgccagtttaggtgtccaagaggttcctgcaggaggcaggaaaccagctggagaagttcataggcaaataaaacaaacaaataaatgaaaatctccaatcttctttacccaacctcttagtgtcagccaggaagattatggttgatgtaaaaaaaaaattaaaggtaaaaactgtttgcattttcaaagggttatgtgttaatcatatacatgagagtctgctaaatgaggctcaaataaattgtagtccagtagtaagccccatgtggaggacatttaccttctccgtggccaaagctccgtctatggaatggagagcaagagatatcaccatgaaatttcagaggcttgaataccacaaatattgaatgtatgatcatttcaataggctgaaatttgccatagtaccatccaccatgaatggacttgctgggcaaatgaaaagtgtgggggagttgctgaggaactacttaccagaacaagtcattctgaggaccctccccacattgagaaaaagccatactgccaaaccttatgctgattgacaaacaccataatcccatcattatgtagatttctctaagggcacatactaggaaacattctacttctaattgttccatgttcctggggaagagaggatggcatttttaaaatagatgttcttcaacctatagaccgatagaatctttgatatgaaagaaaggggaaatttagttagtccaattcctcaacagaatcccttccgagtttcttcgtaacccactccctcaaaacttgagtactttcaatattcttcaaaacctaatcacttttgagattgagctcaaatatctccttctctctgaagcctttcttgaggcttcagttaattactcctttctctgtgttcccattgtatattacctccacctgtcctggaacatttgtcacaatatattgttatctgctcatttgtctatcttcctccattgctctatgggtccccttaggatcaataattctgctatactcattgcctgcatctccagtgccgtaaacagtgtccagcttgaagtaagtacccaataaatatttttaatttattttgattgcattggttacctacttgtcactgacagtgactcactaacttctgaggcagcctattctgttaatgaaatattttgtctgatagaaagttggtccctataatgagtcaaaccatgtattaatttctactcactgtcttttttttaaattttagatcttgggactctcacataaatgctgggggattcaccaccttactagaccttctaggtatttaaagatagcagtcatgacatctttgattcttctcatttcctggctaaattctgtttctttactttgtctaagttaagatttacattatctgcagaattaaggcgacattatccactgctaaaaatggcagcagctatatggtgggaggagtttgaattggaagagattgttgtgagtcatctcaactgatctcattgactgatttttcctgatgatttcttaactttcttttaccccaaaggcatgatatgtgcttttgagaaggctggtagattagatatttagttgcatgcagtgtttctgttaaagatcataaaagcttataataggaatctgtagcttatctcctagtttaaagaatggccaatgaaaaggagggcttctgaaataaaggtgaggagcaggcaaatgtccttaatatccaaattaaaaaactaacttcatactgacaacacgaccaagcaatttggacaattagcaaatggccagtcacttccacaacaacaaaatcaaattactatctgatttcagggatcctcttctttagaaaaatcccttcatatacattctgagatattcttaaactattatattttatttcaaaacaattcacattcattcaaaaaaccctagcatggctgggtgtggtggttcacacctgtaatcccagcattttgggaggccgaggtgggcagatcacctgagatcaggagtttgagattagcctggccaacatggcaaaactctgtctctaccaaaaatacaaaaattagctgggtgcagtggtgcgcacctgtaatctcagttactggggaggctgaggcatgagaattgcatgaacccaggaggtggaggttgccgtgagtcaagatcgtgccactgcactccagccagggtgacagaacaagactctgtctcaaaacaaaacaaaacagccctagtataccactgcatgttaagttcaatattagatactgtggatacaaagtcgaatacgacagtttccaaattcaaaaagatcctgtttcctccgtgggccaacatagctgtatcaacaaataattacaggtacaatgacacaatggagaaagagaacttttaatgacatctggggtggtcatgaaagacattgcaagaaataacacttaagcctactatagtatcattgtgtagatataatattcataaaattatgcagttaagcaaagtttatgtaaatgaaccaaccataccaaaaaaaaaaaaaaaaagctgaccaatttcttttaattttacatgatgggtatttgttttcatatttattgaatatacctttactgaaaatcttctaaaagccagatattcaccaggtattaggagaaagacaataatgagtaaaacatgattccttctcccagaagttagagtaaaatagaggacacagatgcatacacactaatacaaggccaaagagagtgcagtctcttggcaagagagtaggaccaagggtgaggggaaaagaaacttattctagatccagctcagcctctatttattcattcaatatttattgagcaaaataaacataatccttcaggagcttttacagaccaaacactattaccatgaggctttgagcagttgctttccttttccaagaggtgcttcaccacctacaaaataatgtctttatttgccctggtgtccagaatgtacatctcttgacatgttatttcattatggatgaaccaagaaggaaatgaaagggaaacagttgaggagaactgagaactaaatttaccggtctcaaaattctgtattgggcaatttggattatctcgtagaaagagctgattctttaaattccattccaatgatattgttgaccacaagtaggattagagaagggtggggtggccttgatgttaataaaatttaccaggcatgatggtatggaatgatgatttctacccctaaatatatctatattccaatcagactgcttacaattccatcaatcgctcttcattctttggagtctgtaaattatccacgaaaatgcagagaaatccacaaaccatgggtttttcaatatgaatctagtctcttttgggttctaatctgtgtcctacatatactgccctgaagatgaaaattggtaagaatttgctatttggaaaaaaatagcaagaagagcatgccaggcacaggacagagcacaagcaatcttctgaggtgaaacatgcatgctctgtccaggtatgctaacataccatgtttggaatggagcttcaatcagggaataggaggagacaaataattcgggaaaagaagtgggtccagattctgcaagacattagatgttaggcttaggagtcttttttttaaaaaaaagttttgtaagtaagggccagaaaatgttttggagagattaatctggatatgccctacaggataggagagggcaaagaggtattgtcgtaagtaacttccaagaccgcatgccagaagtaaatacaatagtgttccattgtatgtgtgtgctctatttcatgagctatcaaatagcaggtggtccctgtctggggtaaattcccgctctgtgttgggagacggggatttggccctctgcatgactggactctgagccgcaagcctcctgctaccgtgaggcagacagcaggcttgccatagccatccctactccaggttcttgggtgaaaaggcagagcaggcaggggtcttccttgcttcacttttagtgccaagtatctacatatcaagtgatatagtctcacatgttacttccatttctttaacatatttctttggaattgagtttgtgaatttaaaaaagagccagaagtagttggatgtggcacacgacatggtgttgcacaacaaattcataccaagaaaaacgccaccattataacattccaccacacttattagtgtatttttctgcattttaaataaaaatttaatatatacatttttagctttgtataatgaaataattttaaacttgcagaagagttgcaaaaatagtacaatgaattccatatactcttcccccatattcccctaatgttaacatttttaccacacttgctttatcgttctttttctacaaatatatagaagggttttttttttttctctgaactgtctgtgagtatgctgtagacatgatatccttttactcctaaatacttcagggtgtatttcctaaaaacaaggatattcttttaacacgaccacagtataattagcaaaattatgaagttaacattgatacaatattaatgttaatctatacactctattcagattttgccattttttgcattaaggaccctcttgctctactctcatatgttggcatggtttgccaatgatcttttctctggtgaggccttttattgtgatgggattccctttactttcggtgtcaaaatatcctttatttgatgggacaatagtatttttatttactagtatttttaaatgtttattacacaaaattaaagatgtcaatcttatgtcatttcttcttattttattgattcattagtcaagtttaaaaccactggcataatttcgctagtcctctattgttggacatttaaattgtttccagacttttaaagttcaaacactgtggcagtaagcaaacttatatatttatcttttcattaacatgtggttatttttgtaggataaatccaagaaaatagagaagatcaaaagaagatacatagctgaaaacacttgaaggtatagactaccttgaaagtcacgcaagaactgttcttcctgctttccatatccaaggtaaatacattatcccaatcaatcagttaccagggttaaaaaattgtctgcagatgtgaaaatacatatatatatatatgtaacccctgcctcccgactttctccagagatgagcttttaattgctgtgcattggagaacaatcaactttccctcttcagtgtcagggtgacacaaatttctgcaggcccagactcttactacaaatccacttatatctcttccatcttggctgccaaaagggtgttttcctctgcacctagcattttgagcagcctaaacaggtcagggaagcagagaatagcttccatgtgctctaaatcaactctgaaggttcagtagagaggtcatcatcttcagcaagtaatgttaccttttccttttatttggttttggtgatgctgttttcaaggtatttgatgaaaatattttcaaactttctgtgtttccttagtcagaaaaccctttgaaggagccaatgggaagaggtaaatggctccaagttcattttccaggaaagcagactttatatcaaacagctgagcacatttcccttcaccacctagagctggctcataatctgagtgagatttacacctccctacaccaaactgtgcatatacaatcctagaattttagagctgagtggagctttgggccaaactgtgcattttacagatgagggaaattagcctcaagagtggaaatgcctccctccaggtctcacggtgaaccaaggccatggctccaacagggtgcagtctcctggaggtgcagcgaatctactgggatgccaggatgttagaacttctatttatgtaatttttgaaatgattatagacttcacaagaagctgccgaaagaaaatggagaggtctcactgcacccttcacctacttttcctctgtggtagcatcttgcataactgcagtcttgttaaaacaaggaaatggacatcagtacaagccagagtctgtttgtatttcccgtatttatatgcacttatttgtgtgtgtgtgcttctatgcaacttttttgcatgtgtagaattacataaccaccaagaattgtttatattttaaatttagaaaagaaagacaactgaatgaatgtttaataagtgcacgggcactactgcctatattgctgtttgtatgtgcatttgacaattgcatgctttatgacacctgagaaatacctctcacctgagaagaggagttgaaccatgtggcaatctacatttattttttcttgaactctcagtgtatcgtcacattcatcagtttacaagagccccatcaagcggatctatggatgatgttatccagtttccattaacctaatctttcaaaatggacttcagtgagttaaaatgatttctgccttaaaaaacctctgcaagcaggcccggcgcggtggctcacgcctgtaatcccagcactttgggaggccgaggcaggtggatcacaaggtcaggagatcgagaccatcctggctaacatggtgaaactccgtctctactaaaaatccaaaaaaaaaaaaattagccagtcgtggtggcgaatacctgtagtcctagctactcgggaggctgaggcaggagaatggtgtgaacccgggaggcggagcttgcagtgagctgagatcgcgccactgcactccagcctgggagacacagggacactctgtctcaaaaaaaagaagaaaaagaaaacctctgcaaacagtagattgaagataatacttacgttgcaaacacaaccagacaacaaggaaatggcagagttaaccctttctactcctggtaaaaactctgccagccatgtgacaagataaaagcaattatcatctaacctgagctgacaggaagtcaacaaaggacaaaataacctgtccagaagatattttgaaaacggatttgtatccatcgttgtttacaatgtaaatgtatattttgtcatgagaaacggaatgatgagaggaggccgcgatgatgagtaagacatcctaaacatgacgacaagcctttataaaattttcagcaatatttaaagtcatgtgattctcaataagagacaaaatacataccattaaggaagcactattccttttacaatgtagcagcaaactaaagcacaatcctttgcccatttattatctgtgacacgttgggtataacatggtgccttgcccatagggctgttggagaaccaaggaaggaaaagatgtggacatactatgcttttaaaacactgaagttctgtgcaaatacaatattattattaattattttaacatgaaatttcagaagaaaactcactgaacaggaatgttattatctaacaggcaaatatttgaacagattttttttttggtagtctaggtggagaaataattattttgggcagaaaaatatgttcaggggtagcaggatggtagagtatctccagaccgggatttcagtgctaacgctgccgtaatacaatttttccaaccatctgttttatcatttgcaaaggcagttaacacataagccatctcacaatgtcattgtgaggactgaaggagacaattatatgtaaagagtttggcatggtgcttggcacactgaagtttttcaaaccacattagttatctttctcctccctttctccttttaagcagctcctgaaacacactcctgcagaaagcctccgccctactaggattacatccatttcgcgtcttcttaactataatgggatatttttggaggactgggctaagtaccctaatttttttttttgtttcagaaaacacacagcatttaacagttttctgcttgcagtgagtgcttaatataggcttatttgatgaatggttgaaattaattatctctaaaagagaacaaatgtggagcctcaggtcaaagtcctttggtctcaggatttcagacactaactgccactaaaggattactagagtgttctcctatctgaacccatagtggattgatataatagaagtataataacctctttgatatgtacagagcattacggtttccaaagcacttccacatttatcatcttatttgagcctcacaacaaacctttgagttactcaggcagctactactacagagaaaccttaggcctggaaaaataaagcagctgacccaaggctgccaggccaggcatcggacacaatactggtaccagtcaccgttttttgagcacaagcattgtgccaggtacacaaagtacattattttcttcagtcctcagaagacccttgattcagttcctactgccactttaaaaactatgctgaggccaggcttggtggctcacatctgtaatcccagcactttgagaggccgaggtgggtggatcacctgaggtcaggagttcaagaccagctgggccaacatggcaaaaccccgtctctactaaaaatacaaaaaaattagttgagtgtggtggcaggcacctgtaatcccagctacttgggaggctgaggcaggagaattgcttgaacccgggaagcggagtttgcagtgagctgagatcacactactgcacttcagcctgggtgacagagtgagactctgtctcaataaatgaataaataaataaaacaaacaaataaataaataaaaactatactgagactttgtggcataaaacaacaatttcattatgagcatggattctgtgggtcagatattcaaaaagatcacaaaaaggacaccttcatgatgtctagggccttagctggaagatgcaaatgttgggggctcaacagctagggactggaattgtctggaagcatctttagtcatgtctggcagtttgtgctgtctgtctgcttggactgaagcacctacatgtggtctctctctgttgcctgggcttcttaatagcgtggtggcctcaggatgatcatattgtttacacagaatctcagccctccaaaagcaaatgtccctcaccccccagaaaaggtggaagttgagtcaccttttgcaacctatctctgaggtcacatgtcattccttttgctgtactatattggttatatgcaaatcacaggctcacccatattctaggcaaaggacatagatttcacgctttgatgggaagagagcttatggagtagaggagattttgtggccatctttggaaaatacaatctgtcacactttaaatggaaggccgaggcaggcggatcacgaggtcaggagattgagaccatcccggctaacacagtgaaaccctgtctctattaaaaaattagctgggcgtggtggcgggcgcctgtagtcccagctactcaggaagctgaggcaggagaattgcttgagcccaggaggcggaggttgcagtgagccgagatcccgccactgcactccagcctgggtgacagagtgagactcccatttccaaaaaaaaaaaagaatggagaaatcgaggctgagagaggttgagagactttcttgaagtcatgtaactaatatagtcgagtagcatttcacccaggtgttaggatttcaaagtcgatgagtaaagcaaacattgtttatactcaaaattaccttggaaatccttccatttgttggtatagtgcttgtggttccgcataagcaacaggtccttgtgcatcatcccatgctccctggggtacatctgctaactgaatgaaatgatgggcagaatcctgtgcactatttaaattgttatctcacttttcagagtgttaatgtttaaattcccataggtgtgatacatttcaaaaagtggatttagtatttgaccaagcttggtctaactcccaagcccaatctctctttacacttcttgctgcctataaaccacctctagaaggctgaaaaagagatcactttcaggtccatctaggtcagtctcactgtcacatggagtgggcagggagtcactggaaccaggcctgagtttgcaattcagatgtgattttcaggctttgtcactggcttggcttccacgtgtctaaaccttgtttgtgttgaagctacatttattaatgagcatttggacagccacctccctcttccctgttgtctcttctcaggtcttcatggaaatgggcagtaggtgaactgagacttgaaaatgagtaaaatgtcaatagatagagataagggcatttgaggtacactgaacagcataagcaaaggcatggcaatgggaaagtgtagaatgcattcagggactggtgagcaatgcagagctagtcatatttgctggggatagatcacagaggtcctacaacacccagctaaagacttgattctagagttaatgatgtaggaaaagtaatctggtctgctatgcattttagcagtaatactttggagacagaatggaggagaatttgtacaggagagtgaggcttgagggaaggagactggttgggatcatactggtgtagagaagtaaatgcctgcctctggttaaggtcaaggtgtctgagtagggaaatgtagggtctttgcccatgatctttacaacaggtttggtaccaataaggaactaggtaggcctctagagttaatagggcaaatgaccactaaaatggcatgactcagctctaatgcccagataaatctccccttctaggcctcagcacctgaagtttccaatttgataacttgaccacatcttcccatgtggttttctcctactccacccccatcactcccaccaaagtacccacaatcatgaatcttttactcattattcccttactttaatttttgcatagttttatcccatctatgtgtattattttaaaagtatattttattaatgttgttcttaacatttctgaaaagggcatcatgcacaattaatttttatattttcactttttaactaaaattatattatgaagactcatccatagcgttgcttgttgttgtagttcatttaatttttactgctgttatactcctctgtgtgaatgtaccataacttatgtgtcacctctcctgttgatgggatttttgttaggttcattaatacgcatagtactgctatgaacatccttatttatattttctagtatatgtacacaaatatttcttttaagcatagtcagagaaataaaattccaaggtcatggagtccataaatgttcaatttcacgagataataattaagctgttttttcttagtggttttacagcacttccagttccagctatgactaaccttctcaccaaaaacaattattaaaattggtcaaagtctttgaaagcatggggagaaaccaaatcaggcaagagtgaaggcgttactatcactgaataagggaggcacacacggtgatctccatgcagctttttccttgcttacacatttgaaaccatggtggaggggattggggcccaagaagaaggaagtgttcttactgggctgaggaccagaggccagtatttggggttgccaaggtagctgaatcttcaaggggaaagtcctgaagagaagagaagcacagcaagagacccaaaaattggctggaaactttcctttgagtcactgcctgactcctaatgtacatatgcacagatgaacccatcagatacagaaaaacagcaactaagagaccaaagagctaagctgagatgtcagcagcatgaggtgcttcaggtacagaagttggagtggatgggccttggcaaacagctcagacattcagtttcaccccaagaagcaccacaatgtagaagggaagacaacacttgaggagtaagactatatatctgagtattttttatcatgccttcccatttgattgaagatttagttggatatttttgtatacttctgcaaaagatgtcttctttcaaaatgatgtcttctggttgtttattgctaatataggaaggatacaattgcaaatacaattgacttacataaattaatcttatatccagtcaccttgcttaactactgttacttttaatactttactggtggattattttgagttttctaagaaaaaaattctatcatctgtaaataatggcaattttatttcctcctcaccaatctttaagcctctaattcccttttcttttcttttcttattttactgacaatatttagtttaatggtgaattatttttatggattttctaatattatcttcatctaccactgagtaagctcaatgagatatatgacctttaacatgcatgattggatttgattcactgaaactttctttaaaatttttacatctatagtaataagtggcatagctgcattaactttttttatagctctttgctgattttggtataaagtttgtgatcttcatattatctgataatactctatcaatatcagtttaattttattctattttcctgattaataatttcctatcattttacattcatcctttgcatgtattttgctttagaatatgtgtagtgaatggtaatatttgaattttattttttatttggtgagttagctcatttacagtaatagtagttattcatatttaggacttttactctgttcatttgttatttcaatctgtcacacttttcagtgatttttattgctttgtttattttttaaaagttgtctttgttttctctcatataaggactttaataaactctaatgatcctcagcctcctctagctctatcatgttgagttcatctagacttttaattctttgtttttgtagatatgctttctctttctcttttctttggtctcagctattttttaagacaatcccaaacttcacaaagatatttggtcacctttatttcacatatctcttgtattgttccttcaatttgtttctactttatatatgtcattgaaaaatgctttacacatacatctttgggcatgaaatgagactgtacatcttgggtgttttttttttatcatgccttcacatttgaacgaaggtgtagctggatatgaaattctgtactttcaaaattttgataacacttctctattatcttcttgcattcttgcttgctgctgaaaaatctgatatcattattcttttttctttgaaggtgatttgctctctctgtttgcaagcatttacaattttccgttgtctctgatattgttaaatttcagcaaaatttatatctgggagtatgtttctccttatctcttctcgttcttgctctctgtgggtcttttcaacttgaggtcttttatgttttgttaattctggaggaattatctccattattccttcaaatatttccttctctccatttacaactattttttttctttctaggactgcttttgccttttatatcttgacttttacattttctatttttaaaataattttctgctaagtaaaattcctcaagctgatctcttagttcacgaacttattcctcagctaaatcttttctactagttatcaccattatcttaactattatatttgtcacacctaaatttttacttgatttttttttttattactatactttaagttttagggtacatgtgcacattgtgcaggttagttacatatgtatacatgtgccatgctggtgcgctgcacccactaacttgtcatctagcattaggtatatctcccagtgctatccctctcccctccccccaccccacaacagtccccagagtgtgatattccccttcctgtgtccatgtgatctcattgttcaattcccacctatgagtgagaatatgtggtgtctggttttttgttcttgcgatagtttactgagaatgatgatttccaatttcatccatgtccctacaaaggacataaactcatcattttttatggctgcatagtattccatggtgtatatgtgccacattttcttaatccagtctatcattgttggacatttgggttggttccaagtctttgctattgtgaataatgccgcaataaacatacgtgtgcatgtgtctttatagcagcatgatttatagtcctttgggtacatacccagtaatgggatggctgggtcaaatggtatttccagttctagatccctgaggaatcgccacactgacttccacaatggttgaactagtttacagtcccaccaacagtgtaaaagtgttcctatttctccacatcctctccagcacctgttgtttcctgactttttaatgattgccattctaactggtgtgagatggtatctcattgtggttttgatttgcatttatttctctgatggccagtgatgatgagcattttttcatgtgttttttggctgcataaatgtcttcttttgagaagtgtctgttcatgtccttcggccactttttgatggggttgtttgtttttttcttgtaaatttgtttgagttcattgtagattctggatattagccctttgtcagatgagtaggttgtgaaaattttctcccattctgtaggttgcctcttcactctgatggtagtttcttttgctgtgcagaagctctttagtttaattagatcccatttgtcaattttggcttttgttgccattgcttttggtgttttagacatgaagtccttgcccatgcctatgtcctgaatggtaatgcctaggttttcttctagggtttttatggttttaggtctaacgtttaagtctttaatccatcttgaattgatttttgtataaggtgtaaggaagggatccagtttcagctttctacatatggctagccagtttttccagcaccatttattaaatagggaatcctttccccattgcttgtttttctcaggtttgtcaaagatcagatagttgtagatatgcggcgttatttctgagggctgtgttccgttccattgatctatatctctgttttggtaccagtaccatgctgttttggttactgtagccttgtagtatagtttggagtcaggtagtgtgatgcctccagctttgttcttttggcttaggattgacttggcgatgcgggctcttttttgcttccatatgaactttaaagtagttttttccaattctgtgaagaaaggcattggtagcttgatggggatggcattgaatctgtaaattaccttgggcagtatggccattttcacgatattgattcttcctacccatgagcatggaatgttcttccatttgtttgtatcctcttttatttccttgagcagtggtttgtagttctccttgaagaggtccttcacgtcccttgtaagttggattcctaggtatttgattctctttgaagcaattgtgaatgggagttcactcatgatttggctctctgtttgtctgttgttggtgtataagaatgcttgtgatttttgtacattgattttgtatcctgagactttgctgaagttgcttatcagcttaaggagattttgggctgagacaatggggttttctagatatacaatcatgtcgtctgcaaacagggacaatttgacttcctcttttcctaattgaataccctttatttccttctcctgcctaattgccctggccagaacttccaacactatgttgaataggagtggtgagagagggcatccctgtcttgtgccagttttcaaagggaatgcttccagtttttgcccattcagtatgatattggctgtgggtttgtcatagatagctcttattattttgaaatacgtcccatcaatacctaatttattgagagtttttagcatgaagggttgttgaattttgtcaaaggctttttctgcatctattgagataatcatgtggtttttgtctttggctctgtttatatgctggattacatttattgatttgcgtatattgaaccagccttgcatcccagggatgaagcccacttgatcatggtggataagctttttgatgtgctgctggattcggtttgccagtattttattgaggatttttgcatcaatgttcatcaaggatattggtctaaaattctccttttttgttgtgtctcttcctggctttggtatcagaatgatgctgccctcataaaatgagttagggaggattccctctttttctattgattggaatagtttcagaaggaatggtaccagttcctccttgtacctctggtagaatttggctgtgaatccatctggtcctggactctttttggttggtaagctattgattattgccacaatttcagatcctgttattggtctattcagagattcaacttcttcctggtttagtcttgggagagtgtatgtgttgaagaatttatccatttcttctagactttctagtttatttgcatagaggtgtttgtaggattctctgatggtagtttgtatttctgtgggatcggtggtgatatcccctttatcattttttattgcgtctattagattcttctctctttttttctttattagtcttgctagcggtctatcaattttgttgatcctttcaaaaaaccagctcctggattcattaattttttgaagggtttttttgtgtctctatttcctttagttctgctctgattttagttatttcttgccttctgctagcttttgaatgtgtttgctcttgcttttctagttcttttaattgtgatgttagggtgtcaattttggatctttcctgctttctcttgtgggcatttagtgctataaatttccctctacacactgctttgagtgcgtcccagagattctggtatgttgtgtctttgttctcattggtttcatagaacatctttatttctgccttcatttcattatgtacccagtagtcattcaggagcaggttggtcagtttccatgtagttgagcggttttgagtgagattcttaatcctgagttctagtttgattgcactgtggtctgagagatagtttgttacaatttctgttcttttacatttgctgaggagagctttacttccaagaatgtggtcaattttggaataggtgtggtgtggtgctgaaaaaaatgtatattctgttgatttggggtggagagttccgtagatgtctattaggtccgcttggtgcagagctgagttcaattcctggttatccttgttgactttctgtcttgttgatctgtctaatgttgacagtggggtgttaaagtctcccattattaatgtgtgggagtctaagtctctttgtaggtcactcaggacttgctttatgaatctggatgctcctgtattgggtgcatatatatttaggatagttagctcttcttgttgaattgatccctttaccattatgtaatggccttctttgtctcttttgatctttgttggtttaaagtctgttttatcagaggctaggattgcaacccctgcctttttttgttttcatttgcttggtagatcttcctctatcctttgattttgagcctatgtgtgtctctgcacgtgagatgggtttcctgaatacagcacactgatgggtcttgactctttatccaatttgccagtctgtgtcttttaattgaagcatttagtccatttacattgaaagttaatattgttatgtgtgaatttgatcctgtcattatgatgttagctggttatcttgcttgttagttgatgcagtttcttcctagtctcgatggtctttacattttggcatgattttgcagtggctggtaccggttgttcgtttccatgtttagcgcttccttcaggagctcttttagggcaggcctggtggtgacaaaatctctcagcatttgcttgtctgtaaagtattttatttctccttcacttatgaagcttagtttggctggatatgaaattctgggttgaaaattcttgtctttaagaatgttgaatattggcccccactctcttctggcttgtagggtttctgccaagagatctgctgttagtctgatgggcttcccttttagggtaacccgacctttctctctggctgcccttaacattttttccttcatttcaactttggtgaatctgacaattatgtgtcctggagttgctcttctcgaggagtatctttgtggcgttctctgtatttcctgaatctgaacgttggcctgccttgctagattggggaagttctcctggataatatcctgcagagtgttttccaacttggttccattctccccatcactttcaggtacaccaatcagacgtagatttggtcttttcacatagtcccatatctcttggaggctttgctcatttctttttattcttttttctctaaacttcccttctcacttcatttcattcatttcatcttccatcactgataccctttcttccagttgatcgcatcggctcctgaggcttctgcattcttcacgtagttctcgagccttggttttcagctccatcagctcctttaagcacttctctgtattggttattctacttatacattcttctaaatttttttcaaagttttcaacttctttgcctttggtttgaatgtcctcccgtagctcagagtaatttgatcgtctgaagccttcttctctcagctcgtcaaagtcattctccatccacctttgttccattgctggtgaggaactgcgttcctttggaggaggagaggcgctctcctttttagagtttccagttttcctgttctgttttttccccatctttgtggttttatctacttttggtctttgatgatggtgatgtacagatgggtttttggtgtggatgtcctttctgtttgttagttttccttctaacagacaggaccctcagctgcaggtctgttggaataccctgccgtgtgaggtgtcagtgtgcccctgcaggggggtgcctcccagttaggctgctcgggggtcggggtcagggacccacttgaggagacagtctgcctgttctcagatctgcagctgcatgctgggagaaccactgctctcttcaaagctgtcagacagggacatttaagtcctcagaagttactgctgtctttttgtttgtctgtgccctgcccccagaggtggagcctacagaggcaggcaggcctccttgagctgtggtgggctccacccagttcgagcttcagggctgctttgtttacctaatcaagcctgggcagtggcgggcgcccctcccccagcctcgctgccaccttgcagtttgatctcagactgctgtgctagcaaccagcgagactccgtgggcgtaggaccctccgagccaggtgtggggtataatctcgtggtgcgccgttttttaagcccgtcggaaaagcgcagtattcgggtgggagtgacccgattttccaggtgccgtccgtcacccctttctttgactcggaaagggaactccctgaccccttgcgcttcccaagtgaggcaatgcctcgccctgcttcggctcgcgcacggtgtgcgcaaccactgacctgcgcccactgtctggcactccctagtgagatgaacccggtacctcagatggaaatgcagaaatcacccgccttctgcctcgctcccgctggtagctgtagaccggagctgttcctattcggccatcttggctcctccccccatgcttgattctttttatggtttattgttttcatttcatattgctaacattataccttatttaaaaatatgcatatgtaaatttttaatctgtctgttctaacacctctggtttctatggaatctgtaattcagtttgttggtttttcttttttttttctttttcttcttttaaattatactttaagttctgggatacatgtgcagaatgtgcaggtttgttacctaggtatctacacatgtaccatggtggtttactgcacccatcaacctgtcatctacattaggtatttctcctaatgctttccctcccctagcccctcaccccctgacaggccccagtgtgtgatgttcccctcctgtgtccatgtgttctcattgttcaactcccatttatgagtgagatcatgcagtgtttggttttctgttcctgtgttagtttgctgagaatgatggtttccagcttcatccatgttcgtgtaaagggcatgaactcatccttttttgtgactgcatagtattccatggtgtatatgtgccacattttctttatccagtatatcattgatggtcatttgggtgggttccaagtctttgctattgtgaatagggctgcagtaaacatatgtgtgcatgtgtctttatagcagaatgatttataatcctttgggtgtatacccagtaatgggattgctgggtcaaatggtatttctgtttccagatccttgaggaatcaccacactatcttctacaatggttgaactaatttacactcccaccaacagtgtaaaagcatttctatttctccacatcctctccagcatctgttgcttcctgactttttaatgattgccattctaactgacttgagatggtaactcactgtggttttgatttgcatttctgtagtgaccagtgatgatgagctttttttttcttatgtttgttggctgcataaatgtcttcttttgagaagtgtctgttcatgtcctttgcccattttttgatggagttgtttgtttttttctcataaatttgtttaagttgtagattctggatattagccctttgtcagatggatagatcgcaaaaattttctcccattccgtaggttgcctgttcactctgatggtagtttcttttgctgcacagaagctctttagtttaattagatcccatttgtttattttggcttttgttgcctttgcttttggtattttagtcatgaagtctttgctcatgcctatgtcatgaatggtattgcctaggttttcttctagggtttttatggttttaggtcttatgtttaagtctttaatccatctttagttaatttttgtagaaggtgtaaggaaggggtccagtttcagttttctgcatatggctagccagttttcccaacaccacttattaaatagggaatcctttccccattgcttgtttttgtcaggtttttcaaagatcagatggttgtagatgtgtggtgttatttctgaggcctctgttctgttccattggcctatatatctgttttggtaccagtaccatgctgttttcattaccgtagctttgtagtatagtttgaagtcaggtagcatgatgcctctgttttgatcttttggcttaggattgtcttggctatatgggctcttttttggttccatatgaaatttaaagtagtttttttttttctaattctgagaagaaagtcaatggtagcttgatggggatagcattgaatctataaattactttgggcagtatggccattttcatgatattgattcttcctatctatgagcatggaatgcttttccatttgtttatgtcctctcttatttccttgagcagtagtttgtagctgtccttgaagagtccttcacaacccttgtaagctgtattcttaggtattttattccctttgtagcaattgtgaatgggagttcactcatgatttggctctctgtttgtctattattggtatataggaatgcttgtgatttttgcacattgattttgtatcctgagactttgctgaagttgcttatcagcttaaggagattttgggctgagacaatggggttttcaaatagacattcatgtcatctggaaacagagagcatttgacttcctctcttcccatttgaataccctttatttctttctcttgcctggttgccctggacagaacttccaatactatgctgaataggagtggtgagggagggcatccttgtcttctgccggttttcaaagggaatgcttccagcttttgccattcagtatgatattggctgtggctgtgtcataaatagctcttattgcattgagataaattttgacttagtgatctcctcattcactaagtcatttctcaacagaatcttttctactagttatcatcattatcttaactattatatttgtcacacctaaatttatacttgattcctttttttttttttttttgaaatggagtctcactctgagacccaggctggagtgcagtggcacgatctcggctcactgcaacctctgcctcccaggttcaagcaattcccttgcctcagcctcccaagtagctgggattacaggtgcacaccaacatgcccagctaatttttgtatttttagtagacacagggtttcaccatgtgggtcaggctggtctcgaactcctacctcaggtgatccaccagcctcagcctcccaaagtgctgggattacaggcgtgagccaccacgcccggcctatacttgattctttttatgatttcttgttttcatttcatattgctaatattataccttatttaaaaatatgcatacataaatttttaatctgtccattctaatacctctggtttctatggaatctataattcaagttgttggttttcctttttctttcttttttaaaaaaattagtgcttctctttagatccagcttccatttctttagggtatagattattctgtccagcaatgccaatgactgaagggttgaaggtcaaacttccgtctgcactgacctgccttgatgagtttgagatggggatagagcgaagcatgcacctagagtggtgggtttcaggcatcaggaaaccagagtatatcactcctcatccaccacacagctcctcagatgtattctttactttagaaagaactagcatccgggaaaggcgatggtaatccaccagccctggcggtttagagggagagagttgggcagtgaccacctgtggcccatccatcattgtctattttttttctcactcccacccaggcacagggcttccacactaccctagttttacatcccaggagcacttgttcaagagttctaagctcgtgccgtgtctgtcccaaaacagtgagagtgagagggaggagaaatgaagtctaagaagcaacagcttttatttcatccttctacagcagcctggataccttttgctttaggctaagacctttccagatacacatacttgacagttaaaaagagtttctgtctccccaggggttcctcatagctctctctacctctcagtgtttttctctatagttccctagagctgctaagtcagctatttcagcatcttctttggaattccacttgacttttccttcttacaggctacatgctgtctttccccatctgccttcctttaaaacataggtatccctgggatggcagcacgctgagtgccgctgtcagcaggtgcactgggtcagctctccttatgaactggaagagggatgagtgcctagggtaaatggaaggagaactgaccagaagttaggatggggcttgtgtctcattcagtcccagacttgctgggtggctttagacaagtcgcttcacttccctaagcctcaatattctcttctgaaaagtcaagtgaataataacacccacctcattgggctgatgaaagattcagatgagaaattggatgtgaaaggactttgaaactgtaacatgaggtgattttattgatcatctggaggcagggaaagaagccttggggtaggtgaaaattcactttgccaacctcaaaattgcactaagtgttggccctgttaaaaaagcctgatgcaactgaacattcccttaatatagagaatgacgaatctgtatttgttgccagagttgtcacattcttccaagagtgcagacttttatgggcccctggaagctccgccggggtctatttctgaggatgggaacattgtgcttcgttggcaggcttcttaaaccaaggcctcttgtggtcattgaagaatctgggtctgccttttcaatgttggggtcaaggtattagatccagtcagccaatgttcgctgatttggattcacagcttctgctaaacttggtgcattttgcttctttgtttgatgggggtctttttctagtcttgttagatgactgagaagtgggaaaatagaatggagctggtccaaatcaaagacaagtagcagaggtggaaatgaataagaataatgtgttctctgggaatttatacaaggacaaggctaatgagactttgttttcaattacttaaaatgtagtttgtcattgaaaagatgatgtaatgtctttaaaacagaaaacaagccagaatcccacaccatatccaactatttgtatttttgcacattcttatctatttcttgtcttttcatcatgcatgcataatgtatatttcattttatggcctgaatttttttcacttaacattacataataagcattttccttttaaagtttgcattttcatgactagctaatataatttttgatgctgttttataattaataatgccattcccttacttgagaccttggagttgtctttaactttttgtttatttgcttgcttttttgctattgtagtgtcatgaacatctttgtacattttgctttttgctgttattgagttattacctttgcataaattccaaaattcctaacagtgacatggctgggaaattatgtctaggcatctttatgactcttgtattctattttcaaaaaacaaaaaaaaaacatctttcaagcattcactgtttgctcaaagatttttctactttaatatgtaagtgtttcaaatttgttttcttttgtactttactgtttaacagcaaagtttaatgctttccatgtgttttgggtttctttaaatcatattattaaaattaaaaaatattctgccatatgttttcagaattttttgaaaacacccaagaaaatatcccaaaaaatatttcctaaggagttcacatttccaaattaatcagctataagtgctttgtggccacaaagcaaacagaagtgtcaagctaatttgtctttcatttatctcattaagtgactctcatgtgtaattcaagtcctgtcagcagtgttttaaggaatattgaaaaaagacagggacattaccccccaaaagtttccattccagtaaagttattatcatatgactgaccagccttcaaaaattgctcagtgttgtaagaaaaggacagaataagagctatgggattcagagaatggggagattatttccagcttgagtgacagaatgtgaagagtcagagaaggcttattggaggaaattgtatctgagctgaatgaataggatgtgaggtagggcctatcttagggtagcagagggaagtgagctggtgagaatcttttgcccatcttatgtgagggagctcttgacattttaactgtcttctaaattgtagccactcctttccagattgggaaatggagtgaggcagcgatgaccaattcatggtcacatgaaagggacagttcacatgaaagggacaggtttccacataatgcggcttaaaaaaaaaaaaaacttgaagaaaacaaaaaggggccagtttcaactgactccatataggtctttcaactttccattttgaaagacctataattcgcaatgaagtttattaccttccaatcccttctataacttggcagacaaagaaatcgaggtattatttgttgccctggaatagacacataaggctacttgctactggatgcgaatagtccagaaccctggctgttctgttcctgctgattgatggttcaggaggctgaaaggatcaagatctgggcactcttaggacccactgggcaaacactacatggaaagttctgcaggtaggtaaagatgattaataaaaacagtttccagacctaatcagcgtgatatataataaatgaattgggcattgagactggtaaagaaaaaaaattattatggcccttgattggtcctaccgtcaccacgctgtctaccataagatagagaatttttagtgttacacagaaaataacataatacaactctgaaattttgatcatttgtgtgatcagataagttgtgttttgcattatcattcaaagagcaaaagccttcactagcactcttttttccacctacaacagaagttgtctcaacaatagcttagacatcgattagaataataggtttgaaggtaccttaggcgcttctaatccactctttttcccagtgaaagaatcctttccatagtttttctgataagccactggcacccactaacaacccaagcctgaaaagcatccaaagaccggatatttacctatgaaacatgttatggaccagttgatgataataatgttttgcacttacctgatgatgtcatttcagtaggttcaaaacaagggatcaaataatactcccatgccaagcaggcagaaaggtagcaaatagatttcttagaatcctcatttcacaaatagagcaatttagtttacgtatttgctgatttatttaacccctatctcgtttcagaattgtttcaagtagacagggtactttggtttctggattcaatagcggttgaaaggttagaaaacagtttaaaagaagggaagctctttgcataatagagaaaaatagatttgcatgaatatattttgtaaaagttgcacaattgggtgcaatgcttctgtagaaaaattcctgaaaacattcagtgcaccactgtacttattatattaaaaattctagcagctgtgcttttcttctaaattaaggaaataaaggagtatcatgagctaatgccacatcaaagtggcatgtttcaacacttcaacatcatgtgttgccagagtcaagttttccaggagccctggctcacccctctgttcctggaggcagatgttggagtggtcactccagggcagcggcagtcagaatttcttggttctccttccagattgtggcgaggtactggatatgctttttcccaccttagttagtttctctggcaaatccctttgccatgtaaagggatcatggtcaaatggacacatttgaaaggttgccatgtggaaaaggagcataggcctattctgcatgatcccagaggatacaactaagactgacaagatagtccctgctgcaaagagatggatttggactttatataaactatgaggaaaataagtcttcttaactatttaacacttacaggataaacaacctcatttgacctcatttgcactatttaatttaatttaattatttcaacaacccaagaggcaagtattattaatttttagggactgggaaactgagactcagacagggtaagtaacttgacaaaagtaatgccatttctgagtgtgccagagctgagacttgagtcaagccaagccttacacctgctcagtcatgtggaattagtttatggaattaactactgagttagactcccttgtagaaaatggagtagggaaaaacccatcaaaatcaaacacaaattaataagcaacaggttactgtgcaatttataaatgatcgaggtgggtctaacacctgtaaaggcatagatttagaagatgcaaatgcagacatctgtagacatctaaggatgttatagatcctgttttacgaatgtctgcatatgccgagtgaggatgaaggcctgcccaaaggatcctcatgtagacatgatcactataaaccatgtgaaaaaagaatcccaggcaatgagagagttggtctttctgttccacccctgtcgaggaaaagaaaagaagctcttcctttcagaacattgtagaaaaattgatattatgacttaaaactaaaatactatgaggtccagggaaagggagcaattttcccagggttccccagcaaaaaaagggacaggctttgcataggcacctaagtcccataaaaccctcaggcctattgaggttccactgagcagcacggcctgtgagtctccattctgaccaggaggttcttttgccccaggctgtgggctccatgagggctggcggggcgcctctctcatgcctcccactagttttgaaaccctgcatccccactgctaggtcctcaatcagtcttaggaatctcaacctactttcctaaaccgatttccactattcccacttgccaagttaaggcactcagcttgcctaaaagtaccagttagaaatggaaagtgtctcagagatcatctaatttaatcctggcattttacagatgagaacacaggaagctcagagagaattaagtgggtttcccagtcactggtaaacattgtgcgtggtgcctattatacgccatgtctgatgttaggaagccccagtggctatgatgacctatgaaaatgggacctctcctgacaaggaacccactaaatatccagttgtaggtgcctggtggctgagcagggaaggcaggagctgagattcctgggttctggtgttttataatgctgattcacaggcagactttgaatcagattggtctctttcctgggcttcagtttctccagttataccataagtgggtgagtggttttcacattcctcctctggggactggtgaggtaatggcaggtttatactgagggaacttaggagactgagagcccagagaaaccaggggccttgtgggatgtctggcctgtctgtgcagagtgttctgcacatggcactctccttgtagattcagaagggaaggcctggggagaaatgtggggggtggggtcgggtgcggtgggggtgggggaactagacgttcccactgtttacaggtttgaagttttagtaatttaaacttggccctggtgcatgtcataccaaagggaccatccctgaatgattcacttctcttcagaaactccctgtgcctgggcttgctcctggagggcagggaccttggactttactggcctcagtacagtgcccggctcactacaggcactcaatgctgtttgtaatgtggtgtgctttcctcctccagggagcatcttggggtggtaatagaccatgagctgcttgctccattttctttgtttatgaaagtgcataccattagacagccttgccttaaaggaaaaagtgcacactcatctactcctttgtgaagtggttgagagtctgtcctgcatgacagtgcagtggctgcagctccctgaagcaaagcaaaggatctctagcactgtgcggtaatggaaagaatatttaactagaagtcaggatgccagtatctaagtactgggtctgtgctaggagaccttatatgagtcatagacatgtgtatgtggcactttagagtttagaaaatccttcctgtacatggttttatataggcttcacaataaacctctgcatgcagcagtatttccccattttgttcccattttccagagaaggaaaatgagtcttggggaggttaaaggactctggagtcccggagatacttggcagtgctgggccttgatataaggtcttgccaacatcagaacctctttttacgaatgttcttttgatagcctaggtcccaggttcatctatgcaaacaaagatagtgggcaatctctacaatcctgttcaaccctgatattctgtggccctatggatcaattgaggcaggtgcacttgctctctaatactgtgtccttagcacttgagtttacactatgatgttgtgctgtgagacagagagagatatcaagggaaaaagtgacaccatcaccaccatcttctgaggatggcgtcagagtgagaaggggattggctttggagccagatcaaggcagcatgacatcttgtctctctcagttattgacagtgagactttggacaaatctcaaaacctctttgtacctctgcttggtcttctgagttttcaaatggatgcaaagatacttacttacaggttgatgattgtgtagatcacataaaattgctttaaaaaggctgatacatttattacctgtatgcagtttgtgatgtgtattaaaagttaggtccctttccttacttttgtctggtagatataaaaattcagcctgttgtcacaacaaagatttgcttaatttcatgtggccctgacagtataagctctgtctgctggaagggatagtgagaccacttgcactcctatccattggagtgtatccagggccaaaagaggacaaagtatgatttgattggaagtgagagtaaatgggcacaacaagaagtatcactgcatatgaaaaataatttgagagacccttgtctgccttagttcatataaattattgatattaaccataataaaatatccatgtttactttcatattaaaagagcatctggcatagagcattgctcaatacttattggttgaggaagtgaattcatttttgaatgaaaaataatgccttaaagtgtttgccaccaggtaaaattgatgttctaggaagattcatcatacttaactgtggccttcggtaccttgctgcacaacccctcactcctaccctgaagagtgtgaaccccacagagattcattcttttattgtgcagatgacagatctagactggcagatgtaaagttgtaaatgctgagttggtctaaaacccaggtctcctgagtctcagcccaggaccataccactgaaccacactgctttgtccttaggtttccagaccttcgggctttcagcttctctgtatcatctgcttttttggttcctccatacacaatacttggaggttagaattgaagagctttctgtgctttgctggggccgtgtttcacaattttgacaaatattcagcttgcccatgttagttttcagaatcctcagcgttaactgtttgaagaatatggtttgtgaaggactttatgactgttttgattatttcttccgtgtatatctccaaactatttgagtaaaaacatttttgtgcttgggagaaaaatactaagccttgccttgtttctaaggagaggaaaccgaggtccagggtgaagaaattttctcagttagatgtagtccctggaatgacagcctgagttcctgtatttcatcctttttagggacctatagcacactagttttctggcttggacacaatcttccctgaaacccaatctgggaaaccttccaagcagagacacccaattttgccaaccttgctgccaccttccccaagatactcatttcccagcataccaaacgtttcctctttcttccttcccccacccctctcctccttcccctagatctcttcctctgcccaacatttccctggctgtcagaacttgtttcttgtcaattgcttctccctaagcctagatacacccaatgtggtgtccttgacaaaacactgtgtgggggtgatgcaacagcccaaggtgtcaaaataattaggtaattaaagcaggggaaggtcagggtttcttctgtttggaaagacaaatacacacacaaagagaaaagcagaacaaggaagccaatttcacatctcctttgtttctcccttgctccttgacccaatgtgaaagcttagtgcctatgatcaattctctcagagtactggaataagaacccacctgacctagtatgcttggcaagtttgaacaccaaggaatagaacgtttaaaggtttcaacacacccttgttgttgtcttgcctgtttgttttcacaccagccccaccctgagcttctactggtgcaatggccccagatggtggctcaatgccatggatgggatattgctcaaaggagtctgtgggtacgaaaggcggagtctcctcccaggaaaccaagcctcaaggtcatcttctcttggcttttatttgtttattcgctcaacattccacagttattaagagcctgctatgttttagggattgtgcttggaacataggatggggctgagaggaagcagagagcaatatgaaatagcccctgtctgtccgggaggagcttactgtctagtgagaaagtggccatatgggcaaatatcatagttttgctgggatgacaagtctctaactgaggtccgaacaaagttctagagatctcagagaaggaagtgaccaactccctggaggactctaggaacaagtgacaaaggaggtgacatttgaattataactttaaggatgagtgaggtttctccagacaagaggagcaaagaggtcattctaggcagaggaagagcatattcaaaggcaggaaggatgaaagagcatattgctttctgagaatgtggagttcattgatactaaaattggggctatgctggggtaggtgggaatgaagagatatggctgaatatgttgataggggcaaaatcaagggtgtccttaacaagatgcctggaatatggcctgccctgatggcatcagggcaccactggagattctggggcacaggagatgagagtaaatctataaggcagtggcggcagcaacacttcctccagttgtcttcctgctggggacacactctcaggtctcctctcctcaaccatcagttctacttttctcagccattaaataaggtagctttcagcatcagcctcttcccaggaagagcacacactcagatgactgactccggggacccagagactctcccacccacagctcagccatccaagtgaagtggaactgtagagtggttacacaaagggctttggcttcagagtcccggttttgactggcttcagacacccctggtttgaaccttgcctctgcctgttatcagcaatgttatattgagccagtgactgaactcctccaaagcctcagtttgcctttgtaaaatgagattgcagggtaatcatgccttccttattgggttttcttggggaggtaaatcaagggcaacaccatgcaagtcaccagttagcataaatttgccgtgttacacaacacctgattcatagcacacggaagtgttttgtaaattgcgtatgtgatagaccttccaattggcgttttttagccctgttaccagcttaacacatcatgtgtcttttgataatgtggcactaagatgtgggcaagaggctcccttaccttgggccacatactttgtttctgaaggtaaatgccaccatgtaccacagacaaaatagcaaataaacctgaaaaagagggtgtgggcatgtctatcgttcaggatccagtactcatagctggcgtagctggacccataatctcaaacatccgtttttgtgacaaaaaccgttgaggcccccagatctacagatattttgccctgtgtcgttgaaacaaaaggcgaatgtgtctagacgctgtgaatgtttgagagttgtgctattatggactttggagatgggagttgtacaattacggacttggagatggataatgctttgaagtacaaaaaaatatttgaatggttaaagcacttaggtaagagaaataaaacaattaattcacttgttaaatccttcctctcagcataaatgtaatagattcttgataacaaagtagtgctgagtgtccatttgcttgcttctctttatgttgtaatccatgactctgaaggtagtcaccagttagcatgaatttgccatgttacttatggcagttgagggatagtttgcaaagtgaaataattcatattattcttaaatttgtgtatttgtaggttgagacataatctgtgtgacaaatatgatacagattcataatattttcaactaattggctattaaaggctggcattattagtagtttaatgttcttaaagaaatgattaaataagacagaattaaaattccaaaaaattaaaagaattagctttacctaaataattttgatttaaaatgttgagatatattatcatttaattatagttttcttttgaattttaactaataatttttaatatttaaagttttttttttttttttttgagacagagtctcgctctgttgcccaggctgaagggcagttctgcgatctcagctcattgcaacctccgcctcctgggttcacgccattctcctgcctcagcctcccgagtagctgggactacaggcaccccccaccaggcctggctaatttttttgtatttttagtagagacggggtttcaccatattagccaggatggtctcgatctcctgacatcgtgatctgcccacctcagcctcccaaagtgctgggattacaggcgtgagagaagaaataattttgaaaatgtatacagaaagtactttttaaatttttttacatttactttcatttgcatttttaatacaaatatagtcaaattgtaggcactttgaataccgttagaatttgtcatactgttttttagatcagcattgtccagtagaactttcttatcacagaaatgttcttcacctgtgctgccaaaatggtaaccactagacatatgtggctattgactatgcgaaatgtggctagtgcaactgaggacatttaacttttatttacttttagtcaatttaaaattaaatttgtatatctacatgtagctagtggccattgtgttgaacagcacatttttagatcattgaaacagaacaagtctagaggataattgaaatagaaaaacacaaaaggcctgcagaaaagaagaaagctggaagagaaacagaaataaagaggtgatctgcctaattatttaaaatagaaataatgagagtaagcaaattgacttacatgaagaaaagccagtgtaaactggaaaaaaaaatggaaaaaaaaagcagcagtcggataatatacaacaaagacaaagcaaatgcttgaatgttagcatcaagtttttagaataataatactatttagctaagcataatgatgcattctgtggcactaatggatcaatcatttcaggtgaaaaaaagagaaaatttctggatctagtgggaattacgtggaacgtggtgttgaaaggtccacacatgtaagacagattaaaaaggaacaaaatgaattttcattactcaattcatcaagattgctccaggggcaaaagtcacattgaacaactaacagttatgcatattactgaactataccgaaaaagaaaacaaatatatcaaaattaatatcactggttttatactgcctgtaaaggtacagattttgatttcagtgaactaaaaaaaagcaatttttagttttagtcatttatttaaaagattggcaaaagcaatcctataatgacactaacatggatgataaggaaaaaggtatagaagctagattttaggcaaaaatccagaagcattctttgtactatatatggatcataatttaaatttgttactggaagatgagcctcaattgtgctaactgaaattacatttggaaaaattcaaagattatattcagtattttggggacctgcccaaagatagagcatcttgaaaaaaatatatcatatttgatctgacaagcattcttgaacacaggaaggagaatgctattaaaacaatttgatttaatagagacaagatagaatatgcactagaagaaataagcaaaacagtagaatatcctcaaagaaatattgaattatagtctttggtggaaaaaaattaattttgaatttacactatcccctgttatttggcatgaattattgctttctgttaatattattagcaaaatattataaccaaacacatcaaagtttcgctttttcacttttaaataatttttttctttttttaattcaaagaaaatggtttttcaggtcaggttctctggctcatgactgtgatcccagcactctgggaggccagggaaggaggacgtcttgaggccaggagtttaagaccagcacgggcaacatagcaaaacctccttctataaaaaaaataagtaaaaataaaaattagctaggcatggtggtgagtgtctgtcgtcccaactgctcaggaggctgaggcaagagtgtttcttggggccagggtttcaaagatgctgtgagctgtgtttgtgctaccgtactccagcctgggagagaaagaaagaaggaaagaaaggaaggaagggatgggaagggaagggaaaggaagggaagggaacatagaagaaagaaagagagagggaggaaggaagggagggaggaaggaagggaggaaggaaggaaggaagggaaggagggaaggagggaggggagaatgaaagagaaagaaagaaagaaaatcgtcagaattagaaaactacaatgtcaaatatgcaatttaagtgatatcccaataaaatagaaaaaaaaactagaagaaaataaaatacctggcgtgattaccagcgacaagattcatgtataagtaatccccaaattaactatatagctgttttctagctgctatagatcagctggaaaatagagaaatttgctcaaatttctctccattaaagagaaatttgagcaaattgagcaatatattgttttcagtttttgttattatattccagcatttttaaaaaatggaaaaaagttaagaaatattgtgggcactagaactttgagagcctgtgtaaatggtgctgatagaagtaatagagatgtactgtagaagcattttctgtggtagtgatactttatcatatgtgacccataacaatgctcaaaaataaaaaataagatttatggttcattttaaaatctaagtattgttataataattttattaacaattccagctgctattctctcaggcaaatggatgcaagggataatctggtgttgaaccctccaggaaacacttggaatttccttctgagaactagaaaaatgggacttttgacagacagctatccgggtcattaaagatagagaaggagcattttctgttttttgttgtgatgatttctttcttattgttgactttggtatttactgagaatacagaccgctaatcttctgtgagcccaaaaatatctgggttttctaatttttgagatgtttatctgaactcagaactaagtgacacagagacccgggctctggttgtctaggaaacatttgaaacaagaccagacgtcttttctcttaaacatgatcccccttgatttgtaagttctcatgcatttgaagggcatttaactccccacattcataacgttttctagccttcaggtataggttgcattttgcaagaggcatttgacgcatgacaggaagtctatcaagggaaattatacctaaacctatatctgcatccgtatctatccctacatctatagggatctgtccagcgtttctgtctttcaagtatgcaatttcaaacttcttaccagtgagagagagaaatataaactggacccttgtttgaaaatgcgagtattaaaaagagccatgtctaatgtctaattctctgaaacaatttctgggtgcaatatacctttaatgctaaggtgttattcttctaagtgcctggttaacataaaggttttatattatacaaaaacataataccatgattatggaaataaaaagccacccacaagcttactatctttacaaatcatctattttcattctttcctgtcttttccaaaaaagcatatttttttttcacagtgttggatgtgcagcacaaatataattttgcattctgatctccttcctagcatcacacatgagtaattccagtgtggtctttataatgacctatttgaatgactttaaaatattactttagtggatatattatgatttatgtcagcattcaaaaatcattaaatctttgggggacatttaagttgtttccaatttactttttacttctattatcaatatctctttggccacatttctgccattttttttgtcttcaatcattttctaagagcaggattgttgagttaaaagagatgaaaacttgatgaaattgttggctgttacctcctttaattaatttacttttaatcacagtctttctccctcatttaaacaaactaacttggtaactcactaattcactaaataactagctcagtgttccagtttcctggtttgttcctggtcaaatccaactggttcacagggtcctttgccttttctccttcctgacaatgagcctctggtttgcagatctttacacaaataagttgcagtgataactttttgccccaaagcctgatcacttcacagatctattgtctgacttcaaggaatttcccctctgcaaaagcctcgatgggacagtgtcagtgattgtgaaaggagagtactggtaggtcagatgaggctgggctcctggccatcagctctttctgtctcttaccaattaggtctgtgccaaggcatcttgggctccgccaccaacttgtcccactggctcttgctaaaaggtaggcaaccatgtgagcgtgggcactggtgctggtacttaccatatgcccgcttttcctggaactgacctaggtcccatgaggaacacattgggcagtcaggcacaatctttaccctcaagaacactgtaggctgaggagatatgtgtgctctaagaatatggttgagagttgatgattccatagaggttcagaagagaaggatactctcatgggccctaaggtaggactagaaggacagatagaaataggagaggcaagtcatgcgtacaactgaagtcccaactactcaggaggctgaggtggggggatcacttgagctcaggagttaaaggctgcagtgacctgagatcataccactgcactccagcctgggtgacagagcgagagcctgttaaaaaaaaaaaaaaaaaaaaaaaaaaaggtagaaaagaatatagaggatatttatggttggtgcagaagtagttacggtttcagcccagtatccacaagcagagctttttaattcatcagaattagaaaagtacaatgtcaaatgtgcaatttaagtgatatcccaataaaatagaagaaaataaaatacctggtatgattaccagagacaagattcatgtataagtaatccccaaattaactatataactattttccagctgctatagatcagctggaaaatagagaaatttgctcaaattggtgtgatggcttgattgctgccacgatcagctgccctcctccaggctctgcctacacctgcacacaaaacactatggccatgcatagacagggtttactctgacacccaccacagttttgatcttcgggtaaacctcacactgtggggcctcagagtgttaggtttgcttctctaagtcctcctgaaagtgattattagcattttttaaaggtgttaaataaaaattatataaggccattgttttggactacactcctgcactaggtcccaacagaccagagtaaaaaatcaaaatgatgtcatccttgatataattccacgtcaccaaacctaagctaagttgttatctgactggaggagaatcagaagaattagccaatttcccaaacaggccagtttacatcttcggttggcataataatgaagtttcactttttaaatccttacacaaaaaaggtaggctgaccatggatagaacaggaggtcattatgttattgagacacaccaggtgcagaaggataaatatcaaatgttctcgctcatgtgtgtgcactgaaaactttgatcctctggaggcagagagtagaacaatagaggccagaggctgggacgagggtatgtgtagtgtggggcagagtgatgacgggaggttcgttgatgggtacatgtatgtttctcccaacacatagaaatggtaaatactcaagatgatagacccttaaataccttgacttggtcatcacacactctatgcacataacaaaacatcacatgtaccctataaatatgtacaaatatcacatataaataaacaaaaatttttaagacaaccttaaaaaaaaaggcagcctgaagtaacctcatgttaattaatcagttatttttctcctgttctgtctaaaaggaactaatagtctttgtactttgctcctgctttcttcagcccttctctgtctataaagcaaacctcttctgctccgttcactgggacacttacttcattgtacggaatggagtgttgccggattctagaattgcaaatgaagccaactgagatctttaaactaaatttgttgtaattttgtcttttgataaaagagatgtaatcatctagagttcactaaacccaaggatgtttaaaatgaatggagagttggccacatgcccgaggttcacctattcacccaggcattaccatgcaggccatttatttcataatttctcatgagaaactgtggcaatagccagagataacagaggtggcagatgagtcaaggagggagggtgactcagaggcagccatctctgcccccttcactggcatccttgagcatgccagcgtccatagagacttagacttctgtttggatattgctttaaagagattaaaggatctgcattcctggaagcctccttccctttttctgccctaggcccttcagaccatgcctcagttcattcctttgtaatgatatgaattcacattccttgggaattttttctatgccaggaattaactctgtcttttacgcgcattatctttttttgttttgttttgttttgttttgttttgttttgttttgttttgtttgagacagagtctcgctctgtcgcctagcctggagtgcagtggctccatctcggctcactgcaagctccacctcccgggttcaagccattctcttgcctcagcctcccaagtatctgggactagaggtgcctgccaccacgcccggctaattttttgtatttttagtagagatggggtttcaccgtgttagccaggatggtctcaatctcctgacctcaagatccgcccgacttggcctcccaaagtgctgggattacatacactcattatcttatttacttcttaccaactgccacacagataggatgattattcccactttacagatgaggaacctgtggcagaaagaaagtagcccatggtgagcgtagtagtgcctgatagagctggaatttgaagataggttgtctgactctagagcccatgcctccggctactctggaagtctgccttctgtaaacaggtaaacttggaatgtctgcatcacaagacaaaccccataatctcaaatagcaagtgaaagctgaggatccttagacttggcttgtaatagagcaagaaacctagaggagaggaaattagttaaggaatatttttaggcagtcttcttcctatgcaggcagccacagaaggcctggctggtggaatatatctcactagttcttgctggtcgttggaggaggtcagtggtccttaggaaggaagagaaaacaacatttctggaagagaaggagccgagctgtttaacagctctcttccagactccacttctctgtattctttgtgcaatgcttttttttttttttccctgggggcggggtggggggagttgtgatgaaatttattaccctcaaacacagcttcgatcatgtctcctactgctcaagaacctccaaataacagtttcccaggacctaaatcagcaatcttcaaacttctctaaatatgtaaccctagtgctgaagaagactggcatgtgcacctcgatagatttatggtacatgtgtgtgcctgtgtgtagagccatgccaatagattatgcactttataataacaaattaaaactgggaagtataacagaagatatgaacatgaaatgaagactattttcaaatgcatgctattcttaatgacatcttactatcttttctactgtctcagggcataatccacaccttagacagggctcaccattaataatagtgaatgtaaatccatacttgaagcactcttcctgaaaatttgaattttttttgtttactgtttgatatatatgatcaggtcatcattagttttatcctccccaaaatgtggctaaaggaaagctaggataggagaaaagtcagctctgccattttcttgtcgtttgcttgtgttcgttataagtgctattctcaatccacaagttctttacagaaatcttttaaaaatcactggtctattatgtgactttttattcagttaaatctgtataaaaatccataaacccatgaaactagataattaagaatggtgttgtgggtaccttgcagaccctctagggcataaaatttcgacccctccctcagaatagccttagttggacatgtggcaagaaactgtgtgaacagggatctaacaaggatcccatattcaatctgtatatgaaataatagtacttttaaacttttcccttttaaaaaataaaagtaaacctgaatgaaaattcattatgatttgcacacccttctgagagcgcacactgcactttggaaatctttgatctaccgagataggatttcttaggcttccaatatcagtgacctacttctttagccacacctccaatcatcaccgtacctgccccattccgtgatgacccacacactcaactgtacaaacacatagggctagtcatcttctctggaaactttcttaccacaagacctggctcaggctgttccctctgcttggaacacccttgctttcctttgctgcctttagaaattttactaaaaacaatgccatctaacatttattgacttcttactacgtgctggacactgttgacaattctagaaggtaggtgctattctgagaaagctgaggagtagaaaacagttcaaagccagtcagctgggaaatgagaaatccagaaaacaagcccatgagagctgctaatgctcatactgtatcactgtaggtgtgttttaatttaattttaatatcagaatagataaagtcttcactaaacccttcccctctttctactactagggagatgggattagttgcttcccttttaagttttcacatcagcttattgataaatatcatatagcatttatttcactctgccatatactgctattatttgtgtacatgtctcatatctacaactatactgtgagctctttagatgagaaaccacactggatccttcatggcatatagcagagacttagtaaagtaaatatggtcattgaatgaattaattaatggatagatggaagaataaatgaatggatggggaaaaacaaaagtcataggttgggtataatgtaacttgaaatttcctggtggcccgagaagcacactacaatctagtatgcgcctgcaatagattacaaagatttcaaacctcaataggagacaagatttcatttctcaatacttatgagagcacttgtgagttaccttactctttaatatgtaatggctagttgataaaatctcaaacttgtatctatgtaatctaacatcacaaaacactgagtgcattaaagagctgtttctctattttgaatttacactggaaaccttgaatgactcgagaaggatttttggatacgccattttaatgttggtgataatgaaagtcatttacagaagaaattttagctgattttatattgaaattaacaaacacatgcactagagtttaggaatttctcttccttaattttactgactcagaaactgagacttacagatgtgaagtgatttggccaataatcatgtcatccggaagtcacagagctcatacccagccccaacctttgagacttaattcccatgctatttccccattctgctcctcaaacacaaaatgagttctagaatgtcagacatttgagctattagaaactctttactatgggcatagagtgaatagccccgttttggtattttggaaatgccattctgtataaatctgcagcctggagcattcttcgtagcaggggagggactagcaggcatttaatccctagatgactaaacagaagcccagtccatctgtgataaatattccttccaagggccacaggtgtgcacgacagagcaagcatcctccttttccgcctcagtgctgaaaccatcataaaatcattccatcctctgcttggtcagttaattcttccttccttttttttaaaaaaaaattcttattaacatttgactgtgttcttatccagaggtacaataaaaagcactctgatgataagctgcacagtaaaacaggctgtctggcaggtacctactagagtcagggatgtgagggtatacagatagggtcttattcttagttctctagagctggaagagagaaaggcaaaacccaaagcctccttgccccttttctcaccttccctagacgtggcatctgcacctggccagatgacaaccatagactcccttgaaagaatggttattaaagctaccttcaagtcccatcctataacaatggtggaagtgagagtggaacctagaggacagaactagagaagaagggtgcacactaaaagcaatatgtttcccattcattattgagcagagcttcctgacagatacacaacagagaaaggggctgctttctggaatagtgagcctgctgtcattggaagcacttcatctggacgatccctccttgagagtagtatatagggcagatattaagagagtagatggtttggcttcatcactgctaaaacaccccttccagcaatagcattttgtatttctccaaatattccacatttgaatgcctagggagatgggtttagcaaagctcatctgttccgtaaaacttggccacagtacaacgcctgctgcctggtcacaaagcattttatggacagctgtttccacccctatttcagaagtgtggtgaaaagggaattcagagacaggtgaggggccttccattacgtgagctggtgggaagacgcccccagctccagagctgcctcatgcctgagcccacacacttctcaattggatcttagctcagtgacttccagccatatgaaatgaacccattcccctgggaagcccactacccctaggaatgccttagaaatcttttttctagattataaagtcacacaatcgcagtgtttgaacagtcttagaggtcatggagtcaaactctctggaatccacaggaaagcaatgtttcccactgactcctgctgagaactcataaatggaatgagcccagtggaatcctaaggaattctgagccgagaaataaatagggcaaaagccacagccaagtcttctgcaagcttatcccaaggaaacatggagccagtctttacggagagaaagggctgagttccaggagaggggaaaatgtataatgcattgaggttgcaagtgtttagagcaacagggaacaaaaatgacacaacagtcaggcacagtggctcacggctgtaatcccagcactctgggaggccgaggcaggtggatcacttgagcccaggagctcaagactagcctgggcaacatggcgaaaccctgtctatacaaaaaatacaaaaattagccaggtgtggtggcacgcatgtagtcccagctactttggaggctaaagtgggaggatcgtttgagcccagggagatcatggctgcagtgagctgagattgcgccactgcactccagcctgggtgacaaagcgagaccttgtcttaaaaaaaagaaagacacaactgggagtcatctttctcttgaatggtctgcatttcacagatgagaagttagcagaatctaggggaaagtaatgaatggggaatcaagaaacaggccaccactgacttgctgtgtgacccttggaagaacttttaacctctctgagtcacagtttcctcacgaggataatagtgtgtgaccaggttgattgggggatcagatgagataacaaacatgaagcacttttaagtggtaatattagacaaatggaaaatgccaatatgatcaactctgccttacgtgctttttttagtgtccccaggcaaaagaagtgagttgatattatttttccctattttcagatgcagaagtcaaggcacagggatgtgaacatacgtgggtcatgtttcatagtacctggaccaagagaagaggtctctctatgttgagaaaatggcaatgccttcccacagcatggtacttcttctccttctgagaatgatactgttacataaaggttttcggcggtgccccagaacacggagatttccttctgcccagctgcatgaggcacacatatcctgggatggcattaggaagatggccactttcacatcaacttatgtactctggcaccaacctctcttctccctacccagcccaacttcccacccactgctattgggatgatatgtgctcttgggtaaggaatgcatatccaaatgctacctcagatcagggaggtaatacctggcctcaattctctgcccttaaagaatcttgcagccaaattgggtaaagagtcaagacccatcggtgtgctttattcaggagacccatctcacgtgcaaagacacacatgggcccaaaataaagggatggagtaatatttaccaaggaaatggaaagcacacacacacaaaaaaaagcagaggttgcaatcctagcctctgataaaacagactttaaaccaacaaagatcaaaaaagacaaagaagggcattacatactggtaaagggatcaatgcaacaagaagagctaactctcctaaatatatatgcacccaatacaggagcacccacattcataaagcaagttcttagagacctacaaagagacttagactcccacacaataatagtgggagacttttaacacctcactgtcaatattaggcagatcaacaagacagaaaattaaccaggatattcaggatgtgaactaagctctggaccaagaggacctaatagacatctgtggaactctccaccccaaatcaatagaatgtacattcttctcagcaccacatcgcacttattctaaaattgaccacataattggaaataaaacactcctcagcaaatgcaaaagaatggaaatcattacagtctctcagatcacagtgcaatcaagttagaactcaggattaagaaactcagtcagaaccggacaacgacatggaaactgacaacctgctcctgaatgactactgggtaaataacaaaattaaggaagaaataaataagttctttgaaaccaatgagaacaaagacacaatgtactagagtctctgggacacagctaaagcagtgtttagagggaaatttatagcaccaaatgcccacaggagaaagcaggaaagatctaaaatcgacaccgtaatatcacaattaaaagaactagagaagcaagagcaaacaaattcaaaagctagcagaaggcaagaaatgactaagatcagagcagaactgaaggagacagagacacatggacacaggagaatgagaacacatggacacagggagggtaacatcacaaactggggcctgtcaggggtggggagtggtggggagggatagcattaggagaaagatctaatgtagatgaaagtttgatgggtgcagcaaaccaccatggcatgtgcatacctatgtaacaaacctgcacattctgcacgtgtatcccagaacttaaagtataatataataaaagaatctcatagccatcatctgttgtatacaacagacctcaaattagtctccctctgcttctccaacagtgtggcctcttctatgaagctgtctacccatgggtttccccaacatcccatcccccagccctcaggtttctcctccccatcatcttcacttcagaaagagaaatgaaaaagaaattcaagtgactcatcggtccacataggcaggagtgggagaggctgagagagtgaatttgtgggtccagatgaatatttccgcaggcctcttgactgcttcacacgatctgctgtgcttcatgaaaaagaggatataaaaatctgagtggtgccatattgtctccaaaagcagccagagtgaaaatgaagtgtgactgctgcctcccaaaacgcagggcagctcctccctcacatccacaaatgtggttcagcgggctgccttgccctgtttcaggaagcctacgtggagggcactgtggagccccagccaccttcttcacacagggctatctggggcttcagtgccaggtcccctggatacacagcagagtctgctgggggcactgaccaggatgccaatgcaggggtgctttctcggaggctcatcccaccagcagtgccaggtttgacaagccccacaaatctatgctctttggccgccttgagaactttccaaccagggattcttactgagcagagtgtgcatggcgaggaagagtcagagtggggggggccttgcccctccctcaaccagagggactctactttaatgtaccttacatactgggcactttcctaagatttcactggaaaaaatcggagcaaacaaaaatggaaacaacctggaaagcccccatgggtctagcccagtggttctcgaacttgagtgtgcctcagaatcttctggagggctagatataaaacacagatggctgcgcctctccccagacttgctgattcattattgctgatatttcatttttatgtttttgtttttttgagataggttctcactctgttgcctaggctggagtatagtgacccaatcactgctcactgcagcattgacctcctgggctcaagcaatcctcacacctgagcctcccaagaggctgggactacaggtatgtgccaccacacctggctaatttttctctcttttgtagagacaaggtcttgctatgctgcctatgtctctaactcctaaactcaagcccacctcagcctcctaaagtgctgggattacaagcatgagctaccacacccagcctaatattctatacttttaataggctgtcatgggattacaatgttgctttcttgggaccaacattaagaaccactactctggcccagcttcccttttagatgccaggacaggtgactcttccaaggtgcctcagcaacttagaggcaaactggaatagagcccactcgctgacagcccctccccctattttctatcccacccccacttcatccagggcttttctatcacacctgctccagcacagcagggccctggatagagaaaactgctccaagctgggctttgtcccatgaggaaaggggcaccctaaagcagagccctcgctcagcccagccgtgtcccccattttgggaagtggcaccctacccccaggttttcaggatgcccctcaaacttgacttatccatgctttcattccttattgagccttctgtgatttctttcctttattctttcaccgaacacatccttactgagaccttctaggtgctgggtgctgttctagatcctgagaaagatatagagacctgtgggagacaggctcctccctgccttcaagaactttgcagttgggtaggaaaataagcctaatcaagttactacactgtaaaggggaaagaagggagtgtctcaaaaggtgtgtgaaggatgaggaatggggaggggctcattagtctggcagggagctgttaacagagacaggcatgggcatcggatgaagaggacatagtcagtgtaagaaattaatgattaaatcatgagaaatatttattgagtattcactgttcaccaattgctttacatcttttatcttcacaaccttccctataggaggcgccattattaaattcttgtttacagatgaggaaactgaagctcagagaagccatgcaacttgtccaaagccacacagctactcaaactcaggctttctggacccagaacctgatctcttaactactactctaccatctacgactactgtaccatctcttactactgtactatcttaattgctgtcagcaagggacagacagctagcacctatttggagggcagtgaagagcaggtttcctgaagcattccacaagtgtcagggggtagttggaatacagtgagaaagataggttggggcttaatttatggagaggcttgactgccagggtgagtgatttgtacctaactcaggagattgtaggaagccactgaaggattttgaataggaaaagtacacgtgacacagctgtgttttaggaaaattcctctaacagcagtaggcagattaggttggagtgggaagacattgatgaccaggacaccacactgaagtttactgcaggattacgggagtgacaaaacaaaggcctgacttagggcagtgtggcagaaatagagcaagactcaaggacagatgctctcctcaccactgttattgtaaataattttgaccactgaccacattcttgacctatcttaactcatgtcattctcccagtaggctgctacatcagattgctttccctttgacatctcttgccccttcttcatctctaccaatgtctccccattggcagttttcctgtttggggatcagggtctcagacctcttctttgaatgtataggaatcacaggctaaggaaactcaggattgaggaatcatgatcactctcagaactgtttattctctccattctgaagctgatgaaacagaggcctggagaggatgagtaacttgtatctaggaagtgatggtgcttggatcagaggtgggaaatctttcccccacctgttaacgtcgtgttcccattctcctgcttcctgggtcaggctggaggccctgcagctgtcgggagtgccagatggcatctcagtcaccaggctggagggtgcctgaggaccctgcggtcagccccagctggcagcaccacctcccaactggcactgtggacaccagtgttcagaggggctgagtgaaggaagcacgtgtagcagaggggcaagaatgcaggtgactcatgccctttgcagtgtgacttacagctgtccatggggcatcccagcctacgtgaggcagttgccatctttgctgtcagagagtcactcttgacccaggcagtaactgacgtcaagagcagaggagacagagtttggttgtaaaacggaccaactgtgcagaagaagcagtacccagctatgagcgaggaaacctcggctccactcacagatttgctcttgccctttacaactgtgtgaccttaggtaagatgtcacctgacctgaataagcctcactcttctagtctgttcacgggtacaataatctttgccctcactatcttggagatgtgaagagtgatctgtaggctagagcttgaaggaaaaaaacaaagccttctgcaaacctagagagttccaaacgtgtcattactattatcatgattcatgcgaatactaatatcattaaacattcattccaaaaggaaatgtgatgataaaatgttaacatatctccatgaggggtacatttgaactccgtactgtttttgcaactgttctgtaagtttgaaactacttcaaaataattttatttaaagttacattctctttaattaccttctcttccatgcaaccaggttcactaggcagcagccatacctcagtcaataagagaggacaatctctgcccttgttgagtttatatcctagcaggcaagggcaaatattaatcaacacaataaatatgaaaattgtctgctgtgttcggaggtgctaagtcctatggggaaaaaaagtagagcagcatggaggggtggggagcagaagtcccagatttggagtggggaacaggtaccaacttgcaggctgatatgtaaatagcatggtcaaggtggggcctgggggagaaggtgagacatgagcaggcttgaagaagaggagactgtgaactgagcatatgtctgtaggaagagtgtgccaggggagggcaaaggactaaaataggagcacatcctaggaacaacaaggaggccagtgtggctggagcagtgtggtcagctattggagtacctgggagagtaatgggagataaggtcagagaggcaatacagggtgagtcttgtagggcctggtaggctattttgaggacttgagtttttttctcaagagtaatggggtaccaaggcaaggatttgagtggaagtgtgacattatccaatgcacatcttaagaggattattttcactactgtgctgagaatatactaaggggcacaggattgaagcagagagaagcaagggttgaagcaggtagtaggtgatcacaatattccaggaagaaatgctggaagtttggatcagaaggatagctgcaggtggggaaaagcgattggattctggatacgttaaaagtagagccagctggccacaatggctcacgtctgtaatcccagcactttgggaggctgaggtgagtggatcacctgaggtcaggagttcaagaccagcctggccaacgtggtgaaaccccatctctactaaatataaaaaaattagctgggagtggtggcacgtgcctgtaatcccagctacttgggaggctgagtcatgagaattgctttaacccgggagatggaggttgcagtgagccgagattgtgccactgcactccaacctgggcaacaagagcaagactctgtctcaagaaaaaaaataaaaaagtagagccaacataagtcttttaagctttttgacctaaaatccatctccaaggccctttctagccctaaaattctttgactgctctagaatatcatcatcatctcctcaaacccctctgcccaagtgtgaagagagaggcagacattgtgctacttttacacttacagatcgaaattctctcaagtggcctgaggtttctgggatgacgtttgctcggtcttatttcatgcctgagtataaatacagcacacaagaaaaggttgtctttccctcaatcagaggaactgccaagcacagatccaacccacagggactatggagaggccggaaatgtcaaaaagagaagtatgagcatgaaattgtactccctaatgaaacacctggcccctgagaacaaagtccatcctgtcactgttcttgattgacaggtgtatggtctgtcacttaggcaacacctcttatctgccacttggtctccccagcccagtgattccccttcaacctcccctccacattgtcactagacacacgattcctaagagcagtggagtggtctctgcactggcattctcaaaagccctgcccttgcccacgagtacctatgctgtatcacacctttatgaaggaccctcttctttagaaaaccacctcttgctcccctagatcccccagtcactggcagaggccatccaggtgggaagaagggtgaattcactttggaggaactgcaatctcttgacctcaattccaccttggcagtttctgtgtgatacagccttcttcacttcctgccctaattgctgtgcagtgttaccatgggctgttaaacagctgccaccttctaccccagacctaaatgccatccaagggcaggtaaaaatatttctcttttcacagagattgttggaggagtcttctagaagaagcatgctaggaattgtgcagcatcccaggggcccgtccagtgctcctggcctgtctggctcccttgccttgttctttggggttggtcaccctgccagctctccttcccacaaccaccccttctgtgcttccttcttaaagtgtatgggtggggctgagagttttgttctggaatcatggaggaatagaaaacatttcagctgacggggcctcagcactcattccttcgtttaataatcagtggaacctgtttctttcaccttccaggtaaacctgatctggagttgtatataaagtatacacaagcaaagcacctttggtggaagacgggtcaggagtcctactttaattgtcctccaaccactctcagagatttggaggccaagataccaaccccataaactcctaattttttcaaaccttttcattttgcacctgatgatcctcgaggtagaaagtcttatcccaactcagtcagtcaaaaaagggcctggattaggactccagtttcctgacattcagctcagttgctttaaagagctcaggcaattacttcctgttgaccaggtctgacaaaagaaaaaacaaaataaaataaataagtaacgtgatcaggcgtaagactatcaggtgcaaagatctcagggcttggctgtagagcactgggactgctggtggccatggtaccagaattgctcctcccagctcaccacagccaatggcattcccctcctctggtccactttcagtgaggtcatgttggcagcttgacattggctgtggtgggaaattagcaaataccacaagaggggagatctccatcctctcaagagctggtaattaaacattttccagcacaccagtggcttaggggtatgcagtcctgtctaccaagtcctgaaatagaccttcttgtggaatatgagatgttcaggggccaggtgcagtggcttgcacctgtaatcccagaactttgggaggctgaggtgggcagatcatttgagcccaggagttcgagaccagcctggtcaacatggtgaaaccccatctctgctaaaaaaaacaaaaattacctgggcgtggtggcatacacctgtagtcccagctacttgggtggctgaggtacgagaatcacttgaacccaggagacgggggttgcagtgagccactgcactctagcctgggcaacagagcaagacagccttaaattaattaattaattaatttaattaaagagattcagggactagtcatgatgaatcactcaaggagaactttggaatggtctcatccataaatgacagactataatgcctaaaaatctctctgataaggtatatgggccaagcagctgggtagaagaaaatagagaatggtgaggaatgtggtgaagcatgactgtctcttaatttgctagggccgccataacaaagtatcacagactgggtggcttaatttagtgtcttacagatctggacactagaagcccaagatcaaggtgttggcaggaatccttctgagggctgggaagaacgcagctgctctacatccctctcctaggcttgtagatgatgatcttcatgttcacacggtgttctccctgtgagcctacccgtttccgtgttccaatttcccccttttataaggacatcagtcatattcgattaggtcccaccctaatgacctcattttaacttgatcagctgtgtatactccccatctccaaataaggtcatattctgaggtacaagaggtttggccttccacatatgaatttttcagggacacaattcaatccataacatacggcaggatgaaaagaaatctgagggtcagatccgacctaccagctgccgtgatgtagtctactcacaaattttataggtacggaaactaaaactctcaaagagaagcaagtggctctccaaaggtagtgggccgagaaaggtggagacaggccttctgattcccaggccagggcctctctatgccacttttggtctcccctgatttggaggacgatttcaccagctggtgcatcacctcaacaccctggaagagtctgtaagcagccagagggccaggatgtgtctgcccatctacagactcctccgagctggcagcatgggtaaaacatatagaagatgttcaaaaatcccatgttgaatttcatcaaactcactgatttgtccttagtagcggttctgagcgctcctgggctcaaggttactttctggtccctgcaccataggttgctttaaggcctttattttttctggtagtccttttttttttttttttttttttcactacagactgacaaagtggagatagagaagaccagcattagaactccagggttcacccactcttcttgatagtaattgagacagcaagtcagatcatttgtttcaattcccagacctactagatctatcatataccagcagtttgataccatactaaccccctctgagtctcgtattcttatctgaaaattggggctaataatacttagcttactcaacaactcgttcatttgttcattcaatcaatattgtgggaactgctctgcatgctgggctcataacagtgaaaaagcaacatagtccctttctcttgcccttcaatatgagaaacagactacagtctattgttctattctgtgataatacatcatagaaaactactggctgctggggaaacaggagcaggataatctaggtgaacttgggcacaggctgaatcctaaaggggaagggccatccaggtgaagggtggagtgggaaggagcaagtattgtcaagggagcagaaggggtccacagaaatgtgctgggcatagggattcgcatgcccaaagatctagatgacaaagagtatggtggtgaagattaatgagataatgagatatgtatcacatcatgcctggcactagaacatgctcggcaaatgcctcttgcccttttcttttaacaatatacctatagattttatttctcatctccaagaccagaaatgtcagcataaaatggaaaaatatacattagtaatatgactgtaaaattattgaaatccatgtgcttatttatgatattctcaacaaggcatatttattcattggaaaggcgtgcattttatttttcagatacatgaaagaaaagtattgtaaatatatttatgcatgtgtattttttttttgcatgaaacaactactcttccttgcccatgaaaggaagagtagttactaccatctgacttcagattttcattgaatacaaatgttattgtttgttttataggctttcattatcttcacacacctttcaatctttgatcccaggcttttcacatcagaattctccactgaactcgagactatattgcagaagctttatgaaatatatacataataggaaacccgctagtacccattagggtacattgctcataaaagtaagaatgagagcaatgacctccaatgcatatgtgtttttattttgtgtgggttttttgtaatggacacaccaacagaaagcatattccacctttatttaaagcaatattggcccattttgcacaaattaatattaccatttcaactgatttgttgtctagttgtctagtaattgaataccagtgtgaacagagacaaaactaggtagaaacatcatgagatattttgataagcacttagtattttttccagatgtgtgcataagcactgagtataacttttccttctttccttttcttttctttttttaagtataatatttcagtgttaatcacttgtatttgtctagtgctttgtcagtcataatgcacatcctcatgtgtttcttcacagtatatgcatgaggagggtggctatttctttttattatcattctcattttacagtgacataaatttgttcaaggttgtgtaggttctaggctgggtacggtggctcatgcctgtagtctcagcacttgggaggccgaggtgggtggatctcctgaggacaggagttcaagaccagcctggtcaacatggtgaaaccccatctctactaaaatacaaaaattagacgggtgtggtggtgggcacctttaatcccagctactcaggaggctgaggcaggagaattgtttgaacccaggaggcggaggttgcagtgagcagagatcacgccactgcactccagcctgggtgacagagcaagactccatctcaaaaacaaaacaacaaacaaacaaaaaacaagattgtgtaggctccaagtgacaaagtcaaatgtcactccaaaaaattctgggctctagaaaatctcttccagatctcttccagttctgaattttggtagcataaaagctctgtgaggacagagaccttgcctatttgtttcagcattgtatccccattgtttagtataatgcctggaaagtctaaagaactcgatcaacagtcgttttgggttcaattgaagtctgtaacctatgttttcttgtaacatcaagagttgacgctgaagagattatatgttgaggaatgctaagcagttggtgcccaagaaggtaacaaactaaaccctatataagacccaagaatatatggcatatatctgtgccagagcagcaaaaacagcacccacaagagtgtagtgattcatgtcacagacaaacatcaccacagcttgtgactgggggtggggtgaagaggctgttgggatatcccctgattccattcttgcttcttcctttccctaaagatatctctacaggatgctggagctccaagggtcttctataatttggtctgaaaaattcactgggtttttccagtctgttaatacttccttcttaaagctttagcttctcaaattggtacgcatttaatttagttgcaaaattagttgcttattagtatgacatattaaaccaacaatttacccataaatagcctgctataatttacacagcattttcccaagacaatcattttatagataaggaaggaagatcaggggagttaagtgtttttccccagatcgtacaactaataatatgctgcaccaaatttaggtcttttaactcaagatctccaagtcattccagtatgacacttccaatgtgacattggggctgcctaacaaacaatccatgaaaataatggactataagaaaagcagggatgcctatttgctcctgctcaaaatcttcttttattcactgtgagttccataagcacagcccactctttcccgctccccattcccaaatctctcctgattaggcctgcagtgactaatggttgttgtagcaatgtctgtgaatttttagggtggagttggaggacctcatttctgagcacttttccccgtaatcaccttcataagaacatggtccagatgtgctctctcaatatattaaaaattaagctcattgtgttctctccaaactttctctttgtctgtagtctttagctctgtccataacatgctcacctgcctggatgcctcagtaagcaaaccagaggccatcctaagcttctctcctccactttctttctctccaccatccaatctgtacaactagttgagtcttcctctggggtggttcttcagtatacgtctatatcctgaccctaaggccactttcaagtccccattggatctcatttgggtttctgcaatacagtcgcctaactagtctccctgtctttcatttcccaccagtctctaaaatgaggagtataaggggagattctgctgtgtacatagcggaaggagcaaggctgggatccatctaaaatgccatataacttttttcaagatcaagcaacagacaatgccagtatgtgtgcttgtttctgtcccctcttaccaacttcctccccaccttattctcatcacatttccttcaaagaaaccacactgttgaacaacagttgggcattctaaagcaggactctatgcttggtcacaaaaaatggcatcctggcctaggccagaaggaagatcatagacagcaacacctaacaggaagttgacatgacctcaaaacacacattacacttacatgctgggcaggggctgaggctccccaggatgcttctaagcagaggtacccaaagagtttttctgcagcccccttagggacacacaatctgctttgaatctttgttactctttctttgttcacagtcccctgctctctgaggtgctattccacagcagggaccaagtgatgagaaaggaccactaggttttggaaccagaggcccctggtgatcatggttaattctcttcacctcttggatcagttttctcacctgttaagtgacattcaccaaactctcctcatgggtcacattgagaactgagaatcccataacatattgaggttgatgtctgagagggtgaggacattggttttgtagtcagaagaactggagtttaggtccaaggtgtaatattcactatctaatgtaggcccagtcagtgagcctctctaaacctctgcatcttcatctgttaaatgtgattaagactatgtctctcatacagggctgttgtcggggtcaggtgagacaatgcctatgaatcataaattacaagacatatctaatgttataatattattctagttgttatggagtgctttctagcaggtagatgttatatcatggcagaattctctttacagcctaactcagcatcttgcttgttagaggtgctcactgtatatttgttgtctgggattcatcacactgagtctcttgaccctgcctgcttggggagagcatgcctccagggtatatgtgatgcagagttggaaaatcccagtgaaagggatcctggcttgtctggaggtggcctgttgctgtgggtggtcaagacaccaaacagtggtgcaagaactacaagacgagagagatccttccaggtggggagcacttacagaatacctaggagcattttggttagattgcctgtttacatgtgagggtactcacacatgtttctggtgtgtgtgtatgtgtgtgtgcatgtgaagaacagagaacattggtctctttgacccaccaaccttctgcagccaagtcagccatgccttcagtggagctggggaagaatagaaagagtgctgtactggcatcacaaagcctgtgctttatcctggctctgctgtgcctcttctaggcagagcctcagtcgcatactttgtttccctaagtctaaccttcctattctatagaacccaaattgcctcacagatgtctgcacagatcacagcaggtgttaaggagcagaaagctctctgggaaatgagagtccccttcttgctacagggacactgaagcacaaggaagaccactgtccccaaaagccaggatccatttctacctgtagcaccactggcagcacctgctgttggaaagatcttcttccacaatttctgagaactgtgctctaccatgccattacagggactcactgaatactaaaaactctcaattgttcatggatcaaaagtaaatgaataggacactgtaacctaaaggcaaggataagaaaactgggatttaaatgtgctgggactgtaaaaacaaaaatgctaaggagtaaagctttacctagtaatgaaaataaaccaggagaaagagcaccacaccagagcttagaaagcttctgttctttcctgctctccccagttgttccctgaagaccaggccatgtcttcctcataattgcatattactgtgcctggcacatactagaaagctatttaaaattatgtacttgttagcatattgacatgataatatgttcacaatgtatcatagtgagttataacagcagtatgggcagtgtgtatacatttctgtaaagaagactggaaactgataaatatcattatgtctgcatgatataattcaaagttatattagttttcttctttttaatttctaatctgtaattttctacatacagcatatgttagttgtgtaatcaaagtttaaaatgtacatataaatatgtaactaaacagttgatccttgaacaatgtgaggattaagggtgctgatgccctgtggtcaaaattccatgtataacttttaactcccacaaaatttaactactaggagcctattgttgacagaaagccttactgatgacataaacggtcaattaacacacattttgtatgttatatgtattatatactatattcttacaataaagtaagctagatacaagaaaatgttagtaagaaaatcataagaaaaagaaaacatgtttactatttattaagtggaagtggatcaccataaagatcttcatccccatcatcttcacatgagtaggctaggaaggaggaggaagaggagggattggtcttgtctcagtagtggcagaggtggaagaagtggcaggagagacaggagaggcaggcactctgggtgtaacttttactgaaaaaaaattggcatataagtggacccatagagttcaatcctgtgttattcaaggagcaactgtattttttagtacatcctttagctttttatttccttttggactttcacagtaagttacaaaaatagggatttgggagtttgagaaagaacgagatgttaattcctgtaaaaattaaagtgtttgtaaatattgtcatcagaagcaataatggaggttgtttttgctcccaatgacatacaaagcaccactaaatgtgagacactagcatgtagtagggactctgaaagagttcatactgtctaacctgttaattccaatcacattgaaaacaactcatatatggagacttggctcaccaaactcaagatatctacatgctggatcactatattggtataaagatattttttaggttttaaaatgtcaagtgtacacatgtcattttatagaaatgttcatataaaataatgctgtgtcctgtatatatctacttataattctgtgaaaatttatgtttattaagaaatataaaaactcaagcaatgtaaaatagaagttacttataagttatttattttgtagtatcacttagttttatcatttttattgaaaccaagtagaaaatataaatgcttgcacatcaataattgaaatactttccaagagttcctcaaaatttcagacagttgtagcagaaggtgataatgaagcaaacattcatagactacactattgctgggagtgtaaacagatctatgttctctatgcatgacttggatatacatatgtcaaattttagaagtgtcattcacttagttccatcaattctatgttaagaatctcattcggccaggcgcggtggctcacgcctgtaatcccagcgctttgggaggccgaggtgggcagatcatgaggtcaggagatcgaaaccatcctggctaacacagtgaaaccccatctctactaaaaatacaaaaattagccaggcatggtcgcacgcacctgtagtcccagctactcaggaggctgaggcaggagaattgctggaacccaggaggcggaggttgcagtgagccaaggttgcgccactgcactccagcctgggtgacagagcgagactccatctcaaaacaaaacaaaacaaaacaaaaatccctacaaggagaactataaaacactgctggaagaaatcctagatgacacaaacaaatggaaaaacagttcatgctcatagactgaaagaataaatattgtcacaatggccatactgtccaaaacaacctacagattcaatgatattcctatcaagctactaatgtcatttctcacagaactagaaaaaactattctaaaactcttatggaaccaaaaaagagcatgaatagccaaaatagtcctaagcaaaaagaacaaagccaaaggaatcacattacccaacttcaaactatactattcaggtgaaatatttggatcattaagaaaaaaagaaggagaagaagaacaaactatgctataaggctagagtaaccaaaacaacatggtactggtacaaaaatagaaacatagaccaatggaacagcatagaaaaaccaagaaataaagccacacatacagccatctgatcttcaacaaagttgacaaaaataaacaatggggaaatgatgtcctattcaataaatagaacagcgatagcttgctagccatatgcaggagaacgaaactggacccctagctttcaccataaacaaaaattaactcaagattaattaagggcttaaatgtaaggcatcaaactataggaatcctagaagaaaacctacgaaacgccattctggatattgcctttgggaaaaaatttatgactaagtatccaaaaacaattgcaacaaaaacaaaaatagacaactgggacctaattaaactaaagagcttctgcacagcaaaagaggctatcaacagagtaaacagacaacctatagaatgggagaaaatatttgcaaactatgcatccaacaaaggtctaatctagaatctataaggaactcaaacaattccacaagcaaaaaacaacctcatttaaaaaaatagacaaaagctatgaaccgtaacttctcaaaagaagacacacaaatgaccaacaaacatgaaaaaatgctcaagttcactaatcatcagagaaatgcaaatcaaaaccacaatgagataccatttcacaccagtcagaatggttattattaaaaagtcaaaaaacaacagatgctctcaagactggagaaaagagaatgctagaacactgttagtggaaacgtacgtagttcagccaatgtgaaaagcagattggagatttctcaaagaacttaaaacagaattaccatttgacccagcaatcccattactagggatacatccaagagaaaataaattgttctaccaaaaagacacatgtacctgtctgttcatcatgcactcttcacaatagcaaagataaagaattaacctaggtgcccatcagtcgtggattggataaagaaaatgtggtacacatatgacatggaatactatacagccataaaaagaatgaaatcatatcctttgcagcaacgtggatgcagctggaggccattatcctgggtgaattaacactgaaacagaaaatcaaataccacatgttttcatccataagtgggagctaaacaggggacactcatggacacaaagatggcaacaaaagacactggggactactagaggggaaaggaggggggaagggttaaaaaattgttgggcactatgcccagtacctgggtgaaaggatcagtcatactccaaacctcagcatcacacagtatatccaagtaacaaacctgcacatttaccccctgaatctaaaataaaagttgaaattatgtttaaaaaattcactcaggaataaccagagacccaaagacatttatctcattatgatttgtgatgggaaataagagaagttaccaaagtgtccaatagtaagaaacacattgactcactatagtcatagggtgaaataactaggcagccactaagaacatttcatagtggaagagtatttaatattatgaaaaagagtttcattaaaacatacaaacagccgggcgcagtggatgacgcctgtaatctcaccactttgggaggctgaggcaggtggatcacttgaggtcagaagttcaagaccagcctggccaacacagtgaaaccctgtctctactaaaatacaaaaaaattagctgggcatggtggcgggtgcctgtagtccccagctacccaggaagctgaggcaggagaattgcttgaacctgtgaggcagaggttgcagtgaactgagatagctccattgcactccagcctgggtgacagagtgagacttcgtctcaaaacaaacaaacaaacaaacaacaaaaaaaatacaagcattagactaccaaatagaacatgccatgtaattacactttttagaaaagtgaaaatcaaaatattgacaaaggttttttctaggtggtagaattatgagtaatttaattctttttttaatttccaaattttctataataaatatatagtattttccagttaatgagcattaaaaatgggtagcagccaaaagttctgaggtagactatttttttgttaagttgaagacagaaatttcatcccccatatccaaatccttttgactctacctgccaaacatttcttctcctcactaacacttcccatgcccccataagatacagaaaaattcctcagcctgatcctgttgcttcctggatggaaagcctttcctctgggcctcctctctagtctgctagtatcagtctggaattggagggtctatcttcacaggccctcagtttcctcatcttgaaacgaaagcttgaacttgataaattcagaggtccaatccaagtctggtcatgaataaaagccatgaattcgatttttacaagcttttctcatcattggcttatatggaacatctacataatattgatagcagatattgatgatgcagtgaatgttttatgggttttctcctttttttttttttttttttttttgagacagattcttgcccgatcgcccaggctggaatgcagtggtgtgatctcagctcactgtaacctccacctctcccaggttcaagcaattctcctgccccagcctcctgagtagcggggattacaggtgcatgccaccacacccaggtaattttttgtatctttagtagagacgaggtttcaccatgttgaccaggcttgtcttgaactcctgacctcgcgatccacccacctcggcctcccaaagtgctgagattacaggcgtgagccaccgcgcctggctggttttctcctcttgtgtagaacacttcaagtggcacgaagcctctcaaccttccagaccagcctcccttctgtgtcctagaagagcaagacaggcatttgatgttgcgttgtagcattgatttttatttctaaccatttttttctatgtactttttgttgtatattttatcttttgttttttattttatcttttgttttttgcttattcttttttatttgtgtgtgtatgtgtgtttatttttgatgtattacacataagatgaaggctttaaattttcctgtatgtagagaggaataaggaaagcccaatatcatgttgaacaacatgatactctgatttgaaatccaaacttgattttttattctagtctgatatttagaagttgatagccacattaaaaattatgagtcccagcccacattacgatacatgaactgttgttttgaagtcatgtttcatcattcacataaaaatgaggtgttaaacactaattgcatacctggcacctgtgtgggaactcttccctccagacaatctcagccctccactcagggagacccacaggagagagctccacccagggtggggcatcagcttgggctagggagaaaagcaggctcatccagtggtgtgaggcagtgttagtatctacagctcccagagagcatactgatggctttcaggtgatgtataactaaaatgtaagcgggtctcttgtccactaacaaggcatcgactacggagcatttacaacctcaacttccagtctggaaagcatgtcattcagggtacgataggaccctagaccaaagcttccatttccatcaaccctcttcaactttgtagaaaagtcattttctcttcaagcttagtagatagatctttccttcacagatgagacatgctccttcaagagctcacctagggagggtgagggcgttagctctggggccaggctgtctgtttctgaatcctggattctctccttcctagtcgtgaaagcatgggcaagtcttttaacttgtctggtcctcagttgagttgccttatctataaaatgggaagaaaaataacaactctgacctcattaggttgttgtgaggattaaatagtgctgagaatagtgcctgacacaaagtaagcctgcaatacatgtcagctatccccatcagtgagagaaacacttgtcaatcatgaaagtacagcatggtgtgatatacgctttaatagagttgtgtggctgggaaatgattaattctgagggattcacagaagactcctgatccagttagtgttctatcagacaagcagaaccactttgtatgatataggaccagaaatttattgtcggaccttactgagtacaactgtaggaaatggctaatcagtatatgtgaggctgttgcttctgagtttgtgctggactttaagggtaggcagtggagaaagagaaatagcagtggaggaggagagagcaatgatggtctggaccttgccaggcacactacagcctattcctgtctctcacaatatgtggtgtcctgcaccaaccttctaaatattaaaacagtagcttcacttctatatttcaaatatcatgcaaaatctcttgtggccaaagctaatatggaactatgcagggaagggggtctgagaaatgtagctccatcttatctaagttgacccagcataaattaaccacatctccacaaaggaagcaatggaatgggttctaaaagagtaattgtttgctatgaggacaaatgagaggatattccggattcagggaaggtagtgtgcagagctatgaaaaagtctgctgcattcaggacattcatagtggctgcagcataggcattttgctactaggcgatggaattagcccaacataaccatgagccatggtagctagaggaagcacagatccacctatccattgaatcacattttttcattaacaaagactggcttctttttcttctcggctaatgtctttcccattaccaaggcaattaaacaatagcagtgaaaggagcattgagcctggagccaggagacctgggttttaattccagccttgccccatgctctgttggtgactttagatgattttttcactctctgaacctcagtaacctcatctctaaaggagagattggaacagaagtgacaactaaatctctagtgtcacttccaactttaacattatctggttcttggcaattatagcatgacaaaaggggtacagtaattttcattctggtgaaagcccaaacagaaaatgcaggactttctgtcatatcacttcacttttatttctagaccttggaagctggtaaaatggagctgcccatggttgttcctggagtctaggcctggcctagattaggtgtccaaggtcagctcaaggctaaatcttatttgtcttggaagcattagtctttcactgtgctggaatcatccaaggctgtcaagaaatgttggatgaatgaacatacgggatctggtcctggattggtctataggcttagaaattgtttgtatggatgactttgaggggaccttatacacacttcccctcttaggggagactctgaatcagaaacagtttcttcaagtctgctctaatattgccctatatctctaggaggattacaggattgaataaatagggagtgggtcaagacaaaggtctagtgcatatgtgaaattatgcaaattccaaacaagaaatggccacctggccctagatcttatggacatactaataaatatttctgaatggaataattctagacataggtatctatccctcctaaattactgggggaaagtcagactaatgcctcaaactttttggtctgttttcaaagatgttcaaatgttgcatcccagggaagccgtggtggtgttctttgtcacgtccaataaaatgttcttatggaacatttaattttcttttcttatggaaaaacacttttgctaacaaacaaggcagtattattttatgtatgcaacctgtaattgtgggaaacatcagctttggagtcaagaaagctggtttcaactctgggctttattgcttaatagttgtgtacgtagcggatgaattatttcatcattgaatctcagtttcttcatctatacaaagggcgtgataacactgttcatagatcttaaaacagatggtacatataaactgcatggcatatggtaagttttccataaataccatttatttttcttattatttttcaaaaagtaaaaataataaagatatcatatttctgagttctctcattgtctgttattagtttgttgtgttatatgattgtccttgcaagcagacaagtactgcaatcaccaagagcttgaaaataatttaagaaaaaaaaaagtattgttactactattattatttgcacacaaattgctaagacacttccaattttggaggcaaaacccagaattctgagggtgtatcattgtggcaatctctggctttgcacaatcatattttagacattaaatagctctgaaccttgtattctagatccataggccacagcaagctgaaaggttcttagaggccatcctgaaaagcccttctatgggtgaagaaactgagactcagagacagaagtggcttgcccaagatctcccacatgattagagacagtgtgaagactggaatttgtatcttccgattcctcatccagtaacagcttgttgccccagagcctttgctgactcaccatgtaatcttggaaaattcccctgacttctgtttactggtctttccatgaaacaaaagatggcgaggatatctcatgatccatacctcatgcagatgtcagtggatttgttaggactaggctgcaatacacattcggctctgtagaactgggcacaatccattaataattcataaaagacacctaagtattacaaagggaagtggtttgtcattgtcagatggaaggaacctcctttcacgtggtggggcaattcaatgttttgcagtccatagtgtacccagtgaccctgcctgaagtcactcaacctctctcagacccactgtactcaactggaaactgaagatatggccagagtatcattaagttttcttctagccctaatattctcatactttatcagttacttcaatttagaaccccatcatggactaactgtacttcccaataataaggatccatagcagctgagagtcaccagcaagaaaatcaaagcagctaatgagaatgaaattgaaagtaggaaaggagtatagatttctctttaagcgttgcctatctggtctagaaatgttaccatgtaaagatacactaagatctcttaacattgagtaagatttccagtcaatgtttcagaagcattccaggtttcctgtctctcttctgtcgtggggtgagcatctttctatggactcaatctatggccatgtattgacaagctgtaatgaaaagcccggatacgtggatccaggccaggatttagggccaatttttttttggctttatttaatctcactttctctgggtataaaagacagcatggaagagagctataatgcctggccggggagttgcagaggcctattgttggctggctattttagccttggccttgctatttccactgaacctccatttcctcctctgtaagacaaaggggttggttagatgctctttacagttcatttaaatgctagccttccactttttggctctcctgggttttcagagcagagtctctgaaggaagcatccttgaccaagtttcgtttcacagcccagagatctccattcctgttccctcaggggcttgggcacaggaattgggttgaatccatttgcaactgaaatctgttcactgtaataagtatttgtgttccaataattttctaacagcttgtaataaataaagccaaaggcattcctcaaggaactgcaattaaagatgcatccatggtagggggtggaggtagcaggggatctggaggagggagacgaggctttctcttgaaatcctgctaaggacaagcagccacagctctggtaccataaaactgctgaactgacaacgctttaatggcatcacctctcactagtctcagtttaatatgttccctgaaggaatccttcgtctgtggagacaggcataagctgacacattcatagagagtcttcttgaaaatgagcctaatgagtttactgtcacttcagacgggttggaaagtaatctgtggatgaaagagttaaatttcaccagcttgagctgtgcagtgggcaagccccagctgaacatttgaggagtgaacacgcagagataggcaaagttcttcaggttcaaaggcttgtttgggaaaagaatccaaaaagttcagatgcttttgctgaagcttatctgatttattcaagctggggatgggagaatgcagaggcatttgtggagctaaccaaacataagatgtgttcttgctttgcactttctgccttagcttttcggcttatgtgtgttttgaggggaaatctaatccacatgtttcagatccttggtattggaatgcatgaaggtgctggctggtcgtagggcagctcaaatgactaggtgataagtaagcagtatggagatcatctgggcagaaatacaccaaagaacggagaagatcagtcatttccccaagtactgctattccctggggccttgtcatcacctggtaggaggagggaccatgctggagtgtgcatgggaggttttcacagccaggcctggaagtggcacaatcactattcattgaggcagagaacaaggctgaaaaatgcgggggttcaggaaaaagaagcaaagtgacaggacaccatatagtctgtgatcccgtgcacagcttaggggacatgcataaaaacctgaatttagaattagaacacacaagcttgaatacttgagcaaccatagcctcagtttcctcacctgtgaaatggatattttgatcaagaatccctgcttcatgcggttgagaagactaaatgaaataatggtgatgaaagtttttggttctgtgcttggtgcaaaaaaaaatgcactgaataaatatttattttttattgtttaatttaagttagatttaatgcaaatcctggttcctttgtgtgttccccaaactggtttaccctgtctccaacccaaaaattctcattgtcactctgagagcagcaagaagtacattctctctggaaaacaatataaattggctcacatatttttttccacgctaaacagcatgatttcaaaatgctggaaaaagccagagccaaagtaaattcccccaacctttctctctctctctctctctctctctcacacacacacacacacacacgtgaacttttaaaccttgcaaatcagacaagtgaaaaaaaaaaagaaagaaagaaagaaagaaagaaaaagcccagccttccattgcttcacatcgtatatatatcgagttcacttcacaaacacaaggtgcactgtcagaagtgccttcggcaaagtttgtactttgcttgaattctaacttttgtttaccaaggtaataaaccagtcctctgctgcaccaggtgtaaagctattatgaaaaggcatatttgtatttcaccccacctcagatgtacggtatgtgggacatcctgcactgtaagagcagcctggatttatttacagagagaggcgctcaagcacagagaggagtgtctccaggctggtaaaggctgaacccctgtgaagaactggtcatctaatcttcctcttttctttcggccacctgccccttcaggcaacagcgccttccctctttgcagcgacaaatcatccagcctgccagcaaccctccaggggcctttgcagtctctgtgtaggcaagttacgtcttcctgagttttttgtcctacattttcaaccaatctattattgacaagccttgtacagccagattacagtaggcaaatgcagcagctgaggaaacgtctcctaccctgtgcctgaaaatctccacaagcttttcttccccttccttcacaggacctggtcataccctgatgggctatctgaggcctgggatgggtgggaggaaactttcacccaaatctctgagctaaatggcccggaactcactctaaatcatctactgaaatcctggcacagaaaggaggaaagaatgtatggaaaagggcagacttagaatgccagggccattagcccgggcaagtagaagagctgcaaagggggtccctgcgctgttgttgattccaggagagtctggcagaccacccagaaacttgcataaggcacacagcagcagcagtggcatcccagctcaacacgtcggctgcatgacacaggcaattttctcagtcctcggctggagcctggagcctcccatttgtcttctgggaggtaattccaatttcttcagaactttgagttctcatatttcctaagcccctagtaggtgcagaagattcagccagggcactagcccatcttaggcactcaataagtattcttaaacaatgaattgggccgggcgcagtggctcacacctgtaatcccagcactttgggaggccgaggtgggtggatcacttgaagttaggagtttgagaccagcctggacaacatggtgaaatcccatctctactaaaaatacaaaaattagctgggcatggtggtgggcacctgtaatcccagctactcaggaggctgaggcaggagaatggctggaacccaggagggggaggttgacgtgagctgagatcacaccaccacactccagcctgggtgacagagtgataatccctctcaaaaaaaacaaaacaatgaatgaattctagctttatcactttaaaaagtaaaatcttgagcaaagatccctttgtgaactcatatttattatgtctaaaatgggaattataaaagttattacatttcagaattgttgttacaaataagaagcaggtgaagagcccttggtaagcttgcaagaactgcaccaacattggtggtcacaggcatgtctaacacctcctcatgctcgtgcatcttgaccatgctttgccagtcattgtctcccttacattgcctggaaactcaatgcaacacacatccattgaatgactactgaggtttaggtacagtggaaagcacagagtgtatagagattgataaaacatccttgtcctcagggagcttagtaaatgaagaacgagtgttgggaaaagacatttcatcactgaacacatcattattaagtgtgtaatagtcagtcattcaatcactgttcattgagggctaattatggaccaggtactgctcttggcattgggcattgttttagttagggtagcctcatgtaatgagtcaacacagaacttatttcttgctcacataacagtcttggaggagaatgtaggttgctggggcaactctccttcacttagtcattcaagaggccaggtttctttcatctcgtccctctactactccctgaggccttgtcatcatctggtaggaggggggaccatgctggagtgtgcatgggaggttttcacagccaggcctggaagtggcacatatatttctacacatgttccattagctggaactcagtcacacctaactacaaaggaatctgaaatgagccctgctctattttcaagaaaaagaaagattttggtgaacatctaactgactgatacaaggatatagcaaatattaagatcatgctcctatcctcaaggggcttacaggtttgggaaggttatgctacataaataaacacataaccaaaatcatctcaggtatcatgaggaaaataaaataaggaaatgtgactgtcatttaagctgaagggggcctttcttagatggagtaagtggtcgcctaactaaataacagtcgagctgacatccaaatggtgaacagttatcagttaagagaaagacaagaggagaggagtccagcagaagctacaagtgcagggccctgagatgggacgtgcctgggatattgagagcaaagcaaaggccagtgtggtgtgtgaatgagggcaggacacacagaatgagagtgggaagctagggaagggccacatgatgaagggccttagaaatcatggtaaaaacttggattttaaacaataagttatatttcaagattcatggagaccaacacagagaaggaatagataccagtctggcaggagggggaaccatgctggagtgtgcatgggaggttttcacagccaggcctggaagtggcacatatatttccactcatgttccgttagctggaactcagtcacacctaactacaaaggaatgaatgaatctatcctcggattcattagtccattcattgctcttccctcaaccacagagggatgacccttgtgtatcccaagtacccacatcagctggcttcccctgggcacagccagtgggagacattgtcaggagacagaggggcaggaggcaggaagaagctgggtttatttctctccctttctgcctctgccagcacctctggctcgttctatccccacccatagctccagcttctactggacaggcccaccgtggtccagtttctaccaggtgaccctggcttctggattccagtaacatgacctcctttctttatctctctggcctagtctagcagcaccagcgtaataacttctgctattgctaatgtctgggttagcttcttaacttcttccaccacctgtgtcgccagtgacctacattaaactcgttctgctcagacacttagagtagctttagtttccctagtgggaccctgatgactgatacaaggtacaaatcccttgctgtgagaatgccctctcagcaccaggtatcaggcctggcacataggaggtctacagtgaatgtgttgctgctggctgcaacaatacaaatttattctcttgcagttctggaggtcggaaatctacaatggatttcactggactaaaatcaacaaatccgtagggaacaatctgttttcctgccttttccagattgtaaaggctgcctgtactccttggctcctggccccttcctccatcccccaagccagcaatggcagttcgagtctttctcaagataccaccactctagttctgactcttctacttctgcttccctctttcctacttatgggtctttgtgattacactggggccacatgaataaccctagataattttcctgttttatggtcagctgcagcaagcttaatttcatctgcaaccttaatgctcccttgccatgtaatataacatattcacaagttcagggcattaggacacggacaggacatggacatttttgtagggccaatattctgcctacagaatagtgtctgagtaaataagtcagaatgggagaggggaggctatgagggcttgctaaggagacaacagcagaatgccttatactgcatgtagtaagaactcaatgcctgtgagttgaaatgaacatagaggcatagaggtactttgaagagggcaattgggtcccctggtttagaggttctttctaggatgcttgaagcacggctcgcagtttcacacctctgagagtgtactcttgtctgcttcgcctggaaggcaatgctgggacacagctcctgttagtctctcacccaggatggcacgtaggtttcttgttttcccaaagaaaggttcccttcggagaggggagtgggtgaaggcaaactgttggctgcagcacgtgaggcccatcagttccaattcagggacaactggagttgatgcaggcgttccatccaaatgtaatcaaacgcctcctgttgccagacgatgtgctattcagtggggggctggtgagggttgttgtgaatccgagatgccttctgtaactttatcagatgggtactgggaggagaggaaggagagcagacagggaaattcacttcactggtaaataaacttccaaactagcagattcctgaaaaactcctgaaactgcctactggggagaagatccacaatgagactgtgggtggtgaagactcaggtgggaggatctgtgtcagtgtaagcccgtggggcagcgcacacggcccaagatctcgagggaaaccctggatcccgctcctcctcttctttatgtgttgggggtgggttgggggtgagtttgaagaggacagagtttcggtaagcatagaatggctttctctattttaagcaagattttatggaaatgactttctttaaactgcttcatttgaactggaattcccccacccacccctcccatgcttcctgcccacccccagcaccctagggcagaacaagatgaggaagagtacttgccaggtctgatcttggaagaaggtgaagcctgcatttaggagcctggcatgggggttagtgtcttagtcgctacaccgccgagaactgcagactctgatatctatgtttctgagcttttcgaatcactttggttactgaggacatctttgggaaatctttgggatggatgcctgttaagggagtgtgtctcggttgagtacctgcaactactgttgtcaatatgagaacattacttagaaagacttgtactatataaatttgcttatgtaactggcatagaggtagtataattgcatcttttatcagcacagatacattgcattagggatgtatttccttctcataacaatttttggttcctgagaaccttgaaggattaagggctattaactcactccaaaatgtacaatggtaggcataggactcccctggaaggatttatgagacatttaagagaaagtctggttgtgggaggcagggggcgagagagaaactggcttttcattgcgtacccttttgtgccttttgaattttgtaccttatgtgtgtgttagctatataaaaatcaacaaaatgtattttgtaatatacagaatcatgatttcaactacacaaaatcagacatatacaagaaggaaactacaataaaatttaaatagcaccaactccttgtaatgagattgtttctcttatctttccttttagatattttctacatcttcctcaattaataataataataaatagggctttttcaatgattttataagctgcattttttttaaattttactttaagttctggaatacatgtgcagaacgtgcagttttgttacataagtatacatgtgccatggtggtttgctgcacccatcaacccgccatctagcttttaagccttgcatgcattaggtatttgtcctaatgctccccctccccttgcccttgtgtgatgttcccttccttgtatccatgtgttctcattgttcacctcccacttatgagtgagaacatgtggtgtttggttttctgtacctgtgttaataaactgcattttttaaacaatcagggagaacagtgttttcatacgccactgctatattaatctatatagatcagggctcgagctgatacaacaagtctccacccatatgcctttttccttttccagtttcttttcagtttgccagtgagtgggctgtttctaggtctaattcgtggatctcttgttgttcactcagtcatagtgaaacatcgtgagtacatcacccttcgtgacggctaggtttcagcggctaggtttcggttcagataacctcatcgttatcatgatcatatcttccgtcatccatcaccatcacccactgtcagcaagctcttctcagttcagtgccatatgcattttttaagcacctgcaaccttgggcccctcatagagccatgtgctatggggcatgcggaagtgaatccaaactgttccacccaccaagatgctgagtcttggataggagacagcatatatggagttagctttgactggagccagagagtggtgagtgctttcaaagatgtcatgatgcaatatgactatcaggtgggagaagcagggaatacctttaaaagatagcatgggatataatgactctctgatgggagaaacacggaggaaactttccttcctttacactttctgcattcttcaccttgcttctctccatgtccttcgtcacactctgcaataagttatgtccttgtcttggacctttcttacctactacggcccaggtgagtatgcaatgtgatagagataccagcaaaatgctatggggcttagaggaagccgagattaactccactctggaggcagaattctttggggaggtagcgtttgaacagacttcgagggacagatggcatttagatagcagaaagcaaaagaagagtgagctgaaagaaagaggagggcaaagggaagtgggttgctgtgcagtgatgcacttttctgaacttcagattctatagctgcaatgtgaagttgatagcaccactggccccagaggttgctgtgaggatcaagcggtgcacccaatagcacagctaatatttacttcacacccactgggtgcccacagtcacatagctagcaggagcagggccaggagatacatccagggctcagaaggaaagccgttgattgctatagtatagtaccctcaaaggatgaaaaagtcgtccataaaccacttttacaagtgtaaattatactactccttctaacttaaacctgacacttggaccctagagttttcttatctaaaattctagtttgtttctgagcttcctggatagtcagtagcctgctgacctggtatctagtctgatttccaggctgttactctagatgtgaacactctcagaactcaagagtgggtttcaaactggaggacccagcctgatttggcctggcttgaggcattgggagggccactcaccctaggtctgactgtgaccagagctccttgacttcctctctgaggaaaccaccagcattcagaagcccctcttagttctaaagttctcagctgctgaagacatgagccacttagatgtcttccaggttgatggccttgctgaagagaggcagcagcgggccaatatacttccaggtatgtggaaagccaaataaaacagtcttgcctttgcttaacaccatgatgccttctttagaggagactcattcttactggagaaatgcaagttaactcatagcccaggggaatcaagtcttgcagctggtgtcatggtcgtattccctgagaatgttctcccttgtttgttttgaatactgctgtggtggcatctgcgatgtcaccatcaccacgactgacagaaaaattatcctggaataaaagttccttttctttggtctctcaggaaaaagaaaaatcttcagagcgataccacatgtttgttctgtgccttttagcttacagtgtctttcacgtaaattacttttggtctcctaacaaccttgtggtgatgtgtgtgtgcaagaggggatatggcacaaagaaggctcatggaggagaggaattacttcctctggattcatggggtccctgaggctcagagaggtcaagcaacatgatgaagttcacacaggccgtcaaagataatgcaggaactcagatggtggtttcctgcctccagacttcatgcacttctaactttcttgagcgcccagggacaccacatctttaggtcaacagaaatggagggagcctctttgtttggttactataccttctgaagtccagtctcagctacattcttttaaggaatccatcaattttagttgaaaatgcaacagaggtgctgtttctcaactgggggcaattttgcccctggtggacatttaacaatgtctggagacattttgtgttgtcacaactggacagaagggagtgggtgtccctagtatttagtgactaaaggttagagattttacaaaacatcctacaatgcacaaggcagccaccacccccacccccaataacaaagaattattcaggccaaaatgtctagagtgccaaggtggggaaactgtgttggaggaaaaacaaaaaacaaaacaaaacaaaaaccctacctccaattcccagatcaccatgcacttagaaagcttttcataatgtctcatttctaaaaccgactatagatgttttgcaagcatatttttctcctatcataaggaggatctgctaaatatgtcatagctggaaggggaaactgaggcccagagaaaagaggtgactgttcaaggtcacccagctaataaatgatggagaaagaacaggcccattctcctgccctaaggagaatgcattttctacttcatcatgctaagctttgagccattttctgactcactgattcaataaatgttgtgatctgaatatgctcactgacacagacttgcttacagcttattctcacacaaaaatgaggagatgtgaaaaaaaaaaatacgaagacatgtgaaaaaacccaatgcaatgtgagaagaacctcgttgattctgcctcagttcccttgatgtctttagacccacacccacgacacagctagctgctggacagaggggcttttagtctctttttgaagagataaaaggtaaaagctctctactggaaatgaaactgacgtcattgaagccctcaagtttccttgcagaaggcacattactgaaaatatctaagtttcttggaacttcaatctttttcttttttttcttatttgattttcatagcttgttctgttggtttaatgtttgtttttcactcagccagtcagtgaaactgggttggtcagtgaactttctagggactggaggtttcactttcagggtctaaaagttttggtttgggcttttaaagccttcattaagacaattagggtttagcattccaggccaagagtgaatttaaaagatatgcatgcaagaattgcttagatagtatttattgaataggttaattttgacaaaatatttatccaacatgtgctctgtattaggctctgccataggcaacagagaaacagccctgagcaagacccagatgctttcttccctctattgctgacagtctgactggggaaattaatcagtaaatagttctcatctaccccttaaaaaaaaatcccttacactctatggaagactgagctcaaattttattctcttactagaatatccttacctttttttcttggtcaaattcctattcagtttttggggataaaagcaaacgccaactctcaaaaaaaaaacctttagaaatctccctaggtaatcagaaaatgcttgttcagtacatcttcaacctcttctccaaatggttacaaaaccattcagcatgcattgtggccccttgtgggaaagtggtgtaggctgttcattaagaggcacccttgtttaaaactagattgtatcacctgctggtgccttgagtagtttacttagactctctgagcccagtttcatcatccgttgtgaggatgaagtatcgcacagcctgtgcagtacctggcatatggcaattgctcagtacagagttagcctaagtgtcaggcactaagctctctgtgctgcagaggatccaaaaattcaagtgacatgggcacttctcccacagagctcataatatagcaagtagaaacgttcacaaaacctctgcaaaagatagaccacgacatgttgagaggtgacagcgcgctggcagccctcacagccctcgctcactctcggcgcctcctctgcctgggctcccactttggcggcacttgaggagccctttagcccgccactgcactgtgggagaccctttctgggctggccaaggccagagctggctccctcaacttgcagggaggtgtggagggagaatgttagaacatttattataaaaagtattgaggagcagatgaacattagttctgcatggtggagctgattatcggcaaaggttcttagaaaggatagaatttaagctagagcacgaaaagaggataggatctttgaggcaagtctttcaggcagaggaggaggggaaaaaagtgtattgggcatgcccagaagaggaaatggcttaccccacaaaaggcagtgaatgtgagagcactgggtgtggctaagcctttgtgtcgctgaagggtgagattttagaggtagaataggtgtgagagaagagggtttgagatacgggtggaattcagtatgggattattagcagagttaattggaaaacagcatcaaatttttaagggtttgaaatgcccagtgcaatgtttggacttccctctgagagcaaaagggaggcactcatgtttctgagtacaaggatggcttgaattgatgagattcctgctatcaagttgctccatctggtcaagaacaaggtagagaacaaactgtaagaggatgtgatgagtgagacactaaaagcctgaaagaggaaaccattaaggagcaaggctttaagagaagaaaagaggaaacctaacaccctgatcattcctccaccatcttgtgctcgtctattaatgcctgtcttcctctcttgactctgagctccttaagagcccagcacagtgcctgtcattcaacaaaacttcagaaaatgtggataaaaataagaaattgtagataacttcagacatagtaagtatagtggataggaaacaaagagtgttaaggctaggagacctcttaggaattttttgcaatagctcaagtgagaactgttaagtctggaagaagtgcagtggagtgggcatggaagggcgaggatcaacagagatagagtaggtatcgggctggacgcagtggctcatgcctgtaatcccagcactttgggaggccaaggaaggcggatcacttgatatcaggagttcaagaccagcatggccaacatggtgatacctcgtctctactcaaaatacaaaaatattagctaggtgcagtggtacatgcttgtaatcccagctacacaggaggctgaggcagaagaatcacttgaacccgggagttagaggtcacagtgagccgagatggcaccactgcactccagactgagcgacagagcaagactctgtctcaaaaaaaaaaaaaaaaaaggaggtatcagggattggttggaggtgaggagggtaagcgaggaggcagagagtagagatactgagtctgggtgcttggaagcgtgatgatgccatcaacctatcaactcagagcagaagggctcgaatgacaaggacattgcccaagcaggaattcaatatatatttgcggagaggatggatgggttgatagatggatgggtcttcaacataagcacggaattatagactcatttattattggggagcttacatatcatcagccctattattctatatatgagtgaagtgaggtaagacaagaactgactgcttttgatcacatagctaccaggtgataaatttagggcatgaaactcctaagctagtgttctttccagtatgttatatagttattttcttcaattcttaaaaagaatttcagaggaaatggtatgcatgaatatcatataccacttgtaatttatttttttaactaaaagctacattgggaatttcatttccgtttctctgattaaaataggaattctaaaagtcatgcatattgattgaaaagtcctcggctttggggccaaattcttccagtggctgttaccttctataatcccattttccaagacatttctctcttgcctacccagattcacaacttgcagaatatgaagcatgcctgaagaacttgtacagcagagagggtggcataattttagcctagaggtagttctaagggcagttcatcattttgcaaaggtgaaattaacttttagagaaatcacgtggaaatttacttttagatgaatcacgtggatctaaaacaaaaggactgatttccttaaatcacatcaaaaaccagtcccttgactttttcacactttgtgtgtatcgagtgcctgcgacatgctcctcggctctctagttgtcctagtggagaggatgatacaaaagtttaagatacagttcttcctttaaggagttcttatcctaggtaaggagatgagattcatatgggaaaaaaaaatcacacagtaattaatgatgaaacaattgtttcttttccttggtaactttcaggcattaaacaacagatggattaagtgaatctcaacctgggaagcttatcacatcaaatttttggggggtatttgtgggtgactacagcatctcggcctataggtcatcagtctctgatgtcagagaacacatcttctcattttcttgtcctccagggacagcattacggtggacagtgaatcaacactgttgccaggaggcaggcacagagtttgagtggggaaagggaaaaggtgcaggaaacccagcctcggaggacccatcaggaatctcctcacctttgttctctctcttctccaattcgtcttccacactaaaccagttgttaagagcttcttagagtcccaatattgctagtatgttctgataatggccataacatttactgagcattacttcatggcaggcactgtcctgaatacttcatgtgctatacatacatcttatcgcatagtgacgacagatctggagtgttggtcccaatgttgccaatacctaggtggttgctattagacaactaattctctctttgccatttcctcatctgttgaatgatgagggagttccaggtctaagaactatggaaacattctgctccaaatgcctgttgttcgatccacaaatatgccccaagattatcccaccaattggttacatcaggctgtgctggccacagagtggcccacgtgtctgttttccaaggccaagtgcctggtctaactgtgtccctagctgggcctggcagagaggtggtggccgggccagcagaatgatgttggtacaggaagaggatttttctcaggataaaaggctgactctagcctgcagctcatggcctttaatagcctaatgatcacgtgagagtccttggcttggtctggcctggccaggccctgagcactggcaggagagccccacccaggttaattgatctgtttctatcctctgacaggccctgggcaggagttggcacattttcctctgtgcacagatcttccccgtgccaggcttacaaaaggaagtttccggagctgagcaggtctggcacatttcaagttgtcctgagtcttgtcctcatggctctccacttctcttttttctctccaaacttttctctcacccgctccctagctgattttgttctcttttctcattttaaatgactgaccttcctcctcctttccttctttccttctcttttctctccctccctcctttccatcttccctcccttccttctttccttcctcccttccttccttccctttttctccctccctcccttactccttccctgccttcctccctccctccttctcttcttcctttctttcttctttccttcctcccttcctccttacctcctccctcttccttcccatgtttatttgttctgtctttttcgtctctgtcttccttattccagtaccctcactccagattctccctctttctccaatctttcaccaatatttcagaaatttctcttttgctttcctgcctgccatactggatagaagtcagatggctatttgtgtaatcttccccttctctcctccttcaagtgtttgagcaaagaggccacattttctttcactctttccgaaacagtttcaggtaccacccctggtgtctgacccttgtcacattccactcgcaataaccaagttgaccagtgccggtgcccagacaacagatccaggcttgtagccaaagccagttgggggttagctctgggaggccctcatgctgagactggcaacccaaagtttgcaagttgtctttttgttcttttccttcacctcttgagcctaggcagggtcactctgtgtactcaggctacacttgagtagtcacggatgagtgctataaattcataggtgtaacaacataagagatcagatatagccaagacagatctgcccattatttgacctttcttgattcttcataaagaatgaaatggaggccactgctatgtttgccatcactctgagggcctcctagggcacaatcaggttacggacgaagttcttatttcttctattcattcattcaataagcataactgaatagcatttccagcattggaaacaaggacacaaaggtgttcccggttctcaaagagcagacaacttaacagaggagatggaccttagaaaagcttgaggtaattattaaggaaaataccgatgaagtgccatggaatatagactggctgtggaagacggtaaaatacccagagaagaagatatttgagccaagtcttcaattgtggcagaaacaaaaagacccaaccattagcaggtgtgcaagatagccagagggactggtattaattaaaaggaaaaaaccacaaatcatttggggaaaaggcacaaaaaatgaattaaaccctaacaaaaactaagagctaagagtcaaggatttaatccactcactctccccttccaatgccactgataattttacttaaagtggatgtatgccaatcaattcctcagccccaattcaaggttagacatccaaaagccagaagaatgacatgctagaaagatgatttagaaccaaaaggtttgaaacatggttctgtctttaacatgctactttgagcaaagttctccctctttagtcctcaattatattccaagttcccctcagctttaaatgtgatgtttgtttctaggactgagagtgatttgttgggttctgccatgaccctgagaagaaggccttctgtgtcttccatgtttatttgtcctgtgttcctaaagccacagtcttttggggaaggaagtgtggggcatatttttacacattttataaatgaggactagagaaatgcgcaagtcctaccctccccaccccaaatcatgctattcacatctttccaagacagcagatggaaaaaggcagataaaagactgaagttatgtctttaaaagggtagaaatctgtatggcatcctagagcaagaggatgaagaggatgacgcagtttagcccctaaggaaactgagacccagaaaaagcacatgtcttggctaaggttacagaacatgtcagtggcacagctgggactcagaggcttgttgggccattggtcagtgctctttttattatgccaaacatgctcatgtctcctcctcagcttttcaggagctccatggccagttcacctccccattctgacacctaacgccgtgaggctccgtccttgaagagatgtaacatgttctggagaagatgtcaagggtcacttcgaagtgtgcacaggtgagttaatgagagctgctgcctttcaatgtgggctactgacgctttctccaacaggtaggtgtcttgtgtgcaaaggccaatagtatttcctgcaatctggaggcagattctgctcacaatctcgagacacagcaaactctccccacccgagaagaggatgggatgaggcacactgaagaggtagggaggaggagatggagaaaagatatatttttgtttggtggagaacacacacttttcaatttcaaccaagacgtttgaaatgcacacaatcacagtttcttctcctttccctcaggaaagaaaactgatcctgtagccacagaaaaacaggactgagaccaggaagggcaagtcgtgtgtgtcagcattgtggacctttatataaataataattttccagtgggaactgtgatctcttcttgtctcttctatttttaaatgctaattacttctgattttgtttacgtaggcggagctaataagaacatttgcttcataaccattgaacctaatgtatctgtttttggacactggtgatttatttttgcacacatgctccaaattggtgctaattactttaaaggatcagagtttctattccaagagggatgacgacagaatgtcaatttggagtctctgagcataatgtcccaattatcaatgcattccagaccagaatggacttggcaccttcttgaagggatttggcttcacttttatcagccagtccctggttgtagcttcattaaaacttgctttctagtaacttgtggatgtgcctatacttttctctgtctcaaagacccttcagtgtcatatcagtatcctgaatacctaccttttcatttccagatcaaatacttctccctctgagccttttttgatctctttggcccaagataattttaattcctaagattttctgattcctttcttaaagaggttagcactttctacattgtattgtaatcatttgctgttacattcttacctcctttctaacagataagccccttagtgacaataccttatctgaattatctttgtccccactgcacactgaaacttctcctggtgccctgtacataataagtgctttacacattgatttaattgcggtttgtttataatatcctacatgctccagaaagattttaaggtagatttaaataaatatttatgcaacaaaggaatgaatacatctatacgcacacagaattactaaagtctataatcaatatatgaagtataactacacagtacaaaatttaaccatcatacctaaaagaaaaacaaacacgatgctgtggggaatgcttgagaggtagtaacaaaggctttaaatcttaatgaccaccaaagtaacccacattcctgatatggtatttgctcaacatgaatgtttagatgaacaggagatgaaaactatctgaagtgaggggagggggtgtcactgactacacagaataaatatggagcatattgtgaccaagaagatatggccacagaggaaaaagagcaaaacaggtccatcctaatttgttcatttaccgttcacttattcatcccacaaacttgtatggagaagcccctatgtcaaatgctatgcttgcactgtggatgcaaaggtaaataaaaacatcctagtttagctgtttagaccaggggtcagcaaactatggccaatgggccatctccggatcactgtttgttttataaataaagttttattggaatacaccatgccaattcatttatatatatatctcttagccactgttcctccacaactgcagaattgaatagttctgagagaaaccttatgtcctgcaaaaccaaaatgttgactgttcctcatctgtccctttacataaaatgttggttgacactggtttaaaagtcattaaaatacactggagacagtgccatgtggggtaaggacagcgttctgtggaagacaactcagtcttagaaagtcaaggaaggcctcttagggcagagaccatgtgtttcttgctcactgttgtattacaagtgcctgacacatagtaggtgctcagtaaatatttgttgaatgaataaacaaatgatgttacttctaagatgagagtgaagggatgattggagtaatccaggacaaacgtggagggatggatacagcacatgcaatgatctgaggcaagagaggtccaggtgtcctggtaagcagatgctgtcagttgcagggagagtgaagtgaggtgtgaggtttgggataaggagaagataaggctggaaagtgagcaggaataagatcaggcagggccgcttaagcctcctgtagagttagggctttatcctgaaggccatgtaaaaaaagttttaagcaggacaaatataagttcagagagtgctttagaaagaccgcttggggtgctttgtgggagaccagaaggaaagcaaacccagggctggaagctgggttaagagctgtggcagaaatcctgggaactgcagttaggcagtgacactggggatagggctcagtagacaaatttgagaaagatttaggaagtagagttgataggacttggcggctgagtgcttagggatggagagtcacagcgagcgggggttaaagacgatagcaatgtttctgccttgagagacaggtagtggggagggcagggccctttctttagatggaaacacaggaggaataaaaggttaaggagaggggggaatattggctgcgcttggggcatgctgaattcaaggtgcttatgagatacccaggaggaatttatacacacaggtttgaaactcagatgggcaatctagtctaaaaatctaaaattggaagtcattagaatcaagagagtaattaaagccataagagtatataacattttaagagagaacttgtagagtgagaaagggtcaaagaaaatatttttaaaaccggaggaacagcattcaatagaataacagagctcaagcagcccttaaaagatactgagaaagaacatccaggaagacaagaagagaaccagtgaaatttgatgtgacagaaccaagggacatgatctagttagggtcaagaatttcaaagaattaagaaatgtctactgtaataaagatcgaactggagatagagccaggacaaatttactgttgcccttcttgacagcagctctgataaaatggtgaaggtaggagcaaaacaaacatgaataggaggtaaggaagtggacagagtaagtgcagacaatctgtgaaggaatttgggtagtaggttaattgctggaggccggtagagggaggttttgtttcatcttccttccttccttccttccttttcttcttccctccctcccttcctcccttccttctttcctccttccgtctctctgttccctccctcctcctcccctccctcccctccctccccctccctccctccttcccctcttccttccttcctctcttcttcctccctttctttcaagttaagagatatttaatcatattaaatattaactagaaataaacaataatctaattttaataaatcaccaggaattgacttcttcagatgatttccataagttttatccctttagaaaaaaaaaaattagtaactcaacatgttctctttttgtgtttagtttccgagaagcctagtatcaaattcagttccccctagatgactggtagaatttactgccacttccttcacctgttttctgttctgttttatatctcaatgtcttatttagatgtaataattattatgatcagttaacaaggactttcacactgctgtctcacagcaaccatccttcattcagtgcatatttaatgagtgcccactgtggtcacacactttgctctgtgcagcagatacaacggtaagaaagcaacacagttgctggttttacagtctagttgaggagactgacattaactggaccattatcctaacaattacagactgtggtaagtagagcaaaggaaagtcctggaagccataagaatctcaaaggtcaggaacagcgtccttgagatgtgaaggataaacagagacttggaaacggcaagggtaaccttcagtcagaatgaatctcctctatggaaaccccataaatgattcagttcctgcgtggacacctgcagtgatgggaaccaaagctgcatttctagacagtgcttatagtcaataaggggcagaatttggctcatgtaacctctatctagaggtaagtaccttgagcccacatagaataagcttaacttctctctagcacagacttcacaactggataacaacagcaattaatctccatgtatatataggtatagacatatctgttctctcatggtaaaatgcataggttttccaaagttctctgtttccaaataatgtcatgtttatagagacttctaattgtttgcaaatatccatccttagcttcttctatagaagtacaacctgttgctcctaaatacagaattgttagctagacatgtagctatccgaaaaaaacaacaacaactctatgtttcaacttattttgcagctaggtgaagtggattgctgatagatgtttaacaaccagctctcatggaagaaaaataagatgtagcacttgccaattctatggtgttaattctcccatggcagatttcaggctatcacatgactcacaatccactctcacacaaccctaggacagggctccagcacaccactgggtaggcaggaccgtaagacaaagttctccatgggatgtgagtggaagcaatgcatgcaactgcccagttgtgcctgaagtagaaataggaggctccacttccgcttgtcctccttccaatggactggaacacagacatggtggagagtccattttgtatcgtgtagatcatatagagcaacaagttaggaggaactttgcttccccacacctcagagctactctataagcccttgtctcctggtgggtgattttttaatgtaaacaagaaagaaatatctaacttgtttcagccatttttattttgggcctctgttagaacaagtgaatctgttttctaatggatagagtaatctatcacagaatggcaacctgaccactgctctaacatcacacaaaaaccggctacttacaaggcgtagtcctagcaggtgaaggatacatgctgccagctctcagggagcccagcccagggcaaaagatggcaaatacacacattgttattgcaaggaaagaggtgatgagagctctgaggcaggccagatggtcaaccacacagacttaaagaagagactcattattattattatgaatgaggtaatattagaattcgactatgaaagatggttagaattttgacatgtagaaatgaacaacaaagcatttcactgaagggattctacttttcattcagattttggattccaatcattctgaaaatgtgatccttcagaaagtttctagacttttttttaaaacattttccttctataataggacaaattaatattgtgaaactatgacaaaaatgtttcaaatatttaagagaatcaattgttttccaagtctctgatccctcccatttacaaagaagcccttgatttgttcatttcaaagaatttcagtggattaattaaagcattcctctaagtgctttcctaagcagtgctttgtgggcttattttgaattactaaaagtgcacaaagacactagaactgcatttttataaaaaactataatgccaattttcactaacgcaaacagttctctctttccaattagtttttcttaagggaagaaatgatgtcttatgtgtcttttttattgcttcactgtgcccaggacttctcaatgctgtcctgggcactgagaagcaataaaaagaaatatttattggttagtaaatatttattgatctgaatgggaattgcagaatttgaaactatcaaggagggtgttggaattgtaggatgacgaagggactagaaaaggacctgaggtcgtgaaaaaaagatctggcatgggaatgagcctttgagattccccatcagatcctggcagtagggccctcatctcctgtttccttcatttcacaggttagaaagtggagactgaaggaaaatggccttgatggaggtgacaaggccactgagctttagggctgggtctagcttgctagtgccttttcaaggcagctgatccttgttttcatgctttttatttcagagttgtgctatcatagacaaaagaaagaatcctttgcatttttgacatttgaatatatactgtattcctgcctcagtaaataaatgcatgagaaaatataaagtaataggaataaagtcacgtttggaaattccaagatttgaaaatgtaaatcttttttgtgaaggaaataaaacattacaatttgggggtcctcctgacccatcagaacatcaagaaattatttgcttagcttctccatttctgggaagtgagggcataaaactgtcaggcagagtcccaaagaaagagcagacagaggcagggcgcggtggctcacacctgtaatcccagcactctgggaggccgaggcaggcggatcatgaggtcaggagactgagaccatcctggccaacatggtgaaaccccatctctactaaaaataataattcaaaaaaatagctgggcatagtggcatgtgcctttagtcccagctactctggaggctgaggcaggagaattgcttgaacccaggaggaggaggctgtggtgagccgagattgcaccactgcactccagcctgggtgacagagggagactccatctcaaaaaaaaaaaaaatggaagagaaaagaaagagcagacggagcaaaagagcttccattcccatggggttgtgtgaggcaaagcgtgagacagagagaggagtgcagggaaacagggtggtgaggccagactagggtgcatgaggagtctttgttaggtgctaaacaaatggagaagattgtgattcttaacgccagcagctctaaatgatatacttgaaaccctctaatacaacaaatggagaagactgtgattcttaacgccagcagctctaaatgatatacttgaaaccctctaatacaacaaatggagaagattgtgattcttaacgccagcagctctaaatgatatacttgaaaccctctaatacatcagaaacaaagcacatgttgagtatttcttatccaaaatgcctgggaccagaagtgtttcggatttcaatttttttttcttcagattttgaaatagttgcatatactggggatgggacccaagtataaatgcaaaattcgtttatgtttatacacatagcctaaaggtaatttacacaatatatttaataattttgcacatgaaacaaagtttttgttaaacacttatgtgttggattttccactcatggcatcatgtcagtcctcaaaaacttttggattttggagcagttcagatttcagattttcagattagggctgttcaacttgtgtatttatgaagaaaacttctaatggagaagacaaatgtgagactgagaatcagattctggtccaaactcaataactttcatgtaacttggactgtttatctcccttgtgtgtctcagtttcttcacctacaaagtgggatctcttccaagtttaacaacctctgcttctttcataggttaagatcataatattgatgtggctgagagaatttcagcttttctgattgtaatgtactctactattaacttctgtgaagtcctaaggattttttcttttgcttctcttaacacttaagaatcagctaaattatttagcttacctctcactttatgattcaaatcattaagaactaagagaagctggccgggttcagtggctcatgcctgtaatcccagcactttagaagaccaaggagggaggattgcttgagcctaggaattcaaaaccagcctggacagcaaagcaagaccctgtctccacaaaaagtagaaaaaaaaaattagctgagtatggtggtgcacactgacagaagtgggaggatccttgagctagggagttcaagaccgcagtgaactgtgattgcacctcagcaacagagtgagaccctatctcaaaaaaaataaataaataaaaaataaagcaaacaaaacaaaacaaaaaactaagagaagtcatatggaacattattttccacagctggaaggaaaaattgcctatatatttatcaaagataatatttatttgcattactctagagaggtagaaacaatcacataactaaattgagtttaaacttccataaactctctgtctcatggttcaagcctttaagttatccctaaacataacccaatgatttctctttatttggcgccaacagtatagactattatggtccaatccgcaatcatttccagcttaaacccttggactggcctattaatccatctcccttctcctcaccccatcccaccctcctcctctgatcactcctccaagtctgttctccacagaacagccagggtgatcagatcgaaaccctccagtgctccccacctccctgacagtcagagtcacagttccatctagacccgtgaggcctgacaggcccttttgctgcctccagcccctcacctcccactctctgttccagtcaccctggcctcctttctgttctaaagacaccccaagcctggccgggcgcggtggctcacacctgtaatcccagcactctgggaggccgaggcgggcggatcacgaggtcaggagatcgagaccataatggctaacatggtgaaaccccgtctctactaaaaaatacaaaaaaattagccgggcgtagtggcgggcccctgaagtcccagctactcgggaggctgaggcaggagaatggcgtgaacccgggaggtggagcttgtagtgagcggagatggcgccactgcactccagcctgggcgacagagcgagactctgtctcaaaaaaaaaaaaaaaaaaaaaaaaaaaaaaagacacccaagcctgctccagccacaagaccttttcaaaccatgttccctctgtctgggacacttattcccagatagccacaggtgtgctccatccttcagatcccaactcatatatcacatatactaaatatcaccccctgtgtcccttagctctttatctccttttcctaaactattctgcacagcatttagcagatcctgttctatttcctattcatgtctttcttgtgtttcctcccactagaataaaactttatgagttcagagatttcgtccgttttttgtctctagtgcttagaagtttgtgtgacatatcgtaggcattcaataaatatttattgaacgaatattcagagtgagctgcttttctcacgatgactatttttgaaatgtatcttttgtccactttaacgtttattttttaaagacaaatactgtatatttttatacataattattttattttgagaggcaacgtgtatgttctctgatggaataactcaaattaggaaacatttattgttttctcagatataaaaataatgaccttaaaaatcaactatccctttaagatcatagtcaacatggcaaatttctgggcactgccaaagggtcgacagagcagtcaactggaaaaagtacagtagacttgaggagtcttatcctgtcacaccctcatggggccatttctaccaagttatagagtccaaatgacttacgctttctttttctcctgagaaacttaaacaattctacagacagaggtgctaagtaactatgtcatccaacagtgactacaccgatgtaaagcattttctttagattgtaaggctgttatattatcctgattctatgagtgttaacaataccagatggcttgggctcaggcaggcagcatttctatttagctggctgagatatcaggaggtgccagagatgtacacagagtaagaactctgggaacagggcccagagcctcggtggaagatttcaaatccaggctcaaccactccacactgggtgagctcaagcaagccacttaatttcctcagaccacagtcttctcttctgcaaaatatgagtcacaaacaattcctgcttaaccacctcatggcataagataaccggtttgagagtttctcaaagtgtatacaactccatgaaattgctcagtaaatgactaaaagcctttatctgacttcttagactgattcctgaaaagatgagtgttaatgtctgggtagacagtcccagctacatcctgcccatcaccaaaagaatgaaatcaggggagaaagaattccagctctacaacatcttactttaagatatactctgggaccagacacggtggctcacacctgtaatcccagcactttgggaggccgaggcaggtggatcacctgaggtcaggagttcaagaccagcctggtcaacatggagaaaccccgtctctactaaaaatacaaaaaattagccaggcgtggtggcgcatgcgtgtgatcccagctacttgggaggctgaggcaaaataatcgcttgaacccagaaggtggaggttgcagtgagctgagatcgcaccactgtactccagcctgggtgacagagtgaaactttatcttaaaaaaaaaaatctatttctgcagatatgctcatttgtccaaaacacatctactgagcacctactgtgtgcaagattttgaacctcagattctgcagagagaagaggcctgaatgtaacccaggtcttatcctcagagaccatgcatatgaactcttttacaatacagaaggtgatatgtgaaaagaaaatgagtcaattcatttagcctatggcaatcacttcagttctctgggcttttgtttcctcttctgcaatcatgtaataattatgaggtgtttacgaggattaagatgggatatattatttcgcttaggtgctttgtaaatcatgaattgccatccatgtcaattccttcttccttttttctgtctactttttcttccttcaccccctcctctcttttccttcttgctccttctcttccttttcgctctttgttttgataggagccctgctgtctatcactgaggcattatcataattagctgatctagtctgatcattaaagtgacagcacagctggaaatcttttgatccaacttgttcccttattatggcacaggaaggctgagagttgctggtaaatccaactcttgcctgatttagatgacgttttttccagtttgttgctatacataagatatagaatggaatcaaggtgaataataacctttattttcttagggtttgcatgtaactaagggaaaatttgtttagacacaaaattaaagtatttaatatttcaaatcagttagcatttatgagccaaaataggcacacccacaacttctgggttcagcgcttttatgtccctagccaaacctttgtttctgggaacctgtgatagaaaataaagcctgaaagaaactttagaggtcagattctctgatgcccccaccttttctttggacaataaactgaggctcagaaagcagaggaatctgctgtcacatgattaaattagcaacactatatctagaactcatatctcctgattcccattctattcttctcccatactctgctgtctactttccaggtccaatgggctgggaagccacagactccgattccttccataagctctccttctttctgtttaccttggttttcctcctttcaaacatccctctctcccaaacacataccttctttctgcattgtaccttctgacagtcaagactctttagccccagggccatcaaagccacagtcggacttgtaaatagcccaacatacacaagtgcccagtgcgctacatgtctgtccccatagtaagcactgtcttatttaaacttcacaataatcagtaaggtgtcattgttctatcgtatagactagtcagctaaaactcagagaactgtgtgtgacttgcctcaggtcataacacctggacagcagtagggctaggatttaaatcagacctatctagtgccagagctggtgattgccttattccctcttcagcatagccttgaccttagaaaagagaactcagtggtttaagtaaacaccaaggggtaattgagtcttagctcttttatttgagagaaataacactgtgaccctgggctcctgaacatttctgcatcccttaaccacatataaacagtgagaagtaggacaagtcacttcattccctctcagataggataaatgataatacctccctaacgtagttgttgtggaaattaagaattaaaatagatagtgtttggaaatacctcaggtagtctgtaaatgactatataaatattaagtttccataattggcttatgtttttactaatccaaatgttgactataatattgtttatactattttattgtaagccttctcaaatactttagttaaataaataatctatgtgtacaataaatgcctgaataattaaaatattttattggatttttatatctaatctcttaccacaagagaggaagttaatttacagcttataatattatcatatcatttctttcatctagtcaaaaaagaatcactattgtcatcttaacaaacatttactgagcacttgccagagactggataagtattttatttctcatgatctcacgttaattcttcattattatctccattttagagatgaggaaactaaagcccaaagcatctgagaaacttgactaagatctcataactgttaagtgaaaaagacaagtttttagtatgtgtgatgttcctgctattttatagcacctctgtaaaaataaaactctcaaaaggtcttaaatggccttcaatcaaggtattcggcacaatacaacacaggcaaaatgtgaaagctaatgagtggatgtgtgtatatgtgtgtctgtgtgtttgtgtgtgtgtagggggcagaaggttggaggggaacaggcaggaatgcataagaaaatttaagctaaagaaaaccattgtaagggatcacagcctgtagctctacacttcatatagagaaacacatgcacaattattaactgattcatttaacaaaaatgattggtagcttaatatgtgcaaggactactgttcacactttagacaacacagaacacatagtcacagagcctcctttttagacctcacaaatttccagataaattgttagataattacctatatacttaaattattttatgtaaataatttacactcgaacaacttgcctgtgggggtatgcttaaaaactggttcgtatccgaactgctcttttatgtaactgcttaaggaaaggaataaggagaatgtccagcctcaggggatatgaaattaggagttggagcagaggaagatgaattacttaaatgggtcgagacactgggacataggatacttttaccttcagtagaactttgagctcttcacacacaaaaaagtctagtgtcctgaaatctaaataaagcaaactggacctctgatttcccaaggttcacgttaagagcccaactcatccatggaggacaaaagaaatgagagactggattttcatcataggtaactccaaagtttagtcaataacaatttctttcaaaggcctttaagaaacctggggtgtggccagaggaaaagtacccagtaggccaaccaggagaggaaggaaatatctatagctaatttcattttgcatagcactcattgctgcaaagtgcagcaaaagagagtagccagtggtggcagaagcaaccccaagctgcagggccctgttgtcaaaatttctcttcttggcactaaggaaacatggcctcagcttccctgtcgcagtgggcttgcatccctccacctcagaaatcagaaagggtcttagaatcaggagccatgaaattcccaccccaacccattcaagtaacagctgttggaacagacgggttatcccacctctccatgtgagtttcttcattggtaaaatgggctcatctccaccatgagccttcttcatagggcaactaatcgctcaagtgacatgatggatggttaaacacattgggaggtgatcaaattccccaaacatgaaggaatagattacttaaaatctaaaggtgagaatacagatgtcacacccatccacagttgaaaacaaaaaagaaactagtgaataatgcacataaatgtacagctacatgcctggcccattttgtatggaacccaaattgctcaactagttttcatggtgctcaccaagatatttccaactcttttctctaggattggcacagcctatcccctttatgtctcctatacttttgtcaaattaatcacccagtgactcaggagttcagaacatgaacttactctttaatacctccacttgtttgttggggcatctccacctcctggaatgcctgtcctctgcatgtctgtgtgtgcagacctgctcaaatgcagcctccttctaaaaggaagtcttcgttgattttctctgttgtaagtcatctcaaccttaatctgagcgccacttatcattctaaaaaattatttatttatttattcatttatttatctatttcagaaacagggtctcaccctgtcacccaggctggagtgcagtggcatgatcacggttcactgcagcctcaaactcctggtctcaagtgatcctcccatctcagactcctgagcaggtgagactatagacatgtgccatcacacctggctaatatatatatatatatatatatatatatgtatgtatatatatatatgtgtatatatatatatattttagagatagggtctcactgtgtttctcaggctggttttgaactcttggtctcaagcaatcctcccacctcagtctcccaaagttgagattacaggtgtgagttactgtgcccagccccttatcatttttatttgtacttcacattctaataatttgtcttctcctgagtttgttgtttccttgagaacaaggattatgcccgttacctaatggatgacatttatcaaacacttaacatgtgtgatctcttttaaccatcacagctaaataaggctgttgatactggtagttttcattttggaaatgaagtaacaggggcccagagaggttaagaaagttgccagagttcacaggtattaggtgaagtcaaattggaaaccagggatttccagtgtaaatccttaattcttaacatccatgcctccatttattgtaggtgtttggcacaggaagtgcttaataaatgcttcttaattgagtgaatgaataaatacatgaatgaagaaagtgtgaatcttctagtatgaatgttctcactccatgtgcaggacctcacatcctctttccatagtgactgcacaatgaatgtttgctgagttcaatgactgaaaggatctatactagggcagatgtctaggggactgctgagacaagaaggccgcagaggtgagtcatttttcaacagacgtgagtcctgttttttgggggcttacattttaggaagatgagcattgactggtatttttcaagtttagggaagggtagatgttggcagagaaaagattattcaacctcagagaatgatcaacagaatattcagaggtaaccggtaagacaagtctaattctgagcatgaataagcttctccttaaagaggaaattgaactgaagatcacgaagaataactagatgactcacccatcaaaataggaagttctctctggtaaggaagatggtggcattgaggtggcagaaaccacaaagatcctcctcaaacacttaccacatagcagacttcactcttgctacttgggctactgtctctggagtggaagacctgtccactgaccaggacttgatagaggcagtgaagcactgtgttaaaaagaccccaggccctggagccgctgcctcgctctgaacaaagactccctcatgtagcagctgtacaaacttgggcatttgtaaaagtagatataataacagttccttatgcaccgacttattatgaagactgagagttaatagctgtaagtgtatagaacagtgcctggcttgtactaagcattcactggaggttagctatttttattgtgcttctattgctgactctaattgtttgtatatttgaactgaagaattctcagtgagttttagaaggaagagaagatgcttacatatcacttgggtatgaaacaagagtataaatcatacatcttacatctcataacaactttattcacaagatgatcttctttcatcagcccaaggactggcttctctaaactgccacataattgtcctctgcagtagaactccccatagaccattatgttttatgtttatggactttcacccaagactttaacagcagcaatggaaggattctgctaaaatcttatgtttcattttcttttactttcggaccattggaactattagaacccatgatctattgttcgtatataaatattactctaacctggaaagtagctctttctttattaaggcaaatatttatttaatccatgttttctatttaaaacatcaaaatatatattttaaaaatgcatacattaaagaaaaaaatgtatgcaaagaatttataaccaaatgctggacttagcattactgcaaaaaaatcccacaagttctgattttcaattttgcagatagtctttactataaacatgttttagtataaacaatttttaaaattatgactggtaaataaatatttcagaatgttatttatttatttaagtttgtatatcaagcattgccgcttaacaccagatgctacagttttaatttgcattactattattaatttaatacattaataacatgcattaaatatgagaaacacaccaataaataaaggagatacttccttaactgactgatgagataattaaactaatagccatggaatttttaaaaagtctcaagttttttccataccagcaccagccatataaaatgtgtgggctttgttggtggatgggacacagaatgggtttgagaaatctggagaagatggtagacatggtgaaaaacagcacagattttgaggccagaagactggcctctaaatcttatctctgctacattggctatcggtcttctgagcctcagtttactcacctgaaaaacaagcataataacaccaatcttacagagtcattgggaagatgagtgctataatgtacgtaaagtggctagatcacagtagatgcttaataactagcatcttatcgggggatcattttgatttatttgcatgcagatacaatcagacagtgtttgcattgtttatttgttgtgttttgatcatttaaaaggcctattagcaatcctcactccacaaggttgccacctggggagactacagggttggctcatttctctgttccacaaaactttctatagttcctgctccaaagcacattagagaaaccatcacaccctgtacatactcaacatattatcattgataataaagagtaaagcactccactaggtgctgggagacttattttagttctggcttcatctcaaaagagctctgtgaacttgggctagctgcctactttttccaggcctcaattttctagtttcgggataagaaaatcagataagatttcttctgggaaaatttcagttccaaaactgtattaggaatttaattctatgattttctgacctagggcatgggttcaagacaaaagagaagaggaaaaacctgtaaaaatgactaaggagctaggacataataactgtccatctcatttccaagaatgtgatattgacctggttttcacatgatcccctagaagccaaaatcaaagtagaccagatctagctcccttctctgtgaccaagggaagattcccatataagcctttatcatcaatacctaaatctatgatttataaatattcctctagtcctgtcaatagatgtgtactgtgtgcggcatataattttgtctatccattttgctgaccaaagacttacatataagttgagagtgggggtatattctgtggtcatagatcctatttgcatccattgaggtcagtagccatgcccatagcccccagatatcattggtaagtgctaatttgctgtggtaaatttcttcctataattgaacaaataaataagtccaaatttaaactcttcaacttctaaatgtgatcaaccatggtatgagccaccttggaaggtggagagttccttgccctgagatacctaagaaaaatctggatagacactttggtaggggcattatatgttggagattcagatatggagtaatccaaaaattttatgattctttggttccatttactcttaccaggcccactctgggaatgtgagtaatgagttttatttttggatatattaaaaaacaacaaaaacaacaagttgtcctacccttttggggaagagagagaagcccgctgtgcacatgggctaattgagtcttttaatactaaagacactaatattccaggattctgagccatggggttctgcataatgcaatttaattaaatatagatggcagcactggggaaaaaaatgtgtaatagaggtaactgacatgcccaaacctggacctggcaaacaggaggggccaagatcaccttactggtatttgctgtggtacctgacaattacctgctggctctcttctccttgggtcctctgcgaatctgtgaaccctgcttattttgtgctcaattcagtgcccacggctcaacggattgttctatgactagtccagtccttctcttggcatgctgcctactccatgtcagaagttaaaaggttgcacttccttaaaatgcagtattttccaacagaacctgcatcaatcaaccaattagtataactacgcatgcactgctcacggctccatgctggctaatgatcactggctttgtcttatgcaaggctggtctttcctcgatccagctaagaaataaccacttgaaaggaagtgcatggggagatttcaaacacaacaggaagaacatcgtgtcaaattgccatagtcgtacaaaaggcagcatttgcagcatctgtccatacctggtaagagtgatgggtctcagtttgaacgctggggtgtggagggtgactcaggaataaaagaatggcctggtgaaggagtgactgaagaggctttctgccctaactctcacttcttgggctccttagcaggctctgtaactacctcattttcctgatttctatgacttaccctgggtccgtgctgatttgctgcctggatgaaggagtagcacagaccaacatcggtaggcgtgagagttgggtctgtgcacataaagaagggttcagaatctgtacaggactcaccctggcttccggcagaacctaagacgagggagagaggcccatccctggtgtacctgaaaggccaggtccgtgcttgttaattaatgcaaggcacagtgctaaggcctggcttgccccgctgttctctctcaggagccacaaatgggtgataataccactagttagagagcagggctcacgtctctgctcctgcccgctcctgtctgggtttgctatgaccgtctctgttggaagaaaactatttggctctaaactaaagtaagtcttattaaccatcatcctttcaaagaacacgattgtattgttctctttctaccctctctcctcttgctttgtctttcttttggttgtttcgtctctggtacttgtttaagtgggggatttaaatgtttggcgtggtcactacagaagcccagacgtaagatctttgaagcggttggtgaaaaaagggaagtgatactattgggtgaggggtgacatcaaagagaagcctatgttctgttccctacggcgtggctgggattttttactccaagaaaagaattaaacaacaacgctttccaggaaaagagtgactttcctttttttgcccctcccatcttcttttcctgatccattcagacatacaagcaattttgttttaaggagaagcctaatgcaattgagcactaatactataattataattaatgaaaataataatattcgaatatcttataccctttctgtttatctttgaacaacacagtagtagttacaaatgacaaatatgaatattatcccagtttttcatggaggaaaccagggccagaaagtcaaatgccttgccagggtcatacatctgatatttaccatcaaaatatagtctccagtttttcgactttaggctcagcatgtttttatctacaccttgctgcctcttcccacataatcttttaagattaagtcttcagattccagagttggggccatggagttactaaaaggcctaagaaaaatggggctttgaaaaggtcatattctcatccttcttactctgcactgtgcttgagtattaaaaggctgctttgaaaattcactggcccatgattacttgactaatgccagtaataaaatgcatatatcaaaaccacacacttttatttgatttttctcagcccattacttgtcttagctgagtggccagctatgtgtaagcctgaatggtaggaaggttttctggaagcaatgaccagttatgaagtttctgttgagatccagggagcaactttaggtaagcatatttttgttatcattcagagggacaagagatagaccttacatccagttcatcagtgccagaagggagctttgccaacagggtctcctctttgatcaccacctggatctcctctggaatcctgggaaggaaagtgatggatgttgatcagaatgctgctgtgggcagggttttgaagaaaactaaccaattgagtgtgtctggctgtgggagaaattttccaattcctgcaaataaggccaaaattatgggaccatttctctcctctttcctcctcttgatcattatcagcatcataaaatcaaccataggtgtgactctagagagatggaagtacggcgaagaaggaacactcagccaaggggcgtggagtcctggttctctccaggctctttgtggtcttggacaacaatttgactttgtgctctttaatgttcccatttattaaatgatgagttggacgatactgcctttgacacttccaggcctgatattctccaattcctatctaccttgtctctctcccataattaactttataattacaagtgcctataatacattattttgagttttctacagagaaaaaaaaaatgcaaggcagattaagaagtaaattaacaataagtattaacaaataatttctagtttgaatatttgtcttcttttatatttatttatttatttatttgagacagagtttcactcttgtcacccaggctggagtgcagtggcactatcttggctcactgcaacctccatctcctgggttcaagcaattctcctgcctcagcctcctgagtagccgggattacaggtgtgcgacaccacacttggctaatttttgtatttttagtagagataggatttcaccatgttggccaggctggtcttgaactcctgacctaaggcgattcacccgcctaggtccccaaagttttgggattacaggcatgagccattgcacccggcctgaatacttgtttagtgtacaaaattagaaagcaagtaaatgaaaatgaaaataaaacctctccattatcccatcaatcagagatgtccactataaagattttggtaagttttcttccagtgtctctgtatatatatacatatatatatacacatatatatatatgtatatatatacacatatatacatatatatatacacatatatacacacacatacacatacattttatatatagatatacacatatatctatgtgtatctattttatatataaaaatatttttctttttttttaaatcaaaaaaagagaatttgttgtcttatgtaagtaaacagaccaggtaagacttgatccaggattcaaaccatgtcacaaggagccgaatttttttgttctccagtttgagactcctctttcccagagacagtccaaattttactctgattggttcttcttataccataagtatatataaaaatatttttcattgagatttcaaaagattttttaggacttactctcactatatacctttggcctcatatcaattgtataagatctaattcctataataaatccattattctgtattatttttggttctgctttcctgattgaaccctgctggtacaaagagtggttgaaactcctaagccttgtcacatctgggttttggtattgggttctccacctagacattttccaagaaaggattttgaagcactgaacagtgtgttccaaaacagctacagggtttaaaagaatcagccgttttctattacatttaacatttattgaacatatactgtacatgtcagacctgtgctaaatgatttattagtacatgtattatattacttaatcctaactccctgcgggtaagtatatcattcctagttacgaataaagaaactggggttcagggatgagccaaagttgcacagctaataagtggcaaggtcatgattcaaacctaggcagtttgtttatgaagtccacactctgtcttcaaggtaagtcattcactgacgtaccaggctggagaggcctaatctattggtgggatggcagggtatttgttagttgcttgcactgtgagagtgcatgagcttgtgaaatgagtcctggtgaggaaggtagcaggtgtgctggaataagcactagacatgaaatcaaacagacatgggattttcccatcactttcttgtctcagcatcaatgctttcatctgtaatagagagataatcatatcagtcttacaggtgcagattgtggtgaggatagagaataacatgtaaaagcacctggcatgtttccaggcatatagtaaatgctagtggagtttaattgattctgaatctgagcagaaaattttaagttgagacctggttttttaatctcggatggagcacacttgatatgtgattttgaataagatatagggcctttctaggctcaagttcctcatcttcttaggaggtgattaaactagatgatggctaccatcctgcctaggattctaggcttttagttggtattaagaggaaggaatgtggcagatggtattttcccttctcacatcagcctgaaatgaggccaaattctcgagtacagtgtgtttctcccttggcccctctgccctgtagatattcttgactagatccaagcccctggaactttctgaaaggtttgaggtctgatgaaaatcacaaccgtttcttagaaggaaggggtgaggcctgtatctttgactgcctggatgctgttgcttttattagctcttctaggaaaggaaggtcacagctttataggtttcccaatgcagatagaaaataagtcctttgacttgctccaaagaattcagttcggaaatcacaaatacagatgatttattgggtcccttatactctattattttgtgattcagctgtaaattaacacattaattgaatgtaactgaagagctcttggacactaagcactatacagcatagagaaggggcatgattctccctctaaagatacctctctctaatctgcctcctttaaggaaatataaaccaacagttgaagaggaggtgcaaattttggtcagattttccagaaaggatgctgaagattttctcctatctccctggctatttctcattctcctgtgctagtgccttctcctctcccaaacttctgaacaaggagtggcccagggcttagccattgaacctcttcttgttctgtgctcacttccttggagattttattcagtttcacaggtttaataaaatcttagaccctgagaactcctaaatttctatctccagctagatttctctccagaactctagattcagaaatccatctgcctgctgagttatctgcctttgaatgtctattagtcctctctaactgaacatacacaaatgggagttcctgatatgcttctaactccttcaaacctgctcaacctaaagtctttcctatgttagtaaataacaagcccatttgttacagttgctcaggtgcaagtacttggagccatctttgactcctgtttctccataacccacttcaaatctatcagtaatactattgtctctgacttgaaaatatgtgcaggaattcaaacatttctcactacctcccagtccaagccaccattgtctctctccaggattatgataatttcttcctaaacagcctctatgcttccaccttgtccttctcaacagagcacccagagggattctgtgaaagtaaaatttaaacgctgtctaaaccttcggtggccttccacctcatccaaattgatagggcttccaaagccatatgaggtgtctttttttttctctccatcttcatctccccctgctctgccctttctcactgcccccaccaaaccagcctttctgaacactccaggtataatctggccctgggcctgtgcccttgcacttccctctgcctgatgttcttacctcgatgtccaaatggttcttgccttcacctcttctcagtctttaatccaatgtctgatgctcagtgaagcctttcctagccatcttatctcagattgcatttgtcccttcatatatgtcctatccccctttccctgttttttttttttttccttttcaacatttattaccatcaaaaatatacaagccaggcatggtggctcctgactgtagtcccaacactttggtctcctatgttgtccaggttggtctcatgcttgagctcaggagttcaagaccaaccaacataggagactccattttacaaaaaataaaatcaagaaaattagcagggcatggtggcacacacctgtagtcccagctacttgggaggctgtggtgggaggatcacttgagcctgggagggcgaggctgcagtgagcagtgattgtgccactgcactccagtctgggtgacagagtgagaccccattctcagaaacaaaacaaaacaaaacaaaacaaaaccatacatatttactattgaatttattgattatttccttccactagaacaaaactccacatgggcagtggagcgcagtggagggcattcagtaaatattaattgaagaactgggttggatggttggtcaacagcttcatggaggagcctgggtttgagctatgttactggccacagagaggatctgagcaaacaaataggctgagaaagaagtgcttgggagagagggacactgagcaaaggcctgggtgggagcccagtggggatggctagggctggactaactcatctgttttccatcagccttcaccttcctggttttctttcttccagaatatctagtgtcttttaggatgtggtaacaatcctgtggcttcttggtataatagaaagctcatggatggaattcagagtcatatacctgaatctagaagtgtcacaagccactttacctctctaaccctctgcttgcccatctgtcaaagaaggataacaacactggcttgtgtttctcttggggctgttgtgaagatcaaatgaggcaacaaatggaaaaatgcttctcacagtgaaagttggatgattatagtggggattagtaaaacgcatctgtgtatggctgaaataattactcagagtcatgtccagattattcaccatagtggtatggaaagggctagaggattccaattggtgactagttcagaaatccttcatcattcagctttcatatatgggagctacatgggaggaggaattggaagatgtaccttcctggggatgtgtcagtgtgcaaatgaggagcgatttatccctcgtgtaccaggttctagtgattcattcttctcctttcacccttataaaaaatttatgagttaaatattagtatctcattctttagaggtaggaaaaccaatgctcagaaaggttaagtaacttgctcattgtcatacaactatttggtgtcagagtcagaagaaaccattttgtctcaagagccttgctctttcagtaggctaccttttcagacaccttggtgcaaataattaagcagcagcagcagcactatcccagttacctaaatttgggcaagtgaataatacgtaagtctaacattggggagcccaggcggataacagactgagctattaaacacaattctgaaagtgagaaggaaggtcagtgtgcctctaaacccatgaatcctaatccttgtctaggtcactgccttgtgctatgaatgcttcctttcagcagtgcctggtaacaatttagaagaaaccaagattttgagttaaagttttagtaagagcgtaagaataataaagttggatcaatgtccagtggtctttctaagcatcagaatcttttttttttttttttttttttaaagcagtggtataaaggccgggcatggtggctcacacctgtaattccagcactttgggaggctgaggcgggtggatcatttgaggtcaggagtttgagaccagtctgaccaacatggtgaaactccatctctatcaaaaatacaaaaattagctgggggtggtggcgggcacctgtcatctcaactgctcgggaggctgaggcagagaatcacttgaacatgggaggcggagcttgcagtgagcagagatcacgccattgcactccagcagcctgggcaacagagtgagaatctgtcaaaaaaaaaaaaaaaaagcagtggtataagaaatatgattattttgaataattagtaaacctagtctagattttaactagcaacacttttgcagcaagttacctgctgcctgtcacataacggggcttaataaatgttcactggccgggcgcggtggctcacgcctgtaatcccagcactttgggaggccgaggcgggtggatcatgaggtcaggagatcgagaccatcctggctaacaaggtgaaaccccgtctctactaaaaatacaaaaaattagccgggcgcggtggcgggcgcctgtagtcccagctactcgggaggctgaggcaggagaatggcgtgaatccgggaagcggagcttgcagtgagccgagattgcgccactgcagtccgcagtccggcctgggcgacagaccgagactccgtctcaaaaaataaataaataaataaataaataaatgttcactgaatatatgcatacatctatatgtatatatatagcatgtatagtaacagtattgttttgataattatgtatgtaagttcatttgtatagatgatgaatgtacagatggatggatacagggcccagatgtcagagaaatgtctcccaaaatagcctgtaatcatgtataggaagctgacagaatgcttactttgaaagtgaatgcaccagaaaatttacagggtacctactgggtgctgatgaaaggaaatagaaggcatatctctttgcacttgcctcagataaccacaaaaggcatatatacaattttaaataaatcatttgtatagtttagaattgcttgaatttggaggcaaaagaggactgttttccctttagtgtgactcaacaatcacaggatgtgaggggtgcaggaggcctgggtcatctggtgcatttagccattttagattgaagattgaactgcataaaggaaagttacacagtgattcataggcagatgtttaaaaaaaaaatagaaataaaaaactccctctctagctgccactgttttctgtaggtgctatggatatcctcagaaataggtatttgcaaagatgcggaaaatttggtaggacggtataaagtcaattgcgtgcgctttggatttatttcaacctgggtttgaacctccttcatctggttactggctcttcatctcagggagtctatttgcgttttgaacctctggctcctgacttatgaaatgaagatacctgactgcatgtctcctgtcgggatgaaatgagattacattggaaggggctcagcagactgagtaccacctcacactgtttctcagtatttcattcttcctcatacccacaaattctccctttgtctctaacgtcctgggtacccttgggccaggcacagactgcttcctcccctcctcatctgctacattcaggtgttggatcagacaatatctaagattccattcaatgagtctaactgtctagtcccattttttaccagaaagctgggatagctggacagtatataaaacagtctactttgtacacatttatgtttacaagacatttactatgctttgccacatttaatccttaatacctgcagagcagtagttgctttcaccttttacaaatgagcaagccaaggcaacaggcatagaggaaataatcccatacctctggctgtcaatcagcatgcagggaagacttttaaaggcttgacaacagcattcaaacacaaggctcttcatgatacccttggccttaaaaatcaagtgtaaacttcccaaattcactctgtcccttctaccccctcttaaactaagagctttagtcatcttatctttcttttttgttgtctcttttaaatgttgccattccaggctgaggtcatgactctgtctcctaagaaccgtaatcaaatttggaagacaacaggactgaacgcagagccttccgtacctggttcccagactgaacatgcataaacaaagccgatggctgggaattcagcccttgttgcctgaggctgtggggctggctgtgaatttttacccagctcctacctgactgtctttttttagcatttgacatgcttgctgctggatccatgatagagccactctctcaagacattgatttatattctcccttgggggcctagaactatgccctacacaatgggtgctcactgagctggagatggtattgccgccaatgcagtccagaattgcatcaagtattttagcaattgcaccaaattatcagccagtctgattcgtagcccttcccacatagattcacaaagcccactttcagaaactaattcttaataatgcaatcagttcttggaaactgaagccgagtttcatatttgaatgttgactttcaccatgcaggaaagttggccacatgcaggagtgactggaagattttggcaaagatattaattgggattttccattctcagagaagctgcatgtgctaatgcacaggtaatactccattctcagggttcctagtagaggcagaattgaactgtttccccttttgaaatgcaataacatctacttctcagggctatcatgaggatgaaattagaagatacaggaaaaggttagcacagagctttgctcagagcattgagcaaatgtattagttgttgggactcttgtttgaagtaaaaggaccaggttttgaacctcattctgctgctcactagcccagtgcctttcccgttctgggtccagattctcttatcttctaatgagagtactaattgccacatacttcacagagtcatgatgagaaacaaagaatggctgagaaagtcctttgaaaactagatggctcaaacaaaataaagcattattaggtatatgtctaatccctgtgccatggtttcagcccttctttttgtacgaaaagccttccctccccatacttcctctctttaacctgcgtgttgaagttctatccttcattcataaggcagtaaaacattaatagctaagattaaagtcttcagattgctagggttcaaatcccagcactgttttttattagttgcttgactttgggcaagctacttcaccttgctgtgcttcagtttccagtctgtaaaatggggataaaaaaaaaatacccatttcataagattgttgtaaggactaaattaacaagtgttaagtacttagaacagtatatactccatactatataaaatgctagccataattatttcaaggctatgcttattgttttgatgtctattatttcaagaatatgtttatcattttgcattattttattattatgttcaaaccccacccctccaagaaactttcttatatctctgaagcaatcatgttctcgaagtcaaccaaagtatattgattgtagctcagttgtagctctggtcattgcttgtgtgtttgtttatatctccctcccccaccagctttggggccctaagtgacagaggtttgctcttttacctccgtacacatggtcagtgtacattaaatatttgttgaattggatggaaggtatgcaaagcaaatgtatacacatgaataaacctaaatttattgtataacagctaataacaccctctacataataactacattttcagactgaacaaaattacaaccttttgcactctccctgacacatagtatgtgctaactaaatgtatttacttgaaaatatgagaagataaataaaggtgcataaactccagtaaaagtctcagtctattgggtcctcttccttcaaaacatgtgcgagatgggtaagttgcttatcttaggcaccaggagaggattaagataccaaggagaagaaacaaatagctactgacctccaggcactcacattcaagaggagagacagtgcaattactaaatagtcacagggggtcataagtgctaagctgagtaggatgaaatagcacagcgatgtgtgttcagcagctcagtcatctctctaagatttggaccttctcaacatcagattgcccaggtatgttcatttgggatgattgtaccttctttttcaataagtaaggaaccaggggaaaagattccaagttgactaaaggcagaggggaacaggtcagttataagagtgtggtagttcgcaatacagcaggtgagaatataaaatgaggaggtaagaccataagccacgtctctagaacatatctcatagaaagtgcttctcagtctcaaccattttgatgtcaaatgtggagaaaatattgtgaaacaacaaaaactatcctggtccagtagaagggagacctagtttcttaccaaccccatttccaccagtgactttcctccctaaagccccgatttcactatcaatcgagaaatgagtttgaacttgagtatttctaaggaccattccactttcactgctttttggttctattttttaacacctgatctgatatgaaagccaactctttcttctagcttcaaatactacctctattttgatgaatcgcaaatgcatatctcaaagccagacatctcttttgaatccaagtcttgaatatcaccttgcctactttgccatctacctcagttgttcaaaccagagttttcaacaatttctccacctccaaaagattttcattttacagtgttttttgcttgtttgtttgtttgtttgtttgttttttaactcagtaagtggaaacacattcgcccagctgcccaattcagaaacttgggattcattcttgatacctctctttcttttaccacacactctggcttaatctgattcattgttaaatgttgccaattctaacttcaaagcaactctcaaatatttctacacctcaccacctatatgtcaaaggtgtgtagtccaagctaccttcatctttcactaggactcctacaatagtcacttagaaaattgcctcttgtccatttctaattcgtcttctacacaacagctgggatcgttttctttcttatttatttatttattgagagggagtttctctcttgttgcccaggctggagtgcaatagtgcgatctcggctcaccacaacctctgcctcccgggttcaagcggttctccgaactcagcctcccgagtagctggtattataggcatgtgctaccacgcccagctaattttgtatttttactagagatgggggtttctccacgttggtcagcctggtttcaaacccctgacctcaggtgatctgcccgcctcggcctcccaaagtgctgggattacaggtgtgaaccacctcacccagactgatccttttcttaaaatgtaaaacagatcatgtcaatcatgtcaccatcctgcataaaacccttaaatggcttcttgatacacttaaactataaattcctgaccatggtctatgaaggcctaaatgatcttgattctccctccaactttatcttccaccatgctggcctctttcaggtctctgaacatgtcacaattttacccactttagtgttgtctggtctctgtttcctctgcctggcacactttcccctcactcttggcctgactaacccatcttcctttttcaaatcccagtttaaagtttactagagagctctgtacatgtaggtaacttatctccttcccctgtcttttgttttgttttgttttttgagacggaatcttgctgtatcacccaggctggagtgcagtggcgtgatccctgctcactgcaacctccgcctcccaggttcaagcgattctcctacctcagcgtcctgagtagctgagattacaggtgtgcaccatcagaaccagctaatttttgtatttttagtagagacaaggtttcaccatgttggccagtatggtcttgatttcctgacctcaggtgatccgcctgcctcagcctcccaaagtgctgggattatgggtgtgagacactatgcccggcccttccctcatcttatagcacctgatttcctgtatctcagttatcatacttcataataaaatactcatctgtggatttgcttgtgtaatgcttgtctactcaactatattctgagctgccctaggaatgggtctgcattgttctttgcatctgcaaagtctatcccagtgcttagcatagagtaggtgctcaattcatgattggtggttaagtttataacctttgtgtatgcatattagtaagatctaatgatatgaatacatgtttattccatgctgaaaaagtgcaatcaagtgggcaatgaatgaggaaatagagttgactatgtcccatttctctaattttttcagttcttaactcctagtatcttgtagcactcctccattctcttactgaaccttccaggttttcagggttgagtagagaagtttggtatgatgtcccctgtgctttgctccccccagctatatttagctttgtgaaggaatgtggcttccacaggtatgtttgggtgagaggtgttgggaacagaatgggtggaaaaacggaaaaaaaaaaaaaaaaaagaaaagaaaagaaagaaagaaactatgtggaggaggtgcctagcctcactcagcatgaatgttgcccaggattcctgattttgtcccagctcatccactttggaatttttatgtttatttaaaaaggttttcattaatttattttaatctttaagattgcagtttttatgccatatacatcagcattctctccctcccacctctaggaatccaaaaataaataagcatgggcttggtgctggcaaaactaacaagtatgagcagacagctcctgattccaggagttttcctgtgctacgaccacctccatgcctggtctctgtggaagctgtcatgtacctattcctgttgagtctactggacttcttattccatttagttacctactgttacagactacagaaagtaggaaatgggtttttgagtagtttttctctctttatttttttcttaaaacactaataaatgtctgttgcttcatctgcctgttggttgcctgattccgttactggaatgaaaagtccttactgcttctctccagtccctatactcatcattttgggtttgctgtcattgtttgaagacagggtttcattctgtcattcaggctgaagtgcagtggcatgatcatagctcacggcagccttgaacttcaggcctcaagagatcctcccatctcagcctcccgagtcactggaactacaggcatgagccaccgttttctggcttgtgctcgtattttctttcattcctatcaaaaccaacttgctcctaatcccttcttatattcaccttgacattcatgggatccactctgcatttgttgcagaggttggaaggatagatttaggaattctcttagcaggaccagggcatttcctgtcttttaggcttttgataagaaattacctctttgttttgataactcactcatcaactcaattgcttaaacaatttataaataaccaccttgttgatcttataaaacagccctaataaatttggcttttgcttatacctttatctaagactgaagagagctcaaaacaactgattttttttccatttgggtagaggagagggatggggaggagctaaggtaaaaagagggggaagaaagaggaagaaggtaccaaaaaggaggatctaatactggatttcagttcccactactgggaaatggttcatttccaattctgcatttcaagaacaagaaggctttctggtggttttttttttaatcctctttggatcagtatgaatccttagtagcaacatatgtcttcctatacttaaagggttaaaagattttgggaagtgaaataattgtatttgaggatggttacaaagtcaagacaggacactttaaatacattgttctccagatacaatccaagcctcagactctgttacttaataacctgatggctttacttaactgcaatagttcactcattagtccgttcattcattcatcagtcacttagaactgtgaattatgattttcaaagtattttctcctccattgtgcttgattcccatgaaaatcctacaatgtactccctttacagaaagtaccattttagagaacaagaaactgagacccacaggagttagtcagttgtggagatttaactgaaacccagattctcagatcccacattgaattctatttcagttttacctactttaattgaatcaacattttctaagtgagcaccatgtaatgaacacaattctaagaaaacgaaaacaaagtacctatgtccttgagaagcttatagtttagcaaagaaaggcagagagcaaggcttgggttggagaggaagaaagtgcatggatccttggaaaatgctgaggaatctggtgtagaaaattgtggtagaagataagactggaaagaagtgagaggacctgaagggcttgattgattgattcatcatcaaatcatcaagtcttctttatatgccttcccaaattgtggccttcagtagcatcattactaatatttttttctgtcccattttctactgagcaatttgctggcattttagtgccagtgcctccaaagggcaaggttggtctgaacaacttgatgtttagatattgaaagctgctggacttcagctaattgtaacattgcttaaatcttgtctggtggcattatgcatgtgccattatgtcatcttgcccttgcctggccacagaaaataagtggttacaacttctggcagacagacccaaccctgaggcaggatgggccatggaaaataggatgctgtggaaattggtctgggtgcagacctggcacctggagatattacctgttgtcagtctatcacccaaaggtctggaatgcccagagagctgaggtgaacttggtcttagttgagtaggcatcaggatctactatatgtcaagtccctgctaggggtagtgtttggttctggagtccagactgtggacattaattgaggttgtgtgctttggaatagcataatgctgggtgatctgtctgctcatgggagaacctgatgggtaccaaacacaagaagctatcaaaatcaggatccaggctctccaatgagagggctgacaaaagttaagcaggagtagaggcctgcagtccaatacagggctctagtctcactgggggaatgagcattcttgcagtaaggctccggtccaaaggctgagacaacatggtgatgatggtgtagagaaagctgaggttctgttgtgtcttcctgtttgcagatcttcctgcattaggtgttggttgccaatcaatggtatgttgacgtggctgggttatccgtcattccaataaatactagatgaaccactcaaagtggctgaaactgcacagggaaggactcaatgcctcaccctgatgggggattggggtcagggaacagcctctgagaaggggctatagagttttactgggagcagagtccggacatttggaggccaatcatggctcaaggactatcttttgcaaaacctaaagcaagtttcagaacctttctgggctgttgtttcctcagtagactatgtgccctgtggagtcaggggcccgtattttattcgtatttgtttcactagcatctagcacagtgtctacctcacaagcagcagtcagtgaaatgcatgttgtttgaacgagtgaatgtgagagtgaagacagtgacctgagcatgcagaatcccatcagcagttgaagggagaagggccttatcaggcccatatgcttcttaccctcgcccttagattcttttgccctctcctctcctctcctctcttctcctctcctctcttcccctccccttctctcttctctcctcccctctcctcttcttttcttttcctttcttttctttctttttcttttttttgctcacacttttcttttaccatagcctttagattctgatgcctacctttatgcccttctttaagaccagagacccaatgaatgggtcttcttatcagctctgtgattgattctctgatgaaaaaaacattgagatagttcacttgaaatttttttcctcagcattcactgaccaaacattataaaaatgttaaaaagtcacttatagaccccaaaaagttctatctacaaggagagctcatgagtggcctcatataataaccaggaaaacctttaacatttgcaaatgccatgaaacaccaaaaaacaagataatcacagtatgataaagggtgcaagacctacagagtctactgcatctcattatggtcaatgtgttcagaaagagtgacattttgttggcatggagacaaatgtctcctaaagtgaaaggtcttctccaagcgtgtgtggatactttcgacttttgctgtagtccctaaacatgtaggtggcttcaactttaagtcagatattcaaacctgtgaataacgggactaattgtttgcatttaaaaggcttcaattacggctttttatttcttgagtgtgtgtttgtgggatagatagatagatagatagatagatagacagatcgatagatagataatagatattaagcattttggaagataaaaaaagaataaagccgagaaaagcgttcataatcctactactgtaagagagctactgtaaatatttttgtcaattgtgtactattatttacatccagtctattttctacaaagaatatatttttaaaaattgctgtgaatatactgtatacaaatattatatagatatataatatgcatatatctctatatacatattctacttctttccactttacatattaccataagtatctttcaattctaatttttcgaaattagttgtattgtaatttacttaatcattcttcatccaacattctttcttccagcctagtcatgataggacatgtaggttgttcaaattttttgttgttagaatacagcgctaggatgcatatactcattcactgatttttcctgtatgttgaattatgcattaaagatagattcctagaagtggaatctctgggtcaaagggtctgcttatatttatgattcttggtatatgtggccaatatatctgaaaaagtcatactaatcaacacagtaggacctagtctcactgcacttcaccaagagttatttaaatgttggctttcacagtgaatataagtgttagttcaaagatcttataactacttggcagagaggccaatagatgtcagaaaacatgaagggaagaagagaagagacacttaaaactcaagtgcagcattagaagtaaaagccattgataactgacaattggttagaaattaaaaaagcatctttgaagtcataatgtacatcaatacaataacaggcctcagtttaccaaagtggatactgcaacaaaataaatgattcggggtgaactggtgatgggaatcagctctgccaccaatttgctaagtggtgtttgcaaattgctttcctctctggacctttctcaactgtagaactggtaagccgaaagatgaagatagatgctttcagaatttagagaattgggttgtactcagataatgcagacaaactcatagggttaaggggtctgataggagcttctcctctgtagacaccgagactcataactctgatgagatccacagttctattggagttgtgcaatgaaatagcagacactcttggaatctcttggggctcccccaacttcatgaatgaatctctaagttctgcatgccccatataaactgatgacaagatctttgagagcactgtttccttagtgggtttccacagagaaattttgaatatgggggtccacgaagtggcttgagccatctaccccaacaacaacatttggcctttggtgcctctctagtattctcctgatggttatgcagatggtggcatacagaaatggagtaaattagtaaactaaaagaataaatgaggtgccccatttctctgactctattctaggaaaatgagtgagaagcaggatctcccagatttcaggagagatctgggtcactttttggaggtttctggtattgaaaattatatatatatatcctccagctgtatatatatatatatatatatatatatatatatatatatatataacatctctatatgatatacgtatctatctatacctctatagatatctatagatatctatctatatctctatatgatatatagagatatagatatctcctccaggtaatagacttaatttttaagaacatgtttcaattcacagaaaaattgagcagatggtacagagaataaccctgtgcccagtttcccctatgattaacataatacattatatggtacacgtgtaacagtgaaacaatatcggtacattattattcactaaagttcatcattgattcagatttgtctaggttgatcttatgtctttttgtggccaattattccatctaagattcgacattatattaagttgtcatgtctccttaggctaatccttgcctgtgacaatttctcagactttccttgtttctgatgaccttgatgggcttgaggattactggttttttgtaggacgcccctctactagaatttgtctgatgtttttcttatgattagactagtattatgagagcaggaccacagagagaaagaacaattttcaccacatcctatcaagagtatatactatcaagatgatttatcattgttgatgttggtcttaatcccctggctaagagagtgtttgtcaggcttctcctaagctattttcccctgactacctttccatacggaatatactccccgggaagaagttactatctatagcccacaattaaagagtgtgggtttctgtttctcctccttaaggccggcacatgtctataaattatttggaatccctgtgcacatctatataaataaatttggaattacgggatgtttgtcttttctctctggtttattaatttacttaataatttatttataatagtatggactcattactttttttttttttttttttttgagaaggagcctcactctgttgcccaggctggagtgcagtggcacaatcttggctcactgaacctccgcctcccgggttcaatggattctcctgtctcagcctcccgagtagctgggattacaggcatacgacaccatgcccagctaatttctgtatttttagtagagacagggtttcaccatgttggccaggctggtcttgaactcctgacctcaagtgatctgcccacctcggcctcccaaagtgctgggattacaggtgtaagccactgcacccagccctggactcattaatatttattttatactttgggttataatgtaaaacactattctattttgttgctcaaattgttgcagctttggccactgggagctcttcaagtggctcctgtgtctttttgaaatatccctcaccaatgtagttttgtttttgaataattccttactttaaggtgctacaagatctttcattctcatttgtgtatttcctgccccagttttagaactcaacaatttctccaagaagccttggttccagctgctgagaaatggcattaaaactgagaccagcctggccaacatggtgaaaccctgtctctactgaaaatacaaaaactagccgggcgtggtggtgcagggctgtaatcccagctactcgggaggctgaggcaagagaatcgcttgaacccgggaggcggaggttacagtcggctgagatcgcgccactgcactccagcctgggcaacagagtgagactctgtgtcaaaaacaaaaacaaacacaaaaacaaaacaaaactgagctctgagcaccaggtgtgcttgttgctacgacaaatatatttcaaaccttatatttttaacaccagcacccacacaactacaatacaattgcactattcataaaacaattatagattattaacaacattcaatcatggtgtcataggagcctgtggtcctacactggatcccacacacaaaacttgcatatgatggtcatcttctttcagtcctgttaggattgaaagagagatgtatagcctcagtggagataatatcaaaagtctaattttatttatttatttctttctttattttgagacagggtcttactctgtggcccaggctggagtggtgccatcatagctcactgcagcctcaaattcctgggttcaagaaatcctcctgcctcagcctcccaagtggctagcactacaagtatgtgccatcatgcctggctattttttttttcttccgtttttttagagacagggtctacgttgcccaagctggtcttgaatccctggtctcaagtgatcttcccacctcagcctcacaaagtattgggactacagttgtgagtcattgtgtctggcccaaaagtccaaatttgaggccttctttggatgtgtggccacaataaatggctcttgcaaggctgccaaccccttacactctttccataatatgccataagaaaagcatactggatttagaaatagggcatgaaagttctgaatccagctgtgttagtgttatagcatatatagcaagtggattgtgtctgggcctcaatttccaatgatacaaaatcaggaacatcagattggataatggctaaaggccctcccagttctagcacactataattttcaacagacttacactgggggaatacaattggctccactagtctttgtatacaggcctaatattccagaaagtctaaaccagtggaggcatgggggtgcggaggtcgcggctaataaatcagagtcattttattattttttgggaatgccaagacctgttaaaggctttagatagtctagacaatcgggcctgagaaactttagacctttctttttaaagaatgaagatcaaaaaagtataaaaaatattgatggaaagtatctctttcattggtttcatgttctgatagatcaagacttcttcctcttttttttttttttcctttagtaagggaaaactcctcatctgctttttcctctgacttcaaataattacctttaatgcagtgatggctgagccacctctaagtttcttaccaggaatctctctctaggtttttatttttttctttttctcttccttccttctctcctctctgcctccctctcttatgctctccctccctcccttccttcccttgaatgttatgatgtgttttttacatccatatactacccagtgtacaaatgtcatctccttcctatcattgatggggacaatttgcaaaaacaaatagaaggaaaataaaaaaggaaatatagggcagaaaagacacttgggaactgtcacatttgattatgaatgctggagatcaaaggtgcaaggtcttagaacctacttcctccacctcttaacgtttaaaatcttcaattggcttttgaacccactcagcaaaatcccagactttggtctacaattggttaaaaattgatagagtgaggattctgggactgccttctttacttagaagtttacattttaactccttccctagccccaggtacacatatacacacagctcctttccactcctctcgcacagttctgtaaatatgttttgaaatgtaaaggtacagaactaagcgcagaccggcatccctcaaatcatcggggctattccttcacacagctgaggaaacggagtcctcacaagtggctttgctcaatgtcccataaagagtttcaggcacagctgtaattagaaaccaagggtttgtgtgtgtgtgcgcgcgtgtgtgtgtgtgtgtgtgtgtgtgtgtttgcaacaaatacagtgtttttttttttctccctacactgtgcccccgtggagtcacatttgtgtgtctgtgtctctgtacgtacataagttacacagacactgacatgtaggaaacgtgcaccaaagtgtctgtcttctgacctcaggtaacagtataatgacttgaatttcaggcagctgaaaggtttctgccggtggaggttgaaataaacaagaaaagccactgtggagatgtgaatggaaaagtaccgagccctccctccctccgcacattcttccgctctccagctctccctgccatcgagctggcttcagataggcttctgcatggtcaggtgtacaagagggcggtggggagaagaaaaaaaaaatgcaggcacaacacgcaaatcaagtttttccacttctagccttaggtagtagagacagctaagtacagcagccagcagcccggcaacggcagcgggtggaccagccaccctgagtttacaaacactcaagtgctttccttccctcatccctctcagagtccagctgctgctttccttcatgctaaggtttcataggaagtgaaaactctgctattcaaaacagcgatcgaacgcaataaacaaatcattacacaccccctaacccccatcacttctctattttaagcttctgatatttattcccattttaaataagtgagaaaagtgtggaaaattagtgtttgggggtaaactctgagccaggctgaaaaggtttctaaaggaaaaaaaaatctcagaacaataaaggctaaaagcaggcagcatatggatgaaaattaaacactgatacttccttttcagaaggcagtagctggaaattatacacttttttaatgtctcaaaactttctgctcatcttgctatgttaaaaacgcctttctttctccaaggatactacaaaaagcttgtttacaacagttctaaatgaaggatttgaaataaaacgaacaggtaaaatttaacaagtctgatagatagtgtctcccaaatctatcaaaagcagtgccaagtacttcaatgtagctgagaggcataaataaacccaaatgaccatcaaaactcatcatgacttggagttcgctctgagttttgcagtttacaaagagaccatggcagccttgcttccctcagttctacaaggacacaagatatacacctacagactcaagttgtcagattacactgatcctctaaaatgacagagggccagcaaatcatgcagacccattttcagttgtgttcctggggtcacacatgctcctagtgaagacccagcctataatcctgaaagaagaaagcctagagaaggtgattgatttgaaaaagtcttcccagttttaaaatctttagtcctatgatgtggtatcttaaagacctaccaaggtgccagaggttcctgacaggtgaaaccaacttcctcttgtgagcccccttagaaagaggacagaaccgtgtttattccaaggataggttctttttcagctatgactgaattgtggggaaggttttgcaagggggaattggatgtgaagtctgttcttttcctcaaatagatgtaatattaggaccaggctattttattttgtaataaagcttatatttacccagcagcaatgatcagggacctattcttatgcccagtccatgaggcaaagaggttggcctggtcctctactgagtattagcagccagtaaccattaaatcatgggactagttgaaatgtagtgccccgaagtctgcaggaattattcatacgaccccagacatggaatcactctttagagcttcttaaggatgatttaaaagaatcagaatacgttcaagtcagccctttctttaatcctgtaacacggcactgcgggagtgagggaggcccacatagtgatgccaactggatactgaggagaggtcaagaatgaaagaagaaatgacattctggaagaaattcaactggtataatatttgacaaagttactttcctaggaattgaaaagagattgagaggcgggtgcacaattttcctcaccattcattcagttcaaagtaaaagagactcaccgaaaagtaagtgcctatctttagaaaattttcaataatgattttctctttctttctaactggtcttctgttctggtcaatttctttcagtgtaaacacattgatttggcaaaaagcagtaggaaaatgtggcactctggcacttggtcccagaaataatatgctgggaagatttgaggtccctggtgatgaggttaattatatatgaaccagccctggtgggttctccctctaggggctcactgcagagaattaaagagggctgaggtatgagaagggtgaattccttcccagcccccactctggctggttctactactgccttagagagcagatttccctttgctctgcagcgcccccatggggctaagagtggagtggcaaagggaacacaggagggacaagctgtgtttcaggttgaggggggcggtggatgaggctgaatggcagttttgacaaagaaaaaagtgaccaaaaatcataaaaataatcttttgagggcccaatagtaaggcagagccatacaattcacattccaaaccatatagatacgtctgagaaatcctaaagtgctaattgctcataaaagaaaaaattacacatataaacacacaaagaaaatcccttccacaaaatcggggtgtcattttgcatccagcgggattcattttaatttctttgaaaatgagaaggaaggggactcaaatgaaaaagcagatagtctgccttctggcagaataaatctgaacttgacaatatcatgtgtctttgggggtaaaacgtacatttcaacaacagtgacaggattaggcctatgtatatttttcaaaaaccgttcacaagacaggcttttctgcagaggctgcagtaatccatctgtcaataagtattaaaatattcagatttcacagggacagacactttaacgcatatttcctaagctccagcccttgtggaaaataatcaacctctttgcacctttctgggttttaaaacctaaaatacagcctttaaaaatgtgtgtgtgttgtggggtaggggggtgcattgccaacaacattttcggtgatagatggaacttcttacgggactgtcaatgaaagagattttccaaatatcccagcaaacagcaatctttcacagctctgatcactcctccattataaacccaaattttgggttgagataggtagattattttagacatatctttattagaaattaacaagtgacgagattttgtggaagctttaagaattc

SEQ ID NO: 38 - DNA, 151169 bp, Homo sapiens
gaattctctcttcccaagctttacttatatttaccttgggactttgcaagaaatgtagctttttaactatagtgtctataagcatatatcaagaaagctcaaatttactgagaaatataaagatctgcatctcatatgctttgttttacatctcatgtaaaacatcttcgtttaacatatttgttttacatctcatgtaagatctgcgtctcatatgctttgttttactataaaacctacctgccttatccttgggagtaagaaagcatttttatagtgtgtagttatgctctttccaattgtttgacaactggggaaataaattgaagtgtttctagcatatttaacttaactctaagcaaagcctgatcattttgggcctgtgactcctattgactgtgtatcttctggttccaatgtcagagctaagtggtctgtttaaatctttactgggggcttttaactgcctgtttatgcaatatctatgtaatgtttgtccaattttatgcacttgaacaattttatcttgatttttggataagaaaaagggtaaagtcagtatccagccttaagggtaaatacaatactaatgagtgtattagtcctttcccttctcactcccatgtaaattgaagtacatagtcaattctgggaatgtaaagtctccaaggaagttaactgagctaagtgttggggccaaacagcctttctgactgctcatcaaggaatccccatcagtctttggaaggtgacctgtttcctaaagatagatactcaaggtaaaattcgttctatttatcgtgagagacttgcctcaggaatggactcagctttaatgggtcctttccttatgtgaattggtgtctcctggaaagccctggaactacaaatgttctactgggtaaatgtgtgtttaaaaggaaagatatatatttttaaaagtctgcccaggatattgaccccagccttgtcatttttagaatggatgctttaaaagccagcacaatctatcccatgctcccttttcaccctgccttgatggctaggagtgtcccagagatgagtcatggctatttttgtgtgtgttgagcctcagctcaacagaaactagcaggttctctgagtatagctaaggaactctgatgaaggccctcagcctcttggacagaagcagcataggctgtacctgctgaaagtgtccccagaccctctatattcttccttcctaactcaacccctatcttttttttttctcccttgcatggagcacaccctatttctatctgtctttttatgtatttacatcccataatagattcgtcaccaaatctctatctaggataataagacccggaaaaaaggataagtagatatagtcactcttaatacagattccagagcctttggggtgctgggaagcatggtgcacagaatttgggcccttggacaccagcagaaacagaatgtcacttgcctgcagttgctctggttgctgccaattaataaaagggcagcgtaaaatcttcctgggaagattccactatgtgccactattagagagccatggactgctctgtgtggcctcccctgagattcagaggtcagctcccacccaaagagtgggagcttggaccatgctgtcgctaagtgctacatcctggggatggagaggccttcctaatatctcttgaaaatactccccaggggatcttggattcgccctatagcatcgtctacggttctttgaattgcggagacacaggagaagataggacacaccttgcatttgtcctggatctatttcctggtaaagaaatattataaaccactagctcattttactcaatcttctttttttgtttttcatttttggcctccagtagcctgtgggacaacatatcccatcagtaacaatggctggcaatagaagggattcttcccaggactggagtaggtggagagcaaatttgtctcctcaagaacatgtattgaaatctctgaagcagaggtgtatacagttttcagaactctccaggtgattttgatgtacacaccttttcaactcttcattactttgtcattttaagctccacactggcatttcttacattactctaataagtaaaattgaataataaatattttacaaagctcttcattaacttgcattccaaattgaaggggaaaagtgattcttttatccatcccctcccccttgctgatttgtttgcagaatacaggtgctcagtattttattttataaagaaataacaatttctttatttgaaaaagtattgcctagacaaaatatgtataatgaagctgccagagtgtgatgtggccacagctgtacacaatatacatttgtgagctcttaaatcgtgggttctggaataagatagtgtcattcgcggaaaattgaagtagtaattgtgctcactgattgtatgaaaagtgaaaacagtgctgttacacagaaagatgaattctattggtctctgcttagaagctgctatgctaaattaaacctgatactaggcctaaggggattgcattatttgaggaaaaaagaaaatacaggtaaaccctgacaattctcatcctctttctgtttttcctttattgccatttgttctgggaacaagggtatactatttctcagaggttctttcctggcacgagggtctaggccaggccataagctcatctcagcttcgttcagttcctggccattcatggatccctctgtctcacctggtctggtaactggcttctaagggaatccccagtgaggtttgagctacccagtcctgagagcctgggccagtaattttccatttccaggcctcagttgttttaattcaatgtcaataaattttggttaagaaatgaagagttcaagaaataaaccagatttttaaaaataaaagagctcttctagagctgtcagtcaatggttcaaagacaattgtgtcctttctgaggtctttagcacaaagccgctagagtaacacttttcatttcaagagagaatccagtgacattgtccctgacttcacacttcctgaaaaccacttggcaactcaacaccaagagcttccggttcttagcaacctgtttcacttcttgaagctctttactgttggaactctgcgtgtctagggatccagacttccgggttaaagaatcgtaagatgattacagttggaagttggaccaaagctagggtaagcagccatatgcctggtcttttccatgctcaaggcagcctcccttcaggtaaccgtgtcttcacttggattaccaaatttgaagtcagattcccctctggtttctaaagaatttgaattgggcatcacagagctacggatgctctcttgctccagctcagcagtaatggaggcagcaggagcctgcagcacagaacaaactcattaccccagcagccaccttagcctggcttgggaccaggaactgaatatgggctctaacagttctatgacgctatgaatctgaaatgttattactgtgctttgcatggcatatgaaattacattctagctcaccaactggtctaagattgccctgggcaaagagatgttacttctcactcaattccctgttaggagcacaatagtactaaaataaataaacaaatgagctcggtttcagaaggcctagatctgaatcttggatgagccacttaggggttgcataaacttcagtttcctgatctgatctgctttggccagcacacaggtcaagcggtttgtgctaggcacatggtaagtgatggtcacagcatatcagggggtgtggaagcagcaggctctgcctttccctgtccctcatttctccttgacttcctagggtgtcgtacttaccatagcacatgatgtggagaatgctagaagagcagttgggtgaagcagggccaccaaatagtccttgcctcctggagacctctggaaatccagatgagtgtggtctgaggttgggcctcccactgtgcttgctcctctcaggcctacccagcgctgcctctgaagcctaactcagggccctgaaactcccccttggggcttcccttctccccagccctcactcttggtgccctgcctggctaccatggtaacaggttccagggtaacagaggagggagctgggtcctgtttactcccagtcctgccgatgaggattctgaccgtagacactgaattgtcccgtacctatccgtgctctttctgtgttctcaccagggctgagctcgaactgccacctctgccagcaggaccatgtgtaccagcttgaccacttgtgagtggaagaaagtcttctatgagaagatggaggtggcaaagccagcggacagctgggagctcatcatagaccccaacctcaagcccagtgagctggcccctggctggaagcagtacctggagcagcacgcctcaggcaggtgagaggttcagtggggagggaccttgcagacagcccctgggtcacagctgtggggtactttccaaggagagacagagcccagtcgcgggcttattctggtgtcagctcagatggggaaaaagacaaagacagccggctgggtcagagagttcttgcttttaatcctagcaataccactaactccctgggtgaccctgagaaagttatgttccatctttgggtcttagttgtccacattaaatgaagagctgtaatatcatctatgtccctgcaatctctgacatttagagtgagttggaactgaaggaaggaggccatgaggtccattggggaaagttttaatctaggagttgggggaatgcagggggtacagctatgctctgttcctagatatgtttagtgaattaatccaatttgatctgaatacataaacatttattgaccacctgctgtgtgctacgaactggctctatatagctaagtagccttgtaaacttggcaagtctgtttccctttctggctctcagtttttatatttacaaaatgagggggttggtcttagataatagatccaatccactctagctctattatctatgcacctgtgataaaaagatttagctttgagcaaaactttctttaggaacttagagcccagggtcccactctttataggagctgcacatctaccacagggcaaagagtccttgaggccaaggggacgaggccgtctaaagtccacatgcctttcctccttttagatcatgattggggactgggactacagaaattcctccccagactacctcaagtccatctgtagtgtctgtgcaggcctttttcctgtgtccttggattcaagagaggccagtaagtggctgtgctctggagatgtagccagaacatggacacaaaggctgggttgttcacgtgtatgtgtgtgaagcttctcatggtgcagaatggtgctgagggtgggaacagaggaggcaagatgtgggtagggagcttacgtttgtactcttgtcccaagacctggaattattggagtaaacctgccttgtgaaaaaaagacagaaaaccagaggttggctgattcatgtcagttccatcaactcaagaagcatctattgggtacctgttatgtgctgagcactggctctgcctctaactagctgtgtgtacatggatgcctctcttactatctgggcttctgtctcttctcagtgaaataaagggctgactagatgcttcttaagctcgcctgcccccagatctgatatttttgaatttaagatgtgaggcctaacttgatgtaggtgaagcaattctgggttggtttgatgtaaaaaggtgtagaaggagactgaaaacataaagcatttgaactgcctggtggaagaggtgcagatgcctggaaacttgagtgcccaggatccagagtttcggggctgagctcagcaagctcatgtctcctcttgcttcagaggtcagctcctcttactcctggctggtgacttgtggctcccagctggcctcaggaagagctgaagaactgctgcccatgagcttatttgtgcacaggctcactctgtctctaaacaggcagatgccctgcagctctcacccagcactgggggcggggaacctctcctggttcagtaccagctaggttcctctgacctgccaaccccaccttgggccattctgggtactgttctatgctcatgtgatcaggctttcaggggtcagagccaggcttggcctcacctctatcccatagcctgggttgagtggtgcttggcatatgggaggtgttgaatggtgtctgttggattgaattgagttcctaatcagaagtccttcaaggccatcatacaatggatccagaaagggccagtgatgaggacagggacagcccagtggacatctgactgcctgtgaagcctctataacagaggcctggaagaggctcatctcagggaaggaaagaactgccctggaggtcaggagtgctgcatcactgaaagtgtgcaggcagtggtgggggcggagtgagtggggcttgcctagatgagccccaggctaccacccacaacacttcctgagactgggactctagaaagcccaggttacgccaagtggcctctgtgcatgtaagagagagagagaaaatatatgtgtgtgtgtgtgtgtgtgtgtgtgtgtgtgtgtgtgtgtgtgtgtgtgtgtggagtggcaatgggaatgaataccctcttttccagtccccactgcagggctagagtgggatctagagaagacttgtcaagagactggggagtgttctttgtgaagatgtagtaactaaacttggtagttcctcctaaaagccagttgatcctacccatctaccggtctgtccatcccatcattctcagtggtttactgaggacctacagtgtgccagggtctgtgcttggcacagttagaggcgtctcttctccccaaagtaagcaagatgcatgagttagatggtgtatgtcatccttcttattagagtcgcaggaggtcacagaggaaggacccttactggacgccaacacactacatttcacaaatgagaaatgaagcccagagagggggggatgaccctgcacagcgcccaggtgcaaccttgagtgcatcgggctggggggcagctgagaccgcaggaggcacgctctagagcactgctggatgccagatggctccggcactggctcctgaggatgctgctcgggtcccaggggtgctcaccaggaggaggcgagagcaggccggccttggagtgctaatgaatccacagggcagtaaacactgcctccatctccaagcacgggcacacaggcttttttttccctctcagagcttctcagggcaggcttctctgggatgcccaccttctccacccctccttctcctcccggcaggttccactgctcctggtgctggcacacctggcagtctgcccatgtggtcatcctcttccacatgttcctggaccgcgcccagcgggcgggctcggtgcgcatgcgcgtcttcaagcagctgtgctatgagtgcggcacggcgcggctggacgagtccagcatgctggaggagaacatcgagggcctggtggacaacctcatcaccagcctgcgcgagcagtgctacgaggaggatggtggccagtaccgcatccacgtggccagccgcccggacagcgggccgcatcgtgcagagttctgtgaggcctgccaggagggcatcgttcactggaagcccagcgagaagctgctggaggaggaggtgaccacctacacctctgaagcctccaagccgagggcccaggcgggatccggctacaacttcttgtctcttcgctggtgcctcttctgggcctctctctgcctgctcgttgtttacctgcagttctccttcctcagtcctgccttcttttagtggagctggttaagggtgggagagggcacatgggcttgagagtggggaggacacagtctggacttgatcctgctacagattcaacatatgactggacaatccggtcacctctctgggcctcagttaatgcatctgcggaatgagaggattgcattagaagataggcaatgattctttcactggatgtgacaataattgggggaaggggaaaagggtgtaataaaggttttagagcttgccaggattggtgctagtactaggtcaacaggagggacctgcttcctttctctcctccacctccatctctacctctccttatgcttcatttccatatatcttcccccattatgaccccattaggttctgtgttaatcctgcctcgtccttaagctcaccttcagctgcctctgcccatcctgccttgcttccttttggagagggcagtggccccattcaatgcttagggacaaggtacctggtcctctcctggagagcctgctcctgtcgttctgaaacttagtttttttactctggtgctagggtctgcttggctggaattgtctagacctgcactgtccaatatgttggccactagccatatgtggatatttcaatttaaattaattagaatggaataacattaacaattcagttcctcagtcacaccagccacatatcaagtgcacagtacccttatgtggccagtggctaacatattgcaatgtacagatatagaacgtcattacagaaatttctgttggtgaactccagtccagaacttgaaattcccacttaaatgtatgtggacttataccaccaagaggtgggtgcaggtttaaaggtgcagcatgaagccttctggggcaggtaaaggtggtgtgaggtttgctaaaggtagataaacactgtaaatagattatctctgtgctcctgcctctcttgagtagcatctgcagtgttgtcttaccttatttcctgagaggatatggaaagtgggtctgggctgggtgcgttgactcacgcctgtaatcccagcactttgggaggctgaggcaggcagatcacgaggtcaggagatagagaccatcttggccaacatggtgaaaccctgcctctactaaaaatacaaaaattagctgggcatgatggccatcatggtgaaacaccatctctactaaaaatagagaaattagctgtgcgtggtggtgcacacctgtagtcccagctacctgggagactgaggcaggagaattgcttgaacctgggaggcggagattgtggtgagccaagattgtgccactgcactccagcctgggtgacagagcaagactctgtcttagcggcgggggtgggggaagaaagtgggtctggtcaactgggtctgggaaagaaagtagaccatagggatggggtgccaattgccagttgcttacagcccctttgtagggttcatagaccttaaatgccacagttgtgtcttttttttttttttttttttaagacatggtctcgttctgttgctcaggctggagttcagtagcggcatcacagttcactgcagctttgaactctcaggctcaagtgatcgctcacctcagcctcacaaggggtggatcatacacacatttttttttttttttttggtgcagtggcaagatctcgactcactgcaacctccacctcctgggttcaagtgattctcctgcctcagtctccagagtagctgggactacaggtgtgcgccaccatgcctggctaattttttgtgtttttagtagaaacagggtttcaccctgttggccaggctggtcttgaactcctgacctcaagcaattcacccgccttggcctcccaaagtgctgggattacagacgtgagccaccacccataacccatacacatgttttaaagtgcgtttatacattcctgtgctcagcagagatgtggtaggacacactagctacccatgatgcagggagatgctcctctttcattatgtatgaaaatacattatggcaaatttgatagccatcctagttcctggcgatggtgagagaaggggcagatgaggcagatctgcagatgtggatcttccaggtgagagcagggctgtgtgtctccactcaggggaggtcatgcccaaggggaggtgtgagcaagtggaggcagacagcacctgtcccccagcaccttcccctctggctagtccatgggaccaccccttcagggtaaatgcatttgctgttcccattccctcaggcatagctgtgaggcgggcagtttgactcatgagccgggttcagatgacactgtgttgatcactgtctggaattggaaacagaaactctcctattcacacccttaattgtcccgacattcacatctttctatagcccaccttcagagcccccacgtggggcctgagagctgaaggtgaggttcagggatggagtgtttggttagatgtgttctcagagaggggcagctttgagcactgtgccccacctgctgtctgtctccacaggctggctttactcagcactggcaaagaaatcctggtggcttgtcagatttctctgtggacctgcaagagcaaagaactaggcaatctggaagaacctctgcctttatttggttgggttcagcaaaagagtacaaaaagagcatcaggctggagtggttgtaaattagcaggaacatgaggttctggattcactttcatcagctgcagatggtgctcagcagggctggtgcagggtgtgtgaccctcggggccattgcctagctgtggatgcatggtgtttctgggaaaatggatgtcaaggagcccaggagtcaagtgatctccagagaacttggccaaccctgggaatcttaaggaacacgaagggacgggactgggatgaagtggcgtcagcagcatctgttactgaagttgtggttcctgggggtagggctaaacagccaagattgtgtcaagggagaggtcatgcctcagagggtcagcaaggctggggcatctgagttgaggactgtgagttgggggatgatgagccactgaaaacggaagtgaggacaagggggctagaacagatgaaaagaaacggggtctgggaaaatgaaagataaacatattctacttctccttctccaccagctcattttctcagtatgtaagtacagctgtgtcttttctatagttaactagaatgacactgctgtgattccacattccccttggactattgccatttcattaaaaagaaaattctttcaaaatcaagtttctcaaaggagtagattacatttatctccatctctttatttactcctgaacccatggaaatctcattttcatgtttctgaaacagtcactaaatactccattgccaaaccattggccacttgtctgtggtcaaagagactcctggttgaccccaggcattctaatgatagagacatctgcgcaatccccggaattctaatgatagaagcaacagggcgacctcatgaattctaaaaatagagactcatggcctaccacaggcattctaatgggagacactcctggctgacactgggcattctaatgatagggacacctgggtgacctcagacaatctaatgatagacacctgaatgaccacaggcattctaagatagagacaaaccattggccacttgtctgtagtcatcttacttgatgtgtccactgcattttatactccctccttgaagattctatgtcagtacttgctcctccatctgctctttcatttttctctccactgtaatattctttgtgggagcttttccctcacccatcctgggattctcctctcactctgctcatgtttcctcagtaacatactcactcataatttccatcatgttcaccccataggaattcctggtcttcatggcttctctaagcatttccatggagctccaggcccacagaccaattgacctgttcacggtgtgctcccatcaaaggcagcatgactaaagctgggcttgtccctttgccatccgaacccatttctcttacttctcagaaatctggatactgtcccctgatcctctttcatggccctaccccaccccacaatagttggtcaccatgtcccatgtcctgttgattgttcttcccaagtacctctggggttgctctcctttctttccttccctctactgctgcccaaacccagtcatttagtgtctcttgccttagtagcctcctcaataatctttatgcctataacctcttcccttacaatccactttccaatctgccaccatcctagggtgattttctaattatcagctatgattcacacagtcctgtgcttggactcttccagagctccctcctgccattggacaaaacttagtctcattagcctggcacacttcatttccagataataataaaaaataacattcgttgagaaggagccccataaacatttgctattgcaattatttactgtgcatgaggtgctgtactaagcacttttatgtgcattacctcactgaattctgaaaacaaccctttgaggcaggtactattttacctctattttacggctgaggcttagagaaggtaagaaactggctcatggtgacctagtgagtaagtctcggtgctaatattgaaatccagggttgccgtgaccccaaaacatgagttctcaaccactgtgccatcctgctactgcagttaagccagtgcccttcaaattctgctgttccctttccctggaacatcttaccccactggtttccaaacatttttccttcactcttgcttggtttgagcattagcttccctgtgagccttccttcacagccccaggcagtgttgggatttcaccacctgaggctacctctgctactgcccttggcatgctgtgttgtcattacttgtttgcaggtgtatcttcccatcactgtcaggttttttttttttttttttaatctttctatccccagaacctggcctagagtaactgtttaatcagaattgctcactgaccaaattcttgtcttgttagatgcaatgttccctattatatccttcctccccctaagaacaatgttgtatatatttcatgcactgcaatacctcatacccccaagctggacgggaaggaaatgttggctctgtgctagctatgatgtttaatttccctttaataaaaacccatgacatacacactataattattcacacttacagaggggaaactgaggttttgtgagatgtcgagttttgtaaggctagtgagctaattagtttaaacttgatacaggagcccagactgctgagaaataaaaaattaaataaatctatttttcttttttctgatacagggtcttgctctgtcacccaggctagagtgcaatggtgcaatctcggctcactgcaacctccacctcctgggctcaaatgaccctccctcctcagcatcccaagtagctgggactacaggcaccccccaccacacccagctattttttgtattttttgtagagacgaggtttcaccacgttgcccaggctggtctcgaactcctgagctcgagcaatctgcccaccttggcctcccaaagtgctgggattacaggcatgaaccaccgcaccccacctaaattaacctatttgagcaacatgaacatgtatggagatgtagctcagacagtaggcaaggaccacggcaccttgcctggagggcagagttacccactaatatctggatgacaactggacttaagcccaatatccaaagacaagaaaaggaagttagacttctagcaatctagatacagaggtttctgagaaatgcgcaaacattgtttgctacaatagttgacaagaagtccaggagaagcttggcatggtggcttatgcctgtaatcccagcacttggcgaagccaagttgggcagatcacttgatcacagcagttcgagaccagcctgggcaacatggtgaaaccctgtctctacaaaaaaatacaaaaattagctaggcatggtagtgtgtgcctgtattcccagctacttgagaggctgaggtgggaaggatcccttgaacccaaggggcggaggttgcaatgagctgagattgtaccactacactccagcctagacagcaaagccagaccctgtctcaaaaaaaaaaaaaagtttagaagagaactcttgtagttatttggtgtgaaattaacccagtgataatatacctttgttgctttaagatggaatagatatttgttccccacctcttatgaggcctgtgtgacctgtcaagagtggcttcttatttatttttgtttctgtctatatcatgtaactatatctatattgtaggtgttacagtgcttaataacccccttgtgaatctttgtgctaattttgcaccgttgagtaagaaaatatggttttcactgattactggttggcagtcgtttgcagagtacctgaagaggacagtaaaatacacaaaagaatgctgtgctggtagtctgcaaatcagagcaccagtacaacaagacagtggaatgaggatgacgaacccattaccaaccttggaaaaacaagacagggagtatgtcctaaagatacagctgtatttccttaattttcattcatagttcaacatatatctattctggactattttattcttggcttgtcctaagtttcaggaccacaaagataagcagacatagtccctgacttagagggactacagtggttggagtgggatccaatgtgtgctagtcagtgctgcgctaggaaaggggtgaacctgatcataacctggggatgtggtgttagaaatggtgtctcagggccgggcgcggtggctggtgcctgtaatcccagcactttgggaggctgaggtggaccacgaggtcaggagatcgagaccatcctggccaacatggtgaaaccccatctctacaaaaatacaaaaattaaccaggtgtggtggtgggcgcctgtaaacctagctacttgggaggctgaggcaggagaattccttgaactcaggatgtggaggttgcagttaactgagattgcgccactgcagtccagcctggcgacagaggaagagtcagtctcaaaaaaaaaaaaaaaaaaaggaaatgatttctcagaaaaggttacagtttgaaggaggaataggagtaggttgggaggtcattcctggtctgacagggagctaagtgcatcccaggccaagtggagaagaaggaagacttagaggcagagtttatttatgttcaaggagcaataaacaagtgagtaccagaggtgggcaggaggatggagggcgagagccatggagtcggggcttgtgagtctggaagcattggctagaaatagagcaaaacatcaaggtaggctggagttgggtgaagacaggtctcttggctcaaaaaaaggagtaaattcattctgtgggcattaatttttgatagacctcttatcatcatttttagaactttaaaagccaaaaataatgtgctgaacaactctatcattgtgccctctacaaacatttgaaggaccatatattttgtactaggcactatgcatgtattaatgcaagaattcaacagtccctccattctgatctttttccatccatctttgtttctcactcacatagctgagaatcgtttcagttctcatctttagttacagaaataaattatctctttaagtgctctgtggggagtggtaatctgggctccaaatcacaaaactgataactttagtcaaataacataaagctttgcttatttaatgctgaaaataaagtcaactaactaatttaataaccagtctaaccaatttgtttctggtcccaactgttcacagatgttgaattcaattgagaaaattatagtattgatgacttcccttttgcttttttgtttccttttgtttgtttctacaataaaaatgaattacctctttagagatatacatatatgcatatacattatatacagtagattcattaagcaaggttaaatgttcctaataagagaaaataaagtatataaaacctttgactatatatgaatatgtgtttgtactcacttatcagagtgtgtatataaaagatgggaaagagagtagcaggctctgacacctgggatggcctggccctcacagccaggctgcaggtctctcctgttgtacatgagcaattccacagaacaccaacctcatgtaaggccactctgtgatgacgacagatcaaggcaagcctgaggcccccctatatagtcacgtctgaattcagatagaaacgtgaacactgtccaaaccacgatatgactaaacaaccctgcatcttggccagtatgagtggctatttctttaccaatcacagctttagcctcatgctcttcttctcaccttctagggaagattcattaagatacccaatcatagagtgatcctcactttttgacagcaaccagttcagaacaaagccccgcttaggtgaaccttccccaaaccacctaacatatgctcaaatgccacagtatattttaatacgctgttactgaaatgcttcatgattcttgtgggcatcctcacttgtagcaaagagtcaaaaaaactcagctgtgttcagtgacgggtatgttcctggtggtctttggcttaaggacattgacaaagggatgttatatttctttttctagtgtctgtgaggcattcagatgtctcaatgaacctaaatgaaataaaattatgcagaaaaaatgtttctgactgtaatatatttaacagagaaatcaaaacaaaaaaattaaccaaactaaaataaaatgaaattagagtgtctggaaattttaaaagcatgttttaaaatttggattaaaatgaaacaaaatatatttgtggctgatctagaaattaaggagaaggaaaatcctacgtgtaaaaatactttgttttgctgtttcttaatcttttaaaaatttactttacagaattgttagactttaaaaaataattttcctatagaaagttgtaaaacaaatgtatatgttaacctatattcttatgtttatttcaaatatttacataagctatgaattcttttggtaaatgggaaggaatttaacatactttcttctctgccaacctggatttccaattttgtcaaaataatctactattttataattaaattcatagaatacagcttatacattctctttcacaaattatattagacaaatgcattatattccataatattgataagaaatttagtaatgaacctttaaactttacaggtttgtcctcatcatttttataccagtccactttacttttgagttctttattttgcttattttcttcattttacttaaagtactttggtgagtaacattttcagagagggtacataggtggtatgcttctctaggaatggctttctgtagctcttacctgtaaaaaacggcacggccagccattacattcttttatcacacttttaacttcttttcctctcaaaacttagaaggcactatttcaacgtctctggaatttattgtggcggagtaaaattctggtatcaacctaatgttctttttttttccacattgcctgatgtaatgatacacacacacacacacacacacacacaaacatgtgcaatagcttcacatagcttgtgaagaatataaactggagagtttgtaaggtttttttcttgttttattgtttcttacagtaactttgtccataggagaaagagacatttcctctgattctttagattgtttttatggatttgaactataatttttcatatgcttaatgaagtttctctgctgatttttatggggatgtggaactgggggagttcttttagagattgtgtggtatgtcttcaaattatttggtctcagacaaagggagaaggaaaatgccaattttgcccaaattttgagagggctggccaagggggtggtcgagagggggcttcacccagatgcagcctctctccatgactataggaacatggcaaagcattttcttttcatgttctgctgcagaacaagttgtggggatactgcttctctcactgactggcatgaagactctcattaggaactgactttggaagcttcgtctttatattacatgagaatttaatctggaagtcagcgcagtgaccagatgctctgagtgtggggacctggtgcagttctagaggcagagagagatttgcccccatcggctgtccttccacctgtcttcatctccagatcctgtctgatgataaaggggaaacaatctattttctcctctgagtacaacaacttctggtcactaaaatgtgtggggatttctccccaccaatagtcaatcaagtctccagcagatctgcagctgattctctagtgggcaccagctgggtgtcctcttgctcagttcaattctgacactttctgctgggaggagatagcttcagaccccacaggttgtgggctcaaccccacaagactgtcccccacttcagatgtcagttacaagcacgggttgtggccttcaactttggtgactggctataaaagggagtttctatgactccctcctagcgtttgattaatttgctagagtggctcactgaactcagggaaacacttatatttaccaggttcttacaaaggatattacaaggatacagatgaagagatgcataggttgaggcatggaggagggtggcagagctcccataccctctttagacacaccactctccaggaacctccacatgttcagctatccagaagctctctaaatcctgtttctttgatttttttttccaagagagcatcttgctcagtcacccaggctggagtgtagtggcacaatcttggctcactgcaacctccacctcctgggttcaagcaattcttctgcctcagccttccgagtagttgggatacaggcatgcaccaccatgcctggctaatttttgtattcttagtagagatgggttttcaccatgttgggtaagctggtctcgacctcctgaccttgtgatccacccacctcagcctcccaaagtgctgggattacagatgtgagccaccgtgcccaaccttctttgagttttaacagaagctttactgtgtaggcctgattgattggattattggccattggtgattaactcaaccttcagcccctctcctctcccagaagttgggtggatagagctaaaaattccaactctctaacctcaccttgggctttctggtgactaacctccatcctgaagttacctaggggttgccagccatcagtcatctcatttgcatgcaaaagacactcttattactccagaggttccaaggatttttggagatatatatcagaaaatggagacaaagccaaacatgtatttcacaatatcaaaccctgccgctcccagcttggaaacattagttagtgcttttgttctagggttggaagaaatggtctttttcttttattcctataaggagcttttcctttgcatatggagatgcacagattggtccaaaatcaatcctatcatgactgccactatatagtacatacatatccaaacatttgagaaatttgctattgagcatctgtggcttccagtaaatacagatctgtccctactttgcatttttatcatcgcaccaacagagaatttggaacgtttgggaggtttggatagtaggtgcttgggcggagttccctatctcgaacctgaagttactccttctaatttgccttttaaaaatctactcctttaaaccaatttaaattttaactaaacaagtatcaggggaaccagcccccaatatttcaatgtaggtactttctattttccctaagtgtcagccagtctgagaaataaagagaaagagtacaaagagagaaattttacagctgggcctctgggggtgtcattacatattggtaggaccatgatggtgactctgagccacaaaaccagcaagtttttattaggagttttaaaaggggagggggtgtacgaacagggagtaggtcacgaggatcacatgcttcaaagggcaatacagatcacaaggcaaaggcaaaattagaattactgatgaaggtctacgtcctgctgtgcacgcattgtcttgataaacatcttaataggaaagagggttcaagagcagggaaccggggactagaatttaccaggctggaatttcccaatcctagtaagcctgagggtactgcaggagcccagggcatatttcagtccttatctcaatcgcataagacagacacttccagagcggccatctatagacctacccccaggaatgcattctttcctcagggttattccttgctggggaaagaattcaacgatatttcttctactcacacatctgtctacaagctttctgcaagaagagaaatatggctgtattctgcctgaccccgcaggcagtcagaccttatggttatcttcccttgttccctgaaaattgctgttattctgttctttttcagggtgcactgatttcatattgttcaaatacatatgttttacaatcagatttcatattgttcaaacacgcatgttctacgaccaatttgtataatagttgtcctgaggtgattgtcctgaggtgacgtacattctcagcttatgaagacaacaggattaagagattaaagacaagcataagaaattagtttcacaatttatgttcagagattgcagtaaagagaggcgtaagaaattataaaagtattaattttgggaactgataaatgtccataaaatcttcacaatttatgttcttctgccttggctccagccagtccttctgttcagggtccctgacttcccgcaacaaacaagatgattagaaataaataactgatacagatttagatgcatattaggtgatatttaaataattgtttttttttctaaattagcattttgtactcatacatttctggtttttaaaagaggtacttttctagctgtggaagaccactagttgtctcataatatctgtagtcccttttccccacagtaataagattttagctgagcacatggccttgtagaataaagaccacttttcccagactcctttgcagctgggtatggctatgtgactaaattctggccaatggaatataaattacacagaagttatatatgaaaaattttagaaaaactttttaaacaaacaatgtttaggtcgtctattgctgtttaaccaaccatcccaaaatttagtaacataaaatgacagtattcattttcttatctcttgtggtttctgtgagtcagaaatatgagaagatgttctgattgtgggtattttgtggaattacagtcagacagtggttgcagttgcagccagcgtttagggctggctgggtaactctcttccttcatgtggtcttgagacttctccaggtcttctctccatatgggctcttggacttcctcacagcatggccaccttggggcaattaaactgctctagtggctgaaggcaataagaatgaatatttcagtgaggaaagcagaagtaaaattttattttatgacttagcttggaactcacatagtgtcaatcctaatatagcctattaatcagaacagtcataaaatctgcctagttttaaagactgggggcaaagaccctacctttcaatagaagatatgtcaaaatcattttgtaagaacatcactataatcatcactggaaaataccacctcccatagatgatgaccatgtgtttcactttcatctttattctttatttttcctatcctactgcctcaacacagatgttaccatctttgatcatgttcaagaccacacagaagagaggaacaaaatagaagttaccttggtagctaccatcatgccttattagccctgaaccatccgcctgaaattttatgtgagagagaaataaacttctctgcttttaaagccatggttatttatttgtcatttgaagctgaaactaatcacaactaatatatcaggctcgtctcctgggtcatcaactggtacgctggcactgtggtccaacatagaagcagtcacagggcattggtcacatagcactatgtgttgttttgaaacacactgagcatttttactgttccctctccttagacacatggatctccaagctttcaattcttgggctcccaatcttcaccaaaagttggcttattccctttatttaagtcccacaataaatgccattctttaggaagtagtctttgacaccctgagacaacattaattaagcatgttggaacatcatctggcatgttgccacaacctgtttctggagtctgtacttaatgaactcatcctgttctgtatgatagctgttatcatgtctctaaaactcctgctttattataaatttcttgagggtaaggagcattttacacttatctttacaatcatcctgcttcgctgttttctagtgcatttatctcagagtcttggtgttcaatatgtttaaacatttttgttctatgaatctctattaaacttcctctatgaagagtttttttattcataattttgtattctttttttcctaaagagctccctactccataccaaattgtataagttccaggtctccaaatatcagtatccacttcttccaggaggatacgaagttggaaatgctccctaaggagcaagtagactttgatagaaggagatgggcatgaacgtattgcatacagatggaacaagacaagcagtttgagactaaaatatgtggaacattttagaaaatggtgagcacatatgttttctgaagggtgaagcatcagtgggaaataaaactgaaggaggagaagttggaactacattcttaagggcttcaaaaacctgcataaggagtgtgggtatttttttggaaacagtgatttgtatttgaagttttgaagggagacaatgatatgatcagatatgtatccggaattggactcagaccgtacggtatagaataaattggaagagacgaggttagcagttagtggcagctaatgagagcagagggaagggatggactgatgatgagaaagctagttaggaagattttaaaatagtttacaggagacctaatatggtcctgaattagagtggtagtccgttatgatgacaatggagagagactaagaagaaacacacatctaaagaagaatttacaagaagtgagtagtaagatgtggcttcaaaaaggaaggacagacaatggtaagaacagaggttagagtcaacacgccttcaatgtctcacaagtattttgcattggtattttccagacaattttttagggaagccatgacaggaaggcaagttctttttttttttttttttttttttgagacggagtctcactctgtcacccaggctggagtgcagtggcgcgatctctgctcactgcaagctccgcctcctgggtttatgccattctcctgcttcagcctcccaagcagctgggactacaggcgcccaccaccacgcctggctaattttttgtatttttagtagagacggggtttcaccgtgttagccagaatggtctcgatctcctgacctcgtgatccacctgcctcggcctcccaaagtgccaggagacaagttatttttgatgtttgtttttgtttttgtttctggcagggtcttactctgtcacccacgctggagtgcagtggtgcaatcatgggtcactgcagcctctatctccctggctcaagtgatccttccacctcagcctcccaagtagctaggacttacaggtgcatgccaacatgcccaactaaattttaaaacttattttttgtgtgtatggagacggagactcactgtgtttgccaggctggtctcaaactcttgagctcagatgatcctctcactttggccacacaaagtgttgggattataggcgtgagtcacagctcctggtcagaaggcacagtttttgttgttgaggaaagtctttttacaacaaagccttttgcaaggaaccagactcgcaaacatgctattgacagacaataagataattgctgtaataagcaagcaaacaacaacaaaccacaaggagcttgtctcgtttcagaattatttagttgtgggaacctatgttgtaggttctgggacgatggtgtatgttttttgcatcaatctcctctgaagttgtaaaaagtgtgcagaaaggtccagccttttttttttttttttttttttgagatggagttttgctcttgtcacccaggctgaagtgcagtggcacgatctcggctcactgcgagctccacctccggggttcaagcaattctcctgcctcagcctcctgagtagctcggattataggcatgggccaccacgcccagctaattttttgtatgtttagtagagatggggtttcgccatgtggggcaggcttgtcttgagctcctgacttcaggtgatccgcccacctcggcctcccaaagtgctgggattacaggcgtaagccacagcacctggcccggcctcttaaagaagaaaatgaggattagggtctgaaggaacagctctagacagacatggaatctaaggactagaggagattgggaagttttctcctgtgctcattgctcattgtgggaatcttttctgactagagtttatcttgcctctccctggttctaagaacacagtttttctgctgaactagttctcttgttaagaacccaaggctgacatctgtttccctgtgactcctgctttcaaatgcggctatgccaatagtttattattattattttcctctaaggcatggcattggttcaccaatttatcagaaagtttttatggcaaggaactgcagagctgaggtaaacaggagagagcagtgatttcccttaagcaagcaaagcagttggtgatataaacaggtcaaaagctgagttgaggcaaaatatacctgagaaaggtaggcttgatcttaccttacctttaatgcagtgggaagggagaaaaacccctgaaactctccatatttatgttgttagcattcagagaaagcatccacctgccacatatttactgtgcagctttgggcaaatcatttcactcttctgggcttttatcttcacacctaacccaccatccctactgacatgctacacctgctttccagccttaaaaactgatgtgcataacatctgaggaaactttgggagaaaaaattccaacgtgtccacagttggggtttagctgaccgaagcatgtcttccagaagggagggtggtgaagtggggtcttgcaataggagcaacatcacaagagcagactctagagtttcttagtctaatctaatatttaagaagaaggtgtttggtagaatgggcccgactctatgtaaaagcttggggtttggaaaggagcagtggtcccgggtatggtgtggaacagactcaaatccagctctgtctgatccccttggagcttggggaaatgataggtgtggctatatgtgtttcctgtggctgctgtaataaattgccacaaacgagtagcttaaaacaaggcaaatgtattctcttgcagttctgggggacagaaatctgaaatcgaggtgtcagcaaggccacactctttccaatcttaccctatagggtagaattattccttgtgtcttcttgctcctggtggctccaggcattccttggcttgtggttgtgtcccttcactctgtgtctgacttcacgtggccttcgtctctgtgtctgtgtcttctcttctgtctcttgtaagtatccttatctttggatttaggatctacctggataatccaggatgctcttatctgaagatcctcaacttacttatatctgcacagatccttttgttttcttcctaaataaagttgcattcacaggttcctggagttaaaatgtggacatgtcttttgtgggccaccattcagcccactgctcttggtaaacaccactgtcttaacaaccagggacctaagcagctctgcggtgagaccctctaaaaagatggaaggcagaggagagaaataagagaagaggggagttccagcatcccagggcagcaaggactgttgtcatgtgactctttaggaatgagtagccatggagagaatggcagcctagaaggtccaagtgccagccgagtgcatgcaggtgggtcatggctcaaggcagtgcattccaaactcatgttggtgactcaggagtggatcacacacttaatgaccaagttacaacctgcattaaacagaaaaataaacaaaatagaaaataattggaatagcatagtttattgtaagaaataaaggtaaatattgttttgagaaatgtatgtgtgggcatgcatgagtgcactgggtcatgatgtaaaatgtctttcccacataagttcccatcaaaaagtttgaaagccaccggtgtatgagactccaccctggcactttacagcagcatgaagagggctgtggatcagggaatcgtcctcagttctgggcataacattgggattgacctgggaccaagggagctctggccaggcacagaagcaatatcctggacagccacaagagggagcgctcaactcatgcaaaacctcctttggagctctccccgcctcatggccagaaggtgaccttgcaaagaaagtgagatatgggtgaaaaaaaaaaaagggattaggccagtaaacagtgagatcagttaaaaatgtgacatcgattgtaagtacaggtttgtgaggctgggaagctttcggattacatgcaaaaggagggtttgtattaaatctgcagttttcgaacattgtttcccctcgaaaccctttgtttctgtgagattttatgcagaatcctaatcaatgaaataatatccctgtgacaggtgtcctccccatgttgacagtctccaaggactgtgtgcagagaactctagacctaattagaggagctataatgaatacactggattagaaggtatctgtagtccctgttagtgctgattctttgattttatgactcagaacaaaaatctataaaagctaccaaatcttgacttctttttgaagccaagtctctgaatgcccagcccagacactggcacaaagtgtttaataattgaatgtttgaaggaagagtttattttgcatgcttctctgcaactgcagcaccaataacatagtgcatagtgagcaccctttttaatagtgaacactcttagaaagttggtggagtaaataaaagaatgaatgaaatcctgccctaaaattttagatggcgccttctatcagtcaagccagcagagggcaggagaactcagcttaacaacagcattctctctggtgggcggaagcatcccagaagcatgcgataaaggacaggtctggttgttttgtaagattaggaaatgcacagccagaaggataaagacacaaagcatgaaggtccaacctggggatctccaaatctctgcacacgaacccccagagctttctctgtagattaatacccttatcagggaatgggatttggctgactgccggatacatagagaacaggacaagaattgccaatcttgcaagagtatttcaaccacttggtcagagagattcaaggaacctcacagtgtacttgtgtcaaggagagaagatagaattaaaaatcagaggttcggctgggcgctgtggctcacagcaatttgggagaccgaggcgtgtggatcacaaggtcaagagattgagaccatcctggtgaatgtggtgaaatcccgtctctactaaaaatacaaaaattagctgggcgtgatggcgctcccctgtagtcccagctacttgggaggctgaggcaggagaatcgcttgaaccctggaggcagaggttgcagtgagccaagattacaccactgcactccagcctgggtgacagagcaagactccatctcaaaaacaaaaacaaaaacaaaacaaaaacaaaaacaaacaaacaaaaaacagaggttctgactctgaaactagttatgtggcctcgagagggcccttttccttctcttggctttggtttttccatatgtaaactgaggggtgggactagatcattttttagtttctggtcagtaggtggatccatttctggcttcagtcctgcccctgccctcaactctaggggtaataacaggaaagtcaatgaagcaggtgctttaacctcaacaaggcaaagccaacctcatcgcccttgctgttctcaagaaggaaaaggggagtagtggttgagtaagaagagacaaataggagccagaaaaaaaaaaaaaagaaaaatgagacagaggattgacagggacaagaggaaagcaaaaaaaaaggaagaaaatagagacaaatataagagaaagatgacagggagagggaagaaggaacagagctgagtgagataagagaggaatgacagtggacagtggtttatgacctaatagttttctaggacggtaaaaatccagtttcagactagaattaagcttttaaaagatacagatatctgagcccagcccagacctgtgaatcagaatcacttcagttgggatccaagcatctgtggtttataaatgtttctcaggcaatcctggggtgaagccaaggttaggaaccacctgtctagagtaatactcataaatttgagtgtgagaaaattggaactgttgcagagatactttcattccatgggtgatttttgtgtttatgtggcttctatcatactttttcaaaatagaggtttctggatcatcttaaaaggaaactttgccatgtattttccactgttccaggggaaggggccattgatttctggcctcatttcccagaccctgcactgaccaagatagcaccacccctgttgactgccctgggaaggctcattggaaaacctcagttttaatgcctggttttaggaaggaaaataggtcaagtaaagtgggagatattctctgggtggcatagtggggtggaacactgttcgattttatttaattgggaagccctgagcagaaatcagagcaacaagtgagaagcttctggagagtccaaaggacccacaaagagaaagggaagctgagagaattaggaacaaaacttccttacataccttacctttcctctgagaaaggaaacgctggagcgaaaatgagggctcagacatcagcccagctgcacactagctttgtaacttaggcctccatttccttgcttgattggggtcattatgttattaacacacttaagcagttgtgaaatagtacacagaagtgagttagcactgttgttcacttctatggcaccaggaacatgtgcctatttcagtggtaaatagatctttcctcccttggccttccaatcaatatgaaaactcttacactttcagtgactatgttagcatactcacatgacaaattcagttagttcttaatatatagaaacatttacactgagcttttattctttctgaagctcagagatgactaagggatcagtagatatgtgttcctgaaagtatcagctacctagggttgggggttatgggtgtttgtgtgtgtcaagtaatacagacctcagttagctgcctttcattaggcttgtcctactcacagaatccacagagacccacaaataaagacagataaatttgtcttcaactcaaccatcatttttcaacaaatactctgtgcttaacattttcataatcactgaggaggaagtaaagatagctgagacaagggttcttccctcagtgagcatcgagacttttatttttattttttattttttgagatggagtttttgctctgttgcctgggctggagtgcagtggcatgatctcaactcactgcagcctctgggttcaagtgatactcctgcctcagcctcccaagtagctgggattataggcaccttccaccatgccttgctaatttttgtgtattttaaaaatttttagtagagacgagtttcaccatgttggccaggctagtctcgaactcctgacctcaagtgatccacccgcctcagcctcccaagagccttgacacttttagatgagacatacagagtcccaaggaacagaaatatgtcagggtctctactaggggcacaaaagccacacttttggacacaggagtgggccccgttgattctaagtgagaagccctcagaaacatcttagaataggctacattatcttattagttagagacaggttaaagatattccaggagaggaaacggcatgtgcaaatggaggtgggagggtacagggaagagtgagtggttagagggattaggagggctggcagacaaggaaccatgaagagggagactcataggaaagtcacaaaggaaacacaactgtcagactgctgtgtgcgcatttgaacacgttcgcactggggactcatttacagcttttgagctagaaagtgacaggataggagactgctgcaagaaatgaacctgagatgtcaccacccatccctttccaaggaacaggtaaccttacaggtctcttgccctttattacctaaagcaatcacttcagcctaggctttgtggaagttggtgaaagtcaatttggcagggaagtctggctcttctacaatcagcagttccaggggcttgagctgggaattttccagctgaatggaagcccttggagggttgcaagttttaattcttgtgctccatgacggtggggttgcttagaagaaaaggtccctatgtgattttcatccaagcacccttgaagaatctatatgctcatagcctcccgccatccccaacggctcatctcgtgcaatctgccctctgctgcatggtttcttgctccaaattgatctccttctcccagcttacttaaatcaaaccttccactagccagctataaatctagaagacaattcaacaaatgaatccatattaaaatgttaatagttactaagttttaatgtgttatatctccaaggtaagtatatgtaaggaagaagagactattttctaatggagggatttccccacccatctgctgcatttctgtgagatcttcctagacctttaaatcacaccctatacattcccagtgagaaaggcctgcatgcttcttgggtcagagcctcagcagggtctccagctcccaaagtgattgactggttcattggaatcaccttcggcttaggactggttgcctccatctgagcagcaataataaaacctgtgacattttacggactgctaagcattttcacttacattgtcttacttggttctcaaatcttgtttcagaaaaacagaggagaatcaggtccattttaagcagatacaaactgagtacttaagcccggggcctcagactcccagtccatggctgtttttgctgttccatgttgttctccccactgacatttttcctcactttcttctgtctggaaaatcaatggttttctatttgcaaaatgtccaggagaagtttttagcataaacccacttcctgacctctctagaatttgtcaaacttgaaggcatttgagagagcatctggatgactctctaggcattgttgatggttcttctcatttccttaactcgatatccaaataaaccatcattgtatcctgcttactatacttcaaaatgaactttaagtctaaccagtcctcaccttcttcatggctaccaccttagccccaaacatcatcttatgtcaccagaactaggtctagagcacaagatccccagtaaaaaaacacaaaacacctccctgctcccagcctttggaacttgggaattgagatgggccctgagggttgggagcaaagggcttgtattgggaagtttcaaagtccctttatgcaaatccacacagttggccatgagacatttcaaagaaaatctgtgttccttttgccctggctcctcttctctcttaaacacttcttagactcttagcttatctcctttcttgaactcttgccctcctacaattaattccccactaagcagagggctttttttaaaagaattttttaaaagaaccaaatcaggtcagttttcttgctcaaaaatggtttccctgccacagccttcaaggcttcctgtgatctgctcctggtctgccttgctgacctcatctcctaaccctctctactttaaccactctgttcaagtccttgccttgttgctgctctttgcatctaccaagcatacttctgcctcaggtctttgcattgatcgtccttccacctgagttggagatatctttattcagatatttgcatggctagctcccttgcctcagagagctctgttcaaagagctcctcctcagaagtatcttccgcctaccattatgctctatactttgctttaaccctaatacatgttgattaacatgtttattctttgtctttctcatgaggactctgtctatccagttcactgctatatcattggcatctgtctagcaaattttctctggaattagctgtagaaagaggttgagtgaatcaattttaaggatggagaaattgaggtccagagtgagaaaggcaggtcagcagcagaagcaagagtcaagaatacatcttctagtaggcctgggaaatgtcctctgcactcagcctcctttctgatattacgtaaaaaccaggttcttttccaatataaaattctcatcttgagagaataataacatcttaacataatagtatattctactttgcctttttatttcctcaaatttatactcattaattatcagagctggagggaaccacaaagatgacctgccaagttttattttgcaaataaagaaccaaggcccagagaagatgtcccacagttggttgtggcagaatcaggctagagcccaggtctcttgactcccagtacagacactttctccttccttgcattgcttaacattgaatgtctatgtctattcacagattatgttgctttttattaaaataagtttctactccttatattggcaggtagtcactccaaaatgtacgttccacaagggaggtgggaaatcatatcctgtccagaaaaagctgcacatgaaagaggtgaggcctggatgccttctagaggtgcatgtatcccggctgcagactgctcggccaggaatctctggcatctctgagtcagggaatcatgaagctttctcaagtgaagtaacattctccctgtgaccatgccacttcctgcctgtgtgccctcttgtaaggcactgaaggtctcaggacctcagtttcctcctctgtgaggtgggaatagcatgccctgaagtgttggatgagaaagtgttttgtgagcaacagaggactgggtaaggattcctagtgagtttggttggtctgggcaatagcgtccccaatacaaccacaaaacactttacccttccagctttgagacttgggagagatgccctgggggttgattacagaaggctcaggttgggaaagtttgaagtgcttcatgctaaaccaacctttaagctataactggccatggagggcttaagggagaatttatgtccctttttgtcctggcttctctgataagtggttctcagactcataactctccaggagttataaaacaacaaaagcaaaacccttaagtcatctcatttacagcttcagctcttcagcagggtatgagggaagcaactgtttactattcataagtagatacttaaacagatagacatcatgaggttttttgtttgtttgtttttggtgagaagcagttgaggagggaagaagaaagaaaagaggagagaaaagagagggagagatgtcttgaggcagagactgggataggcactggctaagcagggtgagaaggcagggaaagagccgggctgacccaaaccaaagtcagaaaatgattgagaagagcaagaaaaacaaaggaatgaggatacagagtcaagagaggagacaaaagaaggattgagtgaggaaaattctgaaacataaatttgcagaaaggttaaggaaaaggaggaataagaaggaggagaaagtgtagagggagagcacaaggatgtggaaggaggggagcaagcgtctggggaaggagacagaagagatcctagagcacaggggaagatggggagctgctatttgttcttcggctggctcctgctttggaaaaatcctcgtttcctactcagtgggtatgccaaagaccacatcctgggtacaggagatatgagatcatttggaggtacctagagacagtcacagtgatagaactaaactctgagtccttagaggccagagagagttgcaagatttagagaatataacatgtatttcctaggactgggttccacagctccagattcattgatctcttagactactccaacacatgtgaatgactttttaatgccccactttgtgcttagtcttggctggccttgtcaagacctggaaactttaacacttcttgctgtgcatttccgctttgccttggattacaagcacaaaaagaaatagtgacaattattcaagccattcaggatacttcccaaacccttctgcctctcaacactgtggttcgggtctaagtactgagaatattttaatacctaatatgagcttcgcatggtttccagagatgcagcatatctttttagctaatattggcttttttgaagctcataagataacagctcttaaagatcctgtagggatcatctcgtccatgctaggaaattagctggtccttcctcagtaaggaactatttagataaaagcagtcagaactctggcctgaacagtaaacatttaaccagagttcaatcagaattcaaggacaggttttcttaaactttctttgtttctaggagatcaggcagagctgaatttaaccaagaatcttttgatcctttccacatatagatatacaatagtggtcacatatgttctgggagttcctagaccttatatgtctaaactggggcttcctgacataaaactatgcttaccggccaggaatctgttagaaaactcagagctcagtagaaggaacactggctttggaatgtggaggtctggttttgctcaaagtgtgcagtatgtgaaggagaacaatttactgaccattactctgccttactgattcaaattctgaggtttattgaataatttcttagattgccttccagctctaaatttctcagcaccaaaatgaagtccatttcaatctctctctctctctttccctcccgtacatatacacacactcatacatatatatggtcacaatagaaaggcaggtagatcagaagtctcagttgctgagaaagagggagggagggtgagccagaggtaccttctcccccattgtagagaaaagtgaagttcttttagagccccgttacatcttcaaggctttttatgagataatggaggaaataaagagggctcagtccttctactgtccatatttcattctcaaatctgttattagaggaatgattctgatctccacctaccatacacatgccctgttgcttgttgggccttcctaaaatgttagagtatgatgacagatggagttgtctgggtacatttgtgtgcatttaagggtgatagtgtatttgctctttaagagctgagtgtttgagcctctgtttgtgtgtaattgagtgtgcatgtgtgggagtgaaattgtggaatgtgtatgctcatagcactgagtgaaaataaaagattgtataaatcgtggggcatgtggaattgtgtgtgcctgtgcgtgtgcagtatttttttttttttaagtaagccactttagatcttgtcacctcccctgtcttctgtgattgattttgcgaggctaatggtgcgtaaaagggctggtgagatctgggggcgcctcctagcctgacgtcagagagagagtttaaaacagagggagacggttgagagcacacaagccgctttaggagcgaggttcggagccatcgctgctgcctgctgatccgcgcctagagtttgaccagccactctccagctcggctttcgcggcgccgagatgctgtcctgccgcctccagtgcgcgctggctgcgctgtccatcgtcctggccctgggctgtgtcaccggcgctccctcggaccccagactccgtcagtttctgcagaagtccctggctgctgccgcggggaagcaggtaaggagactccctcgacgtctcccggattctccagccctccctaagccttgctcctgccccattggtttggacgtaagggatgctcagtccttctaaagagttttggtgcttttctgggtccctcagctcccgaagctcttgagaaaactatcaaaggctagaatccccttctaactctttttttcccccatgataagcgcagtcggtcacagttcaggtgagttcttacttggcattcaagaaaattacaaaatctgggtagttgtctgggcacgaagcgacaatggcgtctatccctggtgctgaccctgggaagcgctgacccaggtgctgaaacgcagacctctgaagctgctacctcttagcgtacctcacttccaaacgtcgggactagggcaaaggggcaatctaaagaccgaacgccgtatgtttgagattgtgagaagtctcgttcccctacagtttacttggtaaaaatggtaaaacaattctactttgtagctcgtgatgtgaaaattgaattaaactgttggcacacactttatcttaccagaacggtctttatgtgtgtgtgtgtgtgtgtgtgtgtgtttgtgcgtgtgtgtgtgtgtgtgtgtgtgttaagtctacagggacagaaaggttgcagaaacatttgagctcttaaagcctttttgtgtaacttggtaattatagcaactatccttatttttatatccttgattgattttaaatgtgacaaaaaatgcgcagctgtaaaaactggattttgtgtgtgaccaaatctgttctttaatttaggcttttcaaattttttccattgtcctccccacttctctttctctctttttctatcccttctgccctatacaggaactggccaagtacttcttggcagagctgctgtctgaacccaaccagacggagaatgatgccctggaacctgaagatctgtcccaggctgctgagcaggatgaaatgaggcttgagctgcagagatctgctaactcaaacccggctatggcaccccgagaacgcaaagctggctgcaagaatttcttctggaagactttcacatcctgttagctttcttaactagtattgtccatatcagacctctgatccctcgcccccacaccccatctctcttccctaatcctccaagtcttcagcgagacccttgcattagaaactgaaaactgtaaatacaaaataaaattatggtgaaattatgaaaaatgtgaatttggtttctattgagtaaatctttttgttcaataatacataataagcttgagtggcggtttcagtaaagttatttgagataggtactccaatgttcacaaacatctatttaaaattctcggtggcaataaagtttacattttaaatgataactattataacatgagtcattttaaacagaaataatttcacataactctatgcattcaaactttaattcaatgataattactgggagaggctgacataaacattaattacatattaagtacacctaaattatatgttggactattgaaatgagtgtgtgtgaatagttaggctgaaaaatccaactatctaccaggttgatatgtaaaatacataacatatgaaaagatggaaggaacaaagtcatttggtggttgagaaaaaatctgacttaaatagctaaaatgaggttctgaatttgtttctagtttgtaaacatttatctagagaaataccattgcttttgtgtcttctttgacaatcctctctaattgaacagtgctaaatgactgttttaaaagcaagcttttaagatattttttctcagggagaaatatcacttttattataagattccttctggaagtactataggttgcaagaaatgcatattggcttacctcactgagtgctatctatattgcaggtattggagctcaaaatcataattatgaaatagctgaaggagatatctcaagtcttctcttaattctatcaatatgggagtcaaataaaaacacaaaaattattcttaaacactcagtaaaggtgatagtcttataacaacatgctaaatgggatcactcaagacagaatgtaaacattgctaatttaacttcctgagacctaaagagatatcctttgggggatgtgtgttttagctatcaactgcatttctgcatagctactggaataaaaaccaaacataaatatgtatgctcaatataaatccttgtagtataaactaactgatagtatcatataaacatttaagaggagcttaatattttatagaaaatatttgtgttagataatacacatttgaatgtggttggcttagaggaagttaatttctaacagctgatcaaacaaaagaaaaaaagccaagccactttactaatctctgtgaaaacagaacatcctttgatgttctggtataccttttatttgcaagacatttaggtgtggggattaatgcatgtccacttatgggatctgtctgtgccaaaggccttatgtacactggctaccaaaaaattcagtggagtaacagcatcatattataattacagcacagatgagaacacaacttaatgattttctgggctgtgtatgagtgtcaggggatttcgagtttttagtaccatctttgttgtcagttctcaatggtagtatgaaaataattggcttgggaagctaaggtgggtgcatcacgaggtcaagagatcgagaccatcctggctaacagggtgaaaccccgtctctactaaaaaaaatacaaaaaaattagcctggcgtggtggcgggtgcctgtagtcccagctactggggaggctgaggcaggagaatggtatgaacccgggaggcggagcttgcagtgagcagagattgcacccctgcactctagcctgggtgacagagtgagactccttctcaaaaaaaaaaaaaaaaaaaaaaagaaaaagaaaaaaaaagaaaataattggcaagaattatgtagtcatatgctcacatatatacatatttttaatttaaagcttaaattgagtaaaacatctgaacataatcaactttcagcctcagtttgcccatttctgtaagcagagggttgtattagaaaaggcactcacatctctttcagctgtgactgaggactgccactttgtgctttgacattgaaaagggtgctcaaggattgctgatcttgggctgttttaattaatatgtagagtatagctttgttttgctttgttttattttacatatacagagggtcttactttttacttcctatttagtttatttgagttccttttaagtctgattcactgaaagagtctagcattctagcctgtttattatccatccagagtgaatcatctatatattttccttcttccatgccacaaccatgtgcttcagccatcctgagcagcctggtatttcttttaatggaaaaaaatgggttaggtattctttactcctggaccttactttccccacctgaaaataggcatacagcagaactaatcccttgcatttatgaggattcactgagaccatgtatttaaagttcttagtacatgctgaacagtaaataaatgttagatgttacaactgatgtcaacttttttctcatacatgggttgttttccagcctctctttctttgcctttgctacttcctgctgtttccacaggacaaacctaatctagccttgaaggtccatattacatacttcttgcccataaaattcttgctttataccctcaggtggaatatctgccttctctgatatgtgtcttaatttgtgtctctttcatgttgcttacttatcactttgaaccattcatgatcattgtatgaatgcatgcaggagagtgagtgagtgtttgtgtgtgaacttactttgaatagatatctgtctgattcatatgtatggtccactcagtatctcatatagtgtcttatgtataatagtgtctcagtgctcattgaaaaagtgaatgaatgatctatgaacttacagtgtctagtgaaataaacctctatttactaggaggcaacattcttattgctttagttggcataggaaaacgacattagtggccattctatgtgatgctagtgtcatgacagaaatagcacatggttatgattttaataaccactgaagcatgtggttagcagactcagtcattttggaagcttcaacccgttcaattttccttaaccatggtacaaagccctcggtagggctgcttaactgtccaccaactatggggctcactgttatagaaaattagattcactaacccttttctcacatttgtttatttcaagatcatgtagatccatttttggccctaatacctggcaaattttcttggctttggctgaaactattctcaacataccgacaattcagttttatagtgacacaacgtatacctttaattctaagtatccaatatgaaaggaggctcagaaatgatattgtcctcaccacttatattactgcaagatgacttggagagactaaggtatctgtctaagataacagtaagttgacacagagtttgaacaaagctagactctctctctcctgtctcagggttattttgattattccactacactgcccctcaaggaatctacgattctggataactactatgttttattagtctgatgtgaatactaattttgttcctggatattacttaccctccactaaacaatctgttttcttctgaaaggggacaagacaattggtacaaaataacttgtacattaggaagaagtggtaaaggcattgaataggaagaaaagaaactcaaggcactgtctttcactagattagacccaagaaatagaggatgtttctgtcctggagtggaaaaaaaggggctgtcccagaaaatagaaaatttttaaaataaagagtagtgccttgagaggtagtcttcaaatcagtcatggttcacaaccacaaaactaagaaggaaacactttgatgatcacacctctgactgtttagtaaatgagaatgaatgctttaattccaggggttctgctttttattatctaaaatgtgcctcaatgtcagggatgtgctggaaactgggaaacaaagtttatatgtcaaggaccctgctttcaggaagttgagtctaataggtaacacacattcataaaaaataaccaaatgctataatggaggtttgtacagagtgctaggaaatgactcctgtaggagctaggaaaagctgtcaatgactcctctctctctctctgtctctctcactaaactattcttcttattagtttttaattatgttttagaaggctaagtggttttattctggatgaaatgaataagttataggtataatgatgtagtatacactttgataacataatctacattagcttgaaatgagttaatatttctcttttgcatatgaagaagctgagaatcaaagagtttaagtaacttgccaaagatgtccccagctgcttaaaggtagagatgaaaccaggtcatctgatttccaatccagtgctcttcctactgtatgttaaggaaaagaggagagttaaaggaaaattgtaacttgctgggcaaattaagaatagatcagctccaggccatctaacttagctcttcaatttataatccaaatgggtattactactctattattgttagaggagaaagtgatttaggctctgggatttggatttaattttgtgactttattaggggcattatttccaagaaattgtttgtaacctttcttctcatatattcaatgtcatagctttaactttactaaatgaatgaatggataaacaaataaaaaataaaatcagtgacctctggttttaagcacccctcttctcattcaattcctcatacacagattttagtacaactcaggatgcgggcacatttagcttgaagcaactacaaattgactggccacagtctttgctgcacaggccatgatatctgcctccgtcatgactgggtagtagccatgtctttcaccctctgaccttgtagatgtacctgtaaaaagttgtcctgagctgaagtctggagacctgagtatttcttttttgaaatttataaatgagattaacttttatataagtaagcatttatgccattggatttgatatacctcccagggtctcatatgaacattctaggtcacgtaagtagtaaagggtctcatataaatattctaggtcatagaaattgtcattttatttctattagcttcacatgtcttcagaatatggtacattaggatgatgaagttgttatccagatattaaatagtactattaatataaatactatttcaaggaaatttagacatttaaggtaaagttcaaatagttaaaaaagataatgcatttgtagttaattgctgcttaatcctatctttcctgtataaaaaacctgaaagtacatttttatttccaatgcttcatgaaggtcagatgacgaactcccctaaaactgctgtccttgggtatcaatttgttcagctacaaaatgcgcatcataagagacaaaattcaaaagttaaacaaggacataattttcccctcacttttccatgtacatttactcgccccccaaacaaggagggaaagtaatgattttactaaacttctcaccacccccttgttcatcatcatttttgtttgtaattatacatggattagcatgacggatccctgtgtaagaccctaatcaagttctacagtctttgcaaagtctcctggaactccttggctgtcaggctctttctcttatgggaaatgccaaacacttacttatgggttgcttgttttattgcagcaaactgatttccgaagttgttgctgctgccttccgttttcattctcccctcctttttcctctttctctcccagttcctcttttctaacacaaactttgagtaaaccacctctctgtgtattctcagcagtgtggttgaaattgactccatttccagttcaggaatgatattagaatggattaagccaattagaatataccatcccctggacatagggattggttcacctacggtcacatgaccataaacttctctgggcattactgggacatctgatagttctcatagtggatgaagaggtagtcttgagagcttttgtcaatcatattaagattttctctgcagtttgaaagcctgtgttgtagacggcagagtggagagatgtaataaaattgggtattttgtgtacttactaaagtacaatattaaccttaatttaaaaaaaaaaacctcaccattgtatttttttgtatgtgtgctccaataagttctctttattttttaaaagtcatttgggtaagactttcctttacttccacatgcacctagagctatcttgtgttattagtgctgtgtgtacgcatgtacacatgtgtgtttctatggttatgtttttgtttacatatttgtagctacttatatattgatgcttatcttaacgtttcaacatggaagttctgaggaaaaaaagactaggctttactagactttttatcttttgaaaactctagtatgtgactggcatatactagcttctttacaaatgcctttgataataaagaaaagaaccacttacaattttaaaaatattttccaatttattaaagtgttctacaactattatctcactggatcttcacacattttataattcttaagttagacaatggaatagtaatttataactccattttttatagatacagaaactgatgatcaaggtatttaaacaacttgcccaaagtcactgctagcttacacggaaaagtttaaaattaagaccggcttttctgaagaattaacccttaaaaaatgtatggccaattattatttcccttacctgagtgctttcttctccagattaaattccttcagttactttaacatttcttgcatagcctagcttcaaattctcctcaccactttggatgctgtgtccaagaactgcttaaattaatctatatttcttaaagggagatatcaaaaacaatatgcaatattacaagtgacagctaattaataccctccaaaatggaactgcttcatccttttagagtagaagacgttcccttctattaatgtagcccccgagtggggctgcagtgctatagctgttcacttttgatgggtgctctcttgttgtgaagaaccatttataaaccagtcccaacttttgttcttaatcaagtagttataaggaatcccttcatgaagtggtggatatggcttatctacccacagaagaagcaatgtattaggtgtagagactgtgggtacctgggaccacttgcttatgcaacttacttgtgccttcaagacgtgtatgggccctaaatcatacatatcattctcatttgttaatgaaatgctgctgtgtgcacccaagcttatgggctgatggatcagtcaatactcaattcctggaaactcagactgcagtgtaacttgatagactccagtcaagcattcaacctctactagggtctaggaagaagccagaagttgtggatttttggttttgtttttaaaggagcatggttacctgtataggatagaatagcttaattccaaaacatgactcatcatgaatcacctacaggagctagccaaatgttccctaaagccctcctatgtgccacataaaatccaaacaggatggctcttctgagaattatggtcaaaatggtagagctgcttatatagaagcccagacctatttcaaagacttcttttcttctaagtctttctaaaacctgggagattttcagattacttgataatgggccttagtggtatgtccaaaaaaggtatatactgcttccatcctagaatcccaccagctattttgtctctttttgttaggaggagagaataggtgcatcttacttcgtcttggtaagaatataaatcattctaccatgaagacacatacacatgtatattcattgcagcactatttgcaatagcaaagacatcgaatcaacctaaatgcccatcaatgacagaatgaataaagaaaatgtggtatgtatacatcatggaataccacacagctataaaaaagaatgagatcatgtcttttgcagcagcatgaatggatctggaggccattatcccaagaaaactaacacaggcacagagaaccaaatgccacatgttctcacttataggtaggagttgaagattaggaacacacggggctgggtgcagtggctcatgcctgtaattccagcattttgggaggccaaggcaggtggattacaaggtcaggagatcaagagcatcctggctaacacggtgaaaccccgtctctactaaaaatacaaaaaattagctagtgtggtggcgggtgcctgtagtcccagatactcgggaggctgaggcaggagaatggtgtgaacctgggaggcggagctggcagtgagctgagatcacgccactgcactctatcctgggagacacagtgagactccatcttaaaaaaaaattaggaacacatggatacaaacgagggaagagtaggcactggagcctacttgagggtaaagggtgacagaagggagaggaataaaaaactatctatagggtactatgtttactacttgagtgacaaaataatctgtataccaaacccctgtgacacaaaatgtacctatataacaaacctgcaatatacccctgaacctaaaataaaagttaaaaaaaatctaaatatgacccagaccactagacccctagatatttcactgaagttgaaggcccttgaatttttctagaattcatttgccaccttgtagcatgcatgtgtcttaccaagatgttttgagatgttgctctattttgttcatctgttccagtctccaatgacatccatataatgaacaggcacaatgtcccgtgaaatgtagaggtgattgaagtccctcctgagtagattatgtaataacacagagtttgagagttgatgtacccccagctaggatcatgaagctatattcctatcctggccaactaaaagcaaactatttctgttgatcttatcaacaagtatagagaggaaaatacattctccagatcaatagctacataccagctgccagggaatatgctgttctggagaaacagttgcaattggagttactattttattagttttatgatacctcactgtcatttttcaacattaatctgtcttttgcacaaatcaaatacaggtgacttgtgtggaaatgctacaggaattactatctttgtatttttttaagtctttgatggtgacacaaacctctgcagtccctcctgaaatgtggtattgtttttggtctactattttgataggctgaggctgttctattggcttccatttgcctttttctacaataatggctcctattccatggatcagggagtcattctgggaattctgtcagttagggagattttctatcacaactctgcattttagaccttgggaagatctacaaagtgggtacagggacacattgtgcctactgggagatgaatctgaactgaaagtttattgatcacttgatatccataagctcctacactgacttgtggacaacagtagagttttgattttgtaagaattagcatgagcttggagctaatgtccagtaatcacccccaaactctggaaatttcttctttcttaatgtacagttaccctgataaatgcatccaaagtatacatttttggctgtttagcagggttcttccccaagtagatcagccttccctccattcaaggagctccggtgtatgaactggctcaaatattgaactagttgaagtgttatagctttttattgtgcaattcaagtcatcttgatgtccactagatctagaggtgtgtgtatatatatatatatatatatatatataaatatgttatatatattatatatttatatatataatatatttatatttatatatataatatatttatatttatatatataatatatttatatatatataaatatataatatacataaattaatatattatatataaatataaatatatatatttatattcatatatattatatatttatattattatatattatatatatttatattattatatattatatatataaatatataatatatatttatataaatatatacttatataaatataaatatatatataaaaatatatattatatataatatataaatatatataatataaaatatatatataaatatatataatatgtataatatatattatatatataatatatatatataaaatgggcatatatatataaaatgggcatatatatacatgcccattgacttcagtttcagagaaaccaagatcaattaaagaatactgaatatctctgtaggtcaaaccattttgacttctactttacctctactacttgttgtggtaaggacactcacctcatctctggccttaagcaccatcattggcctctggatacctcaggatctcaaaaaaaatggactcccaggaattcagggagttcattttaatggcagcaacttttactgttatttctggcctacagagaagagacttcatgaggcttcgcagagctttttgggaggcttcccattcacagccttggtagaaggagtgttgctggtccttctcacaggacataggtaggaggtgaatgagcaagtgttacatgaaaaagccactccagtattccaagctcctcaatccaggataatttcctctatcataaaccaataaaacgttactttaactttatttagtgtaggccactctagggtttaggttccaatcaactaagcaagaaaactatgagagccacttctgtcatttgcccattttctgacaaaatctcttttcctggagagtaggcctttgttatcaagaaggcttggggcatatttcaaaatggttacttttctcctgccatcttggacataacaaacggacctttctcagagccctgacttgaaaacctggtgagattcctggaaggaaagcccacaaatgtttgggggcttccaggagtttcttactgtcacattagcccaccttgcctccagaaatttatcaagattgccatggaagtgttccttctgcttcaggtaagctgatctaggttgctgtatttctctgtattcaactgtctctcaagatttcaggtgacaatttgccctgttacctctgttctctgatgagtctaagaaaagctgttgatttttaaacttgtacagcttgaagttgtccttataactgttcttattgtaagaatgggaattacaacttccaagatgtttataggttggagcaaaaaccagaaatcctcattttctagaatttgcttttttcaaaacagtttgtcctctgatagtgctatgaagatacaatggatatctgttttctgcagatattcatgaacatgcccctctggtatgctctcactacaccctgggtatatttatcacctccgtagtattttccttactgtgtggtaagtacctatctagatatcattggccttctagactgcaatctctgtgatggcagagatgatatcttgttcatcctcatagaccagtaactggtgcattgctttgcatagactactcaataaatgaatgcataaatgaagccaccttaaaaaccaggttaactaccagctcccacatagggaaggcagggtatatccaccaatcatgactgaaagggaaatatttagttttcataatgatcaccatattttgaggaaaagaacatttgtgctacatagcttctctgcatgaaatgaaaaagaaatctagaagtaagaggtttgcagagtatctttagctctgccttggatacagggcctgctttccttcaatcattttcggctgcttggccccacacagggaaatggatacagcaatgtattgcagctcaatgctactggctgctgtgattcaccactcacttttgttgctctgagtctacacttaccagttaaccttggattcctacagaggttgatgctcaggaagagaaggcgcttcttagagaagcatatacccttgtgaggtacttaaatttttcatcattggctgaatacatctggtactatgtatataaattttgtcaataaggtttgcctctaatagattcatcaggccgggagcattagtttattcctgtaatctcagcactttgggaggctaagacaggcagatagcttgagctcagaagttcaagaccagcctgcacaacgtggtgaaaccctgtttctaccaaaaatacaaaaaaattagctgggcatgatggtgcatgtctgtggttcaagctactagggaggttgatgtgggaggatcacttgagcctgggacgtggagtttgcagtgagctgacattgtgccattgcactccagcctgtgtgacagagcgagaccccatctcaaattaaaaaaagaaaattagattcataatctctgggtgcaatgataaaaatgatttaggggctctgacttgatagttagatcctgctaggtatgagacactcttgaccatagactgaggtttttcttgagtgtatgctatgcctcttaaggtaatattttgtttgcttttataaaattgccaattcatattcatccatatattgtttattttgcattgttattaagtggctcacttatggtggaatgtgtatatgagtgtgtgtatagatttttatttttattttttaagatgaactccttcgatttacggatacttattgagggtctatttgctaggcgaggtggaagctacaaatattaatgagttaaaatatttgtccttagttcgaagtctaaatgcatgtttactagtaactatgatacaagacattagttcttcaacagtgttagaatcaccttgaaatgtgtgagaaatgcagattcttgggcccaatcccagacctaataactaaaaaatgttggtgattgctccagagatctgtgttttaacaagccctccgggagatgctggtgcacactaattttgagaaccactttctaagacagtgagaaaaaaatatcaggtttgggtatatttggaaagtcaccatagtgactaatatgccatttgtaaatatttatgtttataatataatatgccatttgtaaatatttatatttttcagaacttataacaaataaatacaaagttgaagggttttttttctcttctgcagggacaggcactatcaggaattcaatgtgtattcttcccacctaaagttttaaacttttactatatgtgtataaaatcacaactaatatgttgcattgctttgtgctttaacaatctttatgaatgttaccttatgttatatttttgaggtctatccatttaaatttttcagtcatttttattgttgatagtatttcattgcaaaatataccacaatatctttatctattcctctagtgagaaacatctgagttgtttcaaatttgtaaagaaggaaaacaaagcttgttgatgtctttagttcttttttaacactatgaagctggatgatctctttctactagagaaaaaagttaaaatctaaataactctgctggtcttacagtgcctttcatttagccataagcattttatgcttccaggcaatttttatgttataatttgctttatttgaagattatataattaagtccatctacttactgtccctttgtacttattcatcacattgagatttgacctctctgaaatttcttctttggaaattgtctataacgagaactctctgaatctcagcagatgtttctaaactccattgatttcagttagcataagttcccaacaggtacttctagggagatagagagctgaacaaatcagacacttgtttataaaagtaaaatcatctggaaggagctgacttgagaggctaacctcagggtgaaggctggatctgcctcactgaacccagccacaaagaaaatcaatgattcattggggtgtagaccccaggtcattatagcccaaagctttataatctgctatatagtttgcctttttaggaaagctgtttatatctggcaaatttctttactgtaacagcttctaccatctcccaggaatgcactaatgtccttcaaatcctgtcctgagaattttcccagagacatgtgtggttgggacccaagagagaatcagcatctcctggctatgccctcacccatcatttagaacttgaaaccattcttgagactgtgagctaactcatcattcaatatttaaacctgctctgacatacccctatccaggagtcatctacacactgctgaaatgcctctggtggtagggtactcactgctaagagctctcatgccctggcccctcacagtacccatgttctctctttttcctcctagccatgcctagttatttacttttcttttttcgtgtgatgtgtattcccatcctttcgtccatctctgcacacaattgagtgttgtctatattttgtttgtgtttgtttctgagagttataaatcattctaaagatctagaaaagaagtatttcaactatagtgttaagtacatcaacttatttttattttttgatggactctgtctcatggtccacaggctgctttgatcagctcttggttgaaataagagctaaaatatgctggatttttaggtctgttgctatcaccaaaccataggaagacgttttgtcaaacactgggaacttattttttataaatgagaaaaatgaggcttatggaagaaaagtttcatatccattgttacattcaggattaaactctcattctcctggttctcttaccagtactcattgcattatctttgtaagacacttgcaggtatgagtctgtcatatattaattgcagaatttacaatttggcttatggggaggtaagactgtgaaggtcatgttgtcaatttctgttagtaaatttgggtaagtgggttcctaatgctagctaggtttagttctaaatgcagcgtcccatggtcctcaaggattagtaaacaaaatcttctttgtatatatttaatttaattacaaggaatattgagtgccaatgcactgacttggtgctgtggatattcagagacatagcccttgaccttgacaagtcccatctggagtggagactgatgtgttcatggctgagtgtaggaagtcctacatgtgaagtgcaaaacaattgctatggggacacagccaaaagaaaagacttattcccattcagggaaatcagaggaactgggctttcgatagagggaagagggcagagccatgtgaacatttttccaagtcaaacaggtagcaaaacaggtaggaaaacacaggctgtgtttccagaatgacgagagtcagttccaaggtgtgtcactgtcatctagattctctgttggaccttgaaggacaatttaggcagctgtttgtttatccgttttgggggtggttgatgcagggaaacaagtctttccctggaacaagtggaggatgtatgagttctcttttgagactgcttgtgagcattttccaatttctttgagagactaaaaagcattagcagaggtcaaggaaaggacattattgttatactctgtaacactagaagaaaaacacaacgttgaagtaggctgtcaagatatttctcaacaactcaacctaaaagtggcttcaaataaaagagccaactggagcctgatccattagcatggagccctttatttccctaaatgagagctgtgtcagtatccttgtgtttgtcttaatttttacagaaagctactcacttggtcatacctatgataagtttaaaattcaggaaaaagcattaatcagaattttagaaccgtggggatgatctattggatgtgtaagacctttattttatacaagacgcttagataatgtttgttttatatatttttcacaagtatcaattcactcactcaagttctcaagataaatgtcctaagtatttgctatgtgtgaggatctctcctagcattgatgatacaaatatgcctatggcctctctcaaggagctcatgttcttacaggaaaaaactgtcctataaaacaaagttccgactaagtgtgatagcaagtatagtggcagctcataaggcggagtaaatgaaactgtccgtgggagagggagtattggagagctttgcagaggaggcaatgcttgcactggttcctgaggatacatggaaatttataagatgaaaatagttgcaggatgattcagtcagaggaaaatgagagggaaaacgactaagtatgagatgtgttgatgagtggcttagaatcatttggtggcaggtaaagagactcatttcatacttatttaaacaaaaagggaatgctggatagaaaatcatgacatcccacagatcctgagggcccagagctgccaagccaaatgagggggttgaaccaagaactgaaaaggaatccaatgaaccatagatatctaatttatagctctgagtctaaattccaaattcttgatagagaataactacctggcccaacctggctcgagaatctgttccagtcgtaccataatgatcagagtgggaagatcgtagggtacaaacatagtttcccaggctctctgctatggatgaaaactttaaagatggggccttgaaggctgcagagacactctaaaagatgtctgctaattgactgcaagctgttgggagacctcaaataagaattgggaatttttgtagtgctaaagtgcagtggagttgagggcggggggtgggggcaggtatgtcaatagagacagatgagattgcaggactggcatagagcacattgtgcaagattctcaatttttttttttttaagataatcagggactttaaaaagtctgggcataaaacaatcagaattgtgatttgggtggttaagtataatagtggtgtggaaatgaactggaaaaggacaacctgaaagaagagaagacaggttagaggttgctgaagtagtccatgtaagaggctagagccttaactagataatgagaatggataaaatgagataaaataggaagaaatttaggagaaataaataacagaatattatgaactattcaatgtgtctgaggattgaggagagaaataacatgattgtcacttttctgatataagcagcagagcagaaggtggtgccatccccaaggcaaggaccagaagaggacaaggtttagggggagcatagtgggtctgcagtgggcatggggagttaaagtgctggggaccacccaagaggaactggtgagtgagaagatggatattccctcaggagtgaggttgggggctacagatgagatctgggaatcatcagctgatgcttggcagtgtaagcccaggggtgatattgtccagaaaaagcatgtaaagtcagaagagaagcagaaaaaggagagagtcctgaaatgagtccacagtaagaggtaaaaggaagaaaaccgtctcacaaaggagaccaaaaagaataaccacagagctgagtaaaccagaaaagaagggtatcctggaagccaaaaatggagaatttcaaaagactgggaagtcgtttatcagcactttgcactgttatatctgtttcatggacagtaaactgaaacttggagacttaaaatgacagagttgattagtgtcaaaggcaagactagaatggagatgtctcaactttcagttctgtgctcttattttctatggaacaccacaatacttgcctgcagagagactggagcaagccaccaaaatgtcctggagaggggagatgggagcctgagctgtagtgcagggtcctacgtgttgtctgttcctgccctgcatgtacttcagctgtcatcccagagcagggggccgtgcagtgagcatagtgctggcctctcacgtgtggtgccagcctgcagtccaggtcagcttcctattagccctgtggtttttgttgggctgggcctcagtttcctcctttgtaaaattgagaagttaaaatttattctctcctacctctaatattatgattctttttatgatacagtttatagattttctccttattacagacagaacaaatcctcataaactctcaattctgtttgtaagtatgagggtgaggaggcaatgagaggcactgagtaagaattggagacctttgtctttatagacacagataattcagaattttaccagcttctataaaaccatgggtgaatatgatggggagacagaagagctaggtgaggatgcaagaactaatggagcatgaagatcaaacaaatcaactagagtgataacagtaaaaaaagaaaaaaaaaagaagaaaaagaagagaagaagaagccacagctaattaaaaatagctgaaacccaggagatgcatttaaagcaatcacataggattgttcaaattaagaacaacaaagaaatagctacgcgaactccatattctgagtgcttttaaaaaaataataagctgatattagaaaaagcttttcctttttcaaattcccccctcgttgcagaaagagaaaaagagaaaactttcacatcattttttctctagtctttgggtgttagaatgaaaggagaatgaaattaaaatcacttcaagcattttccttctgggctgtaaagctgctggcatcatttatcccagccccacacttacataatgtggataccacaggagcccttggaagttattaaataaaaagaagacatcaaaaaatataaaagaaaggcaattaaaatgttggacccaataagtgagtcagaaaacttgatttaaatgcaacccaggacccagaatattggatattaaggagtgagggaattcaactgtgaggaataagggggttgaaagaatacctttaggagctgggaggggaccacagttcctttgtggccagggagtctttctctatgtaaagagggaaaggcatcatcaactcatagactctggtagtttaagaatccctgaacctcggaaggaaaatgggtattgggcaggatgagtgaggaggtatagatctcaaatgtacggatcccatggggtgggatatttgaataagagatggggagataagacttagaggttttccttcttttgttttcttttgtttctggtttgtcggactgtcagagtggacttggatgtcttgtgtctctactggaagttgcactagcttaaacaagcaggctctcagtatgctgaaggcaacagcatccaaaactcaggctcttctagtcaagacagggtcttatgctatcctgggaagcccaggaccttccaacaggaagcagaaggtcatctccctgactctggcatcaaggcaatgcccacctggatcgatggagtcatgggaatttccctattgtaactgcatcttcccttgagtgttccttggggcaatgcgatggctcaaaacagcataggagcggaagagctggcatgtgacagcaccagcatcacttctatccactttttccagaataggctcaaaagcaggaagttcagaaatcatcaataggtttaggagataacttaaaaggcaggtctgggccttccaagaagggaagagtgggggctccacagcacagacctgaaatatactaccacctgctcactgctgtagtctgagaaatgtgtgtgtcaatgggtctcgctggatctccataagaggctcatctcctgctggaataacctttggagatgctatgggaaagagggtctgcttcttccttatttcaaatcccactaccacaccctcaactcaattttactttggaaaatgtctcatccatcgtcctttcctaaatcctgggatcttacaccatattccacatctgacaaggtgaaaggcacttgtggtaggctgaataatgcccccaaaaaagagatccagatccagattctcggaacctatgcatgtttccctatatggttatatggttttgctctgtttccccacccaaatctcatctcaaattgtaatccccaagtgtcaggggagggacctggtgggaggtgattggatcatgagggcagtttcccccatgctgttttcatgatagtgagttctcacaagatctgatggtttaaaagtgtttggcagtccccccctcgcttgctctccctctctcctgccaccttgtgaagaagatctttgcttcccctttgccttctgccatggattgtaagtttcctgaggcctccccagccatgtggaactgtgagtcaattaaacctcttttatttttaaattacacagtctcaggtagttttttataggagagtgaaaacggactaatacatatggcaatagggactttgcaggtgtaaacaaactgagaatcttgaggtgggaagattatcctggatgaccaaggtgggccctaaatgtaatcagaagtgtctttatatgagagaggcaggggacagatgaaaaagactaagtgacactgaggcgagatgctgagcccctggctttgaagatggtggaagaagcagctctaggagctggaaaaggcaaggaaacagatcctcctctcgagcctctggaggaaacactgcctttctgagactttcattttgaccaagtgaaactgacttcagacttctgactttcagatatcagacttcagacttctgactttcagacatctgactttcagatgtaaaccaacatgtgcattggtttaaaacactgtatctgtgttggtaatttgttacagcaggcacagggagctaacagagggaatacctgcctcatgtgatgtttttattttaggcaaaggaatggacatacaaacaaacaaaatgttttcagtcctgggagtttggtatgcaggattttttttttttttttttttttttttaaacacagtcttgctctgtcacccaggctggagtgcagtggcataatcttggctcactgcaacctccgccttccaccacacccagctaatttttgtatgtttagtagagacaggtttcaccatgttggccaggctggtctcgaactcctgacctcaggtgaccacccaccttggcctccaaagtgctggattacaggcgtgagacaccacgcccggccagtatacaggttctattctcttgttttttctttctatcttagtctataccaagcccaaaatctttcttcacttaaatatagttcaacatattccctgacaaccataccagtttgatttgagatcaacttagttgaaacagcttgatgcattttattgatttttgatggcaacattaaagaaaaaggcctgagggactgggctgctcatttcgtttttttccctgtggatatgagcgaacagcaaaaaaagactggaaaagtggcaactcgcagtgatattagggatcctgcaaactcccttttcgtggggtgcaaataccccaagttgatcacaagttctcttaaatcttgagtgtggcttcactggagaaggccagaggtggggtttatggccacaggctgcacagacctgcccttccctctgtccatgtctctcactcttcaagctgctcacttggagtgctcagactctttggatggctttgtcttttgaaggggaggacgctcaggtctggaggtcaggaagaatacagtacggagaactaaggaccaggcttgagtttagaccctgaagaatggattccacagcttctatgtcatcagacatatcctgccatcaagaaaagaaggtagatattgaagtgaagaacaaggtctggaaagaaagaaagccttcagcatgaacattccatatggttgaagtgggaaatggttctagcagaactaggctaaaaatctttggcagcttcaggctgttgccagtagagaccttagtcatggggcttcctttaagtgtttctgagccagaggaggacaaggcttctcctcctgctgctagggatcctgggaggttgcagattcagctttgcagactggcctaggttggagtcagggagcctgcctggtgcttgatgtcttagacagatctgagagcttggggcttgtggagctagtccttctctcatggggccacctcagagtgtatggtttctgtgtacttcgaggttgatggtcatgcaggacagaaattatggttgaacgtcttacttagagcagctctaagatgatcaggaagattgttttacacatcaggaatgtagtttactttcccaggtaaaaaaaacttgagccttcaattcaattttataccaagttttcaactctaagctaaccaatgtctccttttctcttcctctccctctttcattccttctttttctttctctctcttacgctccttgaagcatcagaaatagaaatagaggctgaaatagaaaaacctactgaatgagagggctttgtctcctatccttcatgtacagatcttgaaactgaggtcaaaagttagtgacagagccaactattcatatttttagtataagataatctttcttatacacgatgtgatgacatattgtgagactatcaccaaagtgatttttactttgctatcagaatgaccctttagtagtctgtgaatttgttagtgtaaaactcagtagcttccctactttgttctcattcagttcacaggatcaccacttttccttaggtgctgtgctatttattctagcatcaaattagtggcagagtgggatattatattaacgactgggggaatcagtaaggaatcagtatttcccaaatctataaggtactttgggctcagctgctttgataagcttcagaatcctaagggttttttctttatttgagaatctgcatgatgtagttaaaagaatattgaacatttaacaagaacaacccattttctctcatttaatccttacaacaaccttatgaaatagatattaatttttaaaattggcatgattccatttatatgtgaagtgtgaaaacatttaactcatagaaacagagagtagaatatgtattagtattatctgtactttacaggtgagtcttagtgggagattgtgcagagcctggactcaaatcggctatgtttggcctcaaggaattacttgtctatatctactcctcattaggtaagagtcatacccccttgacatttcttcctattagatttgggtgtatcttggagtgagatccaacataggcaaactgaaagtgtcttgttggatatagtctgtaaaaaagcaaaaaaaaaaaaaaattgggaaaatacagtttgctgggtgggggactgattgtatgccagttggataagttggactgatgggataaataagtatcaactcttgaaggatcatgaatagagaagtcagtgccttcatatacaccatggaatactatgcagccgtaaaaaatgatgagttaatatcctttgcagggacatggatgaagctggaaaccatcattctcagcaaactaacacaagaacagaaaaccaaacaccacatgttctcactcataagtgggaattgaacaatgagaacacatggacacaggaaggggaacatcacacaccagggcctgtcagggggttgggggctaggtgagggagagcattaggagaaatatctaatgtagatgatgggttgatgggtgcagcaaaccaccatggcatgtgtatacctgtgtaacaaacctgcacgttctgcacatgtatcccagaacttaaaatattgaaaaaaaaaaaaaaagaaagaaagaaagaaaaaaaaagaagtcagtgccttagtctgggacaaggcaaatgtcagagcacatagacaggtcacttccaaagcccagcctagcattcattggttggatttaaggtggcttggcagcagggagagctagtatgattattggatctcaatcatgtaagagttggaaggctggcctagtgagggaataaatcaataggcattctggagggaaagaaatgacaggattagatggcaattagacataagaccttaaggagagttatgaatcaagggtgaccctgagattcctccctgatgtcttttacatctaaaaactgtactaaaataaggtgtccacaggaggcaactagggtgtagctcaaggatttggggaaaatgtcaggaaatattctctggcatggaatttaacagaaatgcatgacattcatcatatatgaaatgtttttagaaaataacccacttgaagatgacttgtgaatgttgccagtcaatcaatagctttctctaaatccctctgagatatctcaaagatatctatttcaaatataattatacgtgtctggaaacttctaattagtcctgtctatcaagaaaatatgttgagtggtaaccctgattaatacaaggtaaaacatatttttgtgactggctaaagcaattaacaaaggaaaactagaaaaaaaaattgccttataattatttagtactttctaagggagagagaatctgtactccagacctggagtacctatggattaggatataaatatcttttattggtgagagggtgattattgtgcttaccacagctagtattatcatactttgctgagccaattaagggccagtctgtggttgtatactgtccctccctaagttactggtgcactgtctaaggaactggtctctgagactaggcatggtccacgcaggtcaatgatgatctcaagatgggcccttgggaaaaccactgttcatggctaagcagaattcatgaatgcaaataggacaatactcaaaggagaggaagcaaaagggtgtggatatttgccacacaatgaacacttgaaagaagtcagttcccagcctttggatctgtgcaagcagaggctgaacttgttaggatgttgaaaaggagattcaagatttaactgatggcaggactcagggacctttgtgattcttcacatcctgaacatctattagtttattgagtcggaggcagaagttccatcctgttcaagaaccagtgtccttagtagtcattacctaatgtatatttataacggtgagtcaaataaagctccagaatttaccaacaaaaagcaaaagtccctgagaacaaaatggacttcacgcccacagcttccattaaagttaataagaagttaatcatgtcaatagaagtgacattgtagaatcttgagaaacttggggaatagaaagactcaacatgatattggatgaacactaattcaaataacttaacttcgcataaagtgcggaggataaaggacagtgagaaattgtcttaattctttgcagagcactccaattctagctgcagtaacattgcctcttagcttgaagtgtttgtccaaatgagccactttatttaaaaagagtggtttgagctacttaatagcttcactaccaagtcacgaaggctctgaaagggtggccttgtcataacgttgttcccattctgtctgcagaagtgcccagtctgatttccttctctacctctgctttttaaacctgtaaccctttactaatgttttcgctttggggttattttttgttaatttttcttggaatcctatctgcttatatataaataaggaattggagaaggaaggaaggtgtgggagtgagtgatgggggggcagagaaggaggtatcccagctcttggcaaaattttatagagtcctagaatgccgaagctgggagggttattggagattaaccccaatctctcattttacagttcaggaaaatgcaatccagaaaaggatagggaattgcccaaggtttcacgtagactagagaaaggaagagctgggagaagatctcatttcctttagctgtcaggctgctttgtctttctgctgatgatcgtatgatggtctcctggtggcccatggctttcttatcccttgtggtcttgtggagtgcttcctggcaccatttatcattgtaaacttaagtaggctcattcaaactacgtcacctactccccagagttgactggctcctctccctgcttagttctacgggataataaagtagtactctgtattactgcttttggtagaaacccttcagtgcttccttcctcgaggcacttgttcacattatttcctgtaggatcagactgtcctcttaatgtcttctataaagcatctctttttccctctcctgcaaagtttcctcattctctctgaaccttcatccagcatttctgattgatgttcttctctaaagctcttattattttctaaattgtagtagttattcgaataaatgccttaaagcacatggtgaagaatctcttgaattagggcccaagcccgatggcagggcctggcacacacataaaaaaatgatcatagcaacagaaaatatgaacaaagcactaattaatgccagaaactgttttaagcatttttacgtttattcatgcttttaacctcacaacaatcacatgttgttattgtttttataatctccattttacagatgaggaaattgaggcatggaaggtttaggtatatattgttcaaaggcacccggctaatatgtaattacaccagtatctgaaccaaggaatctggccccagagtccaacccttaatcacgactcagaatagcctacatatgtttgttagaatatccatacattcaaatctataccaaggtctaggtttatgtctatgtctcggtctgtgtctgtctgtctgtctctatctctctctctctatccctctgttatcagtctacatctacatgtctgtctgtctgtctctgtctctctctctatatccctttgttatcaatctacatctacatgtctgtctgtctgtctctatctctctctctatccctctgttatcaatctacatctacatctacatctacctatgcatctatggctataaaggtgttaataagtggtatttactcagatgagcactcatcccaattatttaaagactgcttcttttactatgaaccaaagtagtgagtattgtggattactgaagcattagggcaagctgagagataatagtctaggggcaaaagtgaggccttgtctttaattgtctcacctaagacatgtcctggattttctggggagtgaaagtgagaacagcactttattttcaattatctctaaagcttccttgctttcctatttacctttgtagactcatgaacaaacactaaaaggttcaggcatgtggaggctataaacaggctgtgtcttcacatgagtaaatattaacaatatctggttttcctgttaccccatcaagataggtaccaggagctttaataattaatcaaattaggacctaaaaatcatttcccttttaggaagtttctttctgttagctatcaattaacactgatgactgcagctcccttctcagcgtgtttcaaaaaatgggaaatggaaaagctctgcagtgtgttaatggagccataatacacattgcctaatgaagcatgaaggccctgtttactctgaacactgtaattatttaagagcttttaaaacccaatgtcaaaccttgactctcgcctacttctttctcatgactggaatgaggcacttaatgttttatctgaacttggtagaggggagctggaaataaatagctaattatgaatttccatttgtcaaactttttcattgccatggaaggcttttgcctagtctgggctcttgtagatgcttcacagcaactttcagagctaacatttaatgagcgcctactacatgtagggcctcgcaaggggtatcctgcattggttgtgagactcagacatgtccaagagcacacaggcatcaaaatctagacctactgccttttgagacagcagaacctggtgtctatatgcaggagtcttggagtcagactttctatattcaaatcctggctccattacttatgactctgtgactctgggaacattactaaacctctctgtgatttctagtctcatgaataaaatggggctgtgacaaaggtttcttgcttagtcagactttagtcaggctaccctgaatcctctttccaacaaggcttttgcaaatatttccttgtaccatgtactttgagcaagaatcctgttaagtcagtttagggagatctccccacactcaatatttgatagctgaccaagctccttatccccactatccccaggtgatatcaaatcaccctggcctgccttcagcaagaattccgttaggttgattcagcccaaatctccccagactttatgtctcctctactaattttttttctaccaatgccccactacacattcctctttgcctataaattcccacgtgttctgattggatttggaattgagcccagttctacactggagtctctcttcctctattgcaatagtctttggaataaaatctatcttcactgccttaacttctgtcttctgtctggctgtgtttttccctaacagctagtgataacaacggttatcaccttacggggttgttgcttagactaaatgatctgcctttcacaacagtacctggcacacactaagagctcagcaaatgttagctgttattatctaactctttgtaccacattatgtggcttctgaaaaatgtcaacaaacactcactgcatgcatggaagaggtaaagggccaaacactggtggaggagaaagatcagaggctggcagtagaaacatcttgtccagcttgtccctgcagttatctatacggctggtaatctcctctccctctgagatttagatccctcatctgtaaaatggtagtggaatttctccttcttggcagcccttgtgcctgctgtgaagattaaagtctacatcaacatgagagcgattggaaattggctggcactgcgctataagggagtgcaagtgcacagtgctgtcctgtatactttaggaggtatgaggacagataagacttatccttgtcctcaaaaggcttgctgcctaatagagtacccagacaaacatataagtaacaataacacctgagaagtaaaagggcacacaaagccaaaaagcagagagttggtgtgggggcaagtcattctcagtgagttaaggaaaagtggcttcctgaaagaagtcacgcccaggtcaagccttaaaggatgaatgagatctagatgagtgtagaataaggtgagggcatgccaggggaaggtaatagcaaaataaaggcatagtgttggtgacaaacagaatgtgcatatggtgttttgcatagtgtggttcaaacccagagcatatctaggaaaaatgcaggcacctggacaaaagacttggcttcagtttgaacctcagctttatcacttaataactatgagattcttagacaaatcactttttaaactcattttctacatctgtaaaatgggaatgctaatcctacctaactaatatttatgaggattgatgaattaatgcaggtaaaatacttagaatagagcctgactcatagcaggtgatcaacagatactgtctaatgttcatcaccaagagataagaagtaaaagtagattgggatcaatttgtgtaggactcagcatattcaaataagaagcatggcctttattcagtaagtgatggaagaccacagaaaattcatgggcaggccaatgaaatgacctctgctaagaggcatggaaactactcaagagctgtctggaagatgacaaggtgggagggcttctgggatggatgagccttgctcataggtgaggttatgggcacagtagcatttccagctacgcagtacttccacatagtaaaatggagaagaaggtaacatttccacctcagtatgagaaaatgtagccatagagaatccaaacaatttacctactataatgtaaatattagtgtcccctccaaaattaatgttgaaacctaatctccaaggcaatgttattaagaggtgaggcctttaggaggtgactggatatgagagcttcatcttcatcaatgaaattaagtactgataaaaaagctgctgagaactagctagatccttcttcccttttgccatgtgaagacacagcaacaagacaccatcttggaagcagagagtggctctcaccagacacagaatcttgatcttgaacttcccagcctctagaacagtgagaaataaatttatgttgtttataaattacctagtcttggacattttgttatagcagcacaaatggactaagacattgcctaaattcatatagttcagtgaatcactctcagtcatgaaacgcctgcaagtgccagtgtgtggggtaggtgggcaggttagagggcattcattttagctgttgacaccccagtgtcagtgagaggtcagggagcaggtttgaatacttgggggaggaaagagcctgaggactctggatctctatgggatatgaagtggccaatgggcagacttggaaagaaaaccaaagatgtcagattggctcagagtcccctgtgctttgcagccctcatctgatgtgatgtctctcctgacttcatattgtcaccagcacaatgggtttctgcccagggatctctgagttagtgtaccttttgttctcctccatgacaggaaactgacagaccatatgctggtggattttaaaggtctggcttggctggtgcccactgcccaagaaaaggacaggggtctgaggaagaatctgacaatgatcataccctacagacagacccttctgctgctctctcatcttccacccgcaaaaggagctcagagagcagaggggcatagtaatgctccaagggtctgatattcagagactcatctaccattacctacctggcaaggggatgtgagaagtgagtcctgtattgtcataatgacttctgggccccttgaaatctgttgaaaaacatcactcaccaggtgagatttctttctcataaacatgtcctcaggaatataacactgaggcaaagtggtttatacaacaccttcctgacaaggccctccggagctcttcagaatgagctcacaaattcacggggattccttcagctagggagaaaggaatgtgataaccttttggaaaatgttttattttgccttgacttgtgtcaactcatgtcattttctttagctgaaactaaaagctgactgttagaatttttggcatatttcagtgtccagaataaattctgagacttgttttcaaaaatcttaagataatgcctgccccttctgcacagtctgggttatatctatttccctcaagcacagcctgtggcttctcactgttgctgaggttgggtctaaacatctgaagtcccctgactaactggtctcagtctttctcacattatatctcctatcaattttcttagtatgccttaacattcacatacacttaacctcattttctccaacctactaggctctatctacttctttgcttttctcacatgcttttctgcctggaaagttctttgccaacattggctacttatgaaaaccctcctcaccaaaggccaccttctctttgaagccttctcagattactttccctactaaaatgattactttagtgatcccaaagactattgcttgtacttctgttatttgattccttttattcattaattcaccagttattaatatctattttcccaaaagctactgtatttatggctctgtgttacaccttgtagagacacagaaatgagtattaagagagagagtcaggaaaaatactgaaagagaagagtgtagtaatacaatagatacttgtgcaaatatcatatttttttccttcatagaccatatatttgcaggaggcaaagtggtataaggaaaaagtgtttggtaattgtcatcaaaaaaacctgggtaccatcacgttaactggctgtggaattgaactttcagttcttcttctgtaaatggggataataatatctccttcttggagtatatcgtaagattgaattgagcaataaatataatgtgctcagctcatgacaccaactcaataaataaaccaactcaataaataaatagttgagtaatcagaatttagtccacagaaaaagaatcagatattttctgtgtacctgaaattgagatggtaaaaatccactcaaaataagaacaaacaaaggcaagaaaagtatcatgtagaaggagtttcaaggcatattcttgctcattagtatttactacaatttaaaatgtgtttgctcaccagtatttacaagtctaccatgtgtgtaagctgggcacaaataaaaagcaaataagtaaagttgacatagtctggatggaagaattattgacccagggaagcaagttctgggaagagaaggatattgaatttctaaactgaaaaaaagtaaggtatttatgaattagaagaacactattaaagaaaagagtaaccaaacctttaagattaaaattatttcttctccttggttcctttgttcttcaacatttcaaggatggcacttaaggtaaagaagcccaatacgaagtggcaaccaccttcttcactctgataatttggagaagtgatgtcctagcttatatctgctgtagaatttattatatcaaaatataaattactttgtcctcttttctgttggactgtgatatccttgggggcaagagagaggatagcatttatggttgttctcttgggccttgctctaagccagaaaatataaatagccatggaggaggagaggaaaggtgagtaatatggtttggatctgtgttgctgcccaaatctcatgtcaaatgataatccccagtgctggaggtggggtctggtgggaggtgattagataatgggggcatatttcccctttggtgctgtttttgtaattgtgttttcagaagatctgattgtttaaaagtgtgtggcacctctgccctttctctctcttcctcttgctctgaccatgtgaagtgctggctcccccatttgccttctgccatgattggaagcttcctgaagcctccccagaagcagaagccactacgctttctgtacagcctttgggacacagaggcaatgaaacctcctttccttattaattacccagtctcaggtatttctttataacagtgtgaggatggattaatacagaaaattgataccaaggagtggggcatttttataaatatacctgaggccaggcacagtggctcacgcctataatcctagcattttgggaggctgaggtgggcggatcacctgaactcaagagtttcagaccagcctgggcaacttggcaaaaccccatctcaacaacaacaacaaaaaaaaaattagccaggtgtggtggcatgttcctgtagtcccagctactccagaggctgaggtggaagaatcttgagcctgggaggtgggggttgcagtgagctgagatcatgccactgcactccagcctgcacgacagagagagaccttgtctcaaaaaaaaaaaaaaaaactgaaaatatggaagcaactttggaactgggtaatgtgcagaggttagaagagttttgagggctctcaaagacaggaagatgtgggaaagtttgaccttcctagagacatgttgaatggttatgacaaaaatgctgatagtgttatggacaatgaagtccagcctgaggaggtctcagatggagaagaagaacttattgggaattagattaaaggtcacttttgctatgctttagcacaaagtctggctgcattgggcctgtgctctagggatctgtggaactttgaacttgagagtgattatttaggatatctggcagaagaaatttctaagcagcaaaacattcaagatgtgacctggctgcttctaacaaacaattgctcatatatatgagcaaagaaatgacctaaaacttgaacttatatttaaaagggaagtagagcataaaagtttggaaaatttgcagcctggccatgtagtagaaagaaaagcccgttttcaggagaggaattcaagcaggctgcagaaatttacataagtaaggaaccaagtactaatatccaatacaatggggaaaaggccccaaagacatttcaaagacctttgcagcagcccctcccatcacaggctcagaagcctgggagggaagaagggtttcatggactaaacccagggccccactgccccgtgcagcctcagtgcactgctccctacatctcagccactccagctccagctgtggctcaaaggggcccaggtacagcttgggctgcttcttcagagggtgcaggctggaagccttggcagcttctgtgtggcagtaagcttgctctgagtgcaagagttgaggcttgggagcctctacctagatttcagagaatacggaatagcctggatgtccaagaggaggcctgctgcagcggtggagcctttatggaggacctctaccagggtagtgcagaggggaaatgtgaggttgaagcccccacacagagtccccactggtgcactgcctagtggagcggtgagaaggggatcaccatcctgtagaccctggaatgagagatctaccagtagcttgcatcctgtacctggaaaagtcacaggcactcaattccccaattaaaatggcgacttcagtgatctcaaatactattgcttgcactttggttatttcaaataacctgttatttgagagcagctgcaggtactgaaccctgaaaagctgcacgggtggagctgcccaaggccttgggagcccatcccttgcatcagtgtgccccagatgtgggatatggagtcaaaggagattactttggagctttaagatttaataacttctctgctgagttttggacttgtgtggggcctgtaacccctttcttttgactaatttctcccttttggaatggcagtatttacccaatacctgtatcccctttttattttgtgattaactaacttgttttatgggctcataggcagaagggacttgccttgccttagatgagactttggattttggacttttgagttaatgctggaatgaattaaggttttggggactgttgggaaggcataattatattttgaaatgtgagaaggacatgagattcaggaggggccaagggcagaataatatggtctggatcagtgttcccacccaaatctcatgtcgaattgtaacccccaatgctgaaggtggggtctggtgggaggtgactggatcatgggggtgaatttccccctttggtgctgttctcatgatagagttttcatgagatctgattgtctaaaagtgtgtggcgcctctaccctctctctgtctttctcctgctctggccatgtgaagtgttggctccccctttgccttctgccatgattggaagcttcctcaggcctccccagaaacagaagctaattcgcatcctgtacagcctttggaactcttaagtaatgaaacttctttctttataaattatctagtctcagatatttctttatagcaatgtgagaatggactaatatagggaaggaaagtataaaagaatgaggaagtaaataaaggaaaagtggagagaaacagtaggattccctctccattctttatcagaatcagatgataattacagcttcacttgaagttaatttcattaaattgtgaaattgaacagtttgcagacactcacataacatttatatcagtagttctcaaacattaataagtgaagaagtcccttttagcccaggaatctgtactttaaacaaactctccagataaccctggagcgagtggtccttgaaccaccctttgagaaagaaacactgtattcccttagtgtctcattttttattcattcagccaatgagtgtttatcaaggcctattatgtgtctggcactgtgttggaatatgaagaaacagtgatgaataggttgggtaaaatctccacttctgtgaagcttgtacctgagtggggaatccatgcaaaggcattctgaaataaatagaacaggcaaaagtctattttactaatcaggaaactgtgattcaaagagggactcttctggctccaattcaaagcctttctgaataaacaaacaaaacaacttacaaatatataagcataaaatatactttaagaacctactttctttgttcccattccaaccattttcctttgaaagaaagggaatgaatgggcacagggcttttaattgttgctcacaaaaagtgccatgactgtgattttcatcatggtgctgcccctcaggtcgatggttcagaaatacaggagcatgagtaatcttccttcatttggttacttcgtgattacaggcattctggctctgatgccctggtctcccacttgctagctatgtgatcttgaacaagttacataacctccctgatattatgaacccaaaaatatccgaggccggtctcaattaacttagaaagttgttttgctaaggttaaggacatgcccttgacactgcctcaggaggtcctgatgacctgtgtccaaggtggtttggtcacagcttggttttatacagtttaggagacatgaggcatcagtcaatacgtgtaagacatacattggtttggcccagaaagtcaagacaacttgaagtgggggcttctagtaggtagataagagacaaaaagttgcattcttttgggtcttttacagcctttcattgaagacacaactcacatgtgagtgggggtagaggaacttatgccttagtctgactcagtgaatctgcatttttacataagcagtagggcagaagaagcaattggatatgcatttgtctcaggtgagcagaggaatgaccttgattctgtgtgtcctttgtactccatctgtgaagataagctatcaatttacatagccaaggtgaaattcaacagaattggtttaaggtgaaggtcttgaggcccacaagaaatcgcctgttggcaaattgtgagggagatatgtagcttttaaagcaatctttgtaactatcttatcttggaactaaaataggaggcaggtttgcctgatgcagttcccagcttgacttttccttttggcttcatgattttggggtcctgagatttatttccctttcacaatatggtcttctcttctgtaaaatggtaataaaattagtacctgcctaataagattaaaatcagttaattcatgtaaaatgttaaacgcagattctggtataataagtgtcccataagtcttagcatctgttgtaattgtttatattgttagtctaaaagtcctttaaatgagtttcctatggaagtcccgcagtgtctgtgaggactctccctggagactattccttagagatgcattattttcttccacttaatatgtctgcactggcacctgcttcgcacccagtgaggtgctaggtgctgtgaaaggtattgccgtcaggaacctcacaatctgctggtagaggtagatgcctacacaacagaccattctatacagcagaataatggcagtgctaggaaaaggtaatgcagggctgtgaagggatagaaaggctggggtggtagagagggctccatagtagaggtgccacttgaactggagaacgaaggaagaaaaacaggcaaaggacattccacgccagggatttaggccttgctttacagagaaaatgagaggtttttaaaaatggccccagaacattaaaagtgtactttcagacaataatgctggtcacattaaggaatggttggaatggattttagttttctgtgctagtccatctcttattgatcctaagtgtcacaaagtctgggagaggtgaaagaacacagcatctttgagaaataactaacagtttattgcactatcaaaggttgagctgtgtggaaaaagggggtaggagacaaggctggagggctagtctgggatccatagaaaagcaggctcaggaatcaactttcttctgagggcagagaagctattggtagaaggaggggtggatgtcccctgactcctctctgatggtatgctccacatacacttagacatttgcacaaatacattaagtagtcttagatttttagaaaatctatttcagagccatgaagttaaggctagaacacagaaggtttcagattccatgctgaaaagtttgcactttattctgcagaatgaaataaaagtttcataagaagagtcacgtgtaccatggtggatgctgccggtgcctcactcaggcccctttagtatttgtgtacccattcccaggtgctgtgagtgttgatgtgtcaggcctgcatcacttctctgaaaaatgggagcctttccaggacaggcctcagccaacgaccattgtgcaaagggctacttcccttgcctcagggtgggactgactatgggtgatttgtgctcctgtgggattggctctgactgagcttttcccctctgacttattctacttcttttactttccttctcccaggtgcactccccctagtaaatccccagaatgagaatcccatctgagatttggcttctagggatcttgacctaagtaagccatgtgctaacctgttttagtagatactaactctagaagccacctacagggaaaattgaagacagagattgaaagcctcattttcttcaaactatagtaggagtttttaatgatgatttatccatccatattccctatgctgaatcattatttagcttttgatgtccattttcatctctcctgacagtcttggtatttgttttaccataggcagtacctttcatgatgcctgtaaaaagcagtgaaacagaaattcccctggttttctttgggcatacttctgagaattttaacatttctctaagatataaataagcaaaaacctcccatttgcctgtaggtgggtgtctgaaagacataaacttcagtaagccagcttgttcttgttgacaacctgaatctaattatgcacacgcaagcacacccacaaacatccaaccttcgtcagcctaacattctggtgcagcgttgataaatatttgtgtttaatggcacttaaggggagcattttgatttctaaacattggctggtgagtaatgattttgccaagagcacagcaagaattttgcaatcttgactattcctaggcttttgatgacatacaattactccacactgcataatggagttgagagaaattctttaaagaacttgtcacgagggaatactttcatcaagaataagggtgggaacaccaaatgaatttcaaggcagtgcattttcacattttaaccaccattcttttcaccttttgacatatgactcttctgaagggctctgtttctgcaatggggcaaaaggagcaatgatgggctcagtccttgttcctatctgccaggttttagaaaagcacccacttttcagttgaacagacctagggatgaatccctaattgttgtgtgagcttggaggtgtcttcagttttgagcaagggggcagaattgtgaactgggaaagggtaagatcctatagaggcaggtatacagggctccattgactgtgtcactttgggtgaaatagttttcaccttagggcctccatttgtattaatctaacatgagaattgtaacaccttgctgtagtcagggttgtagtgaggagtaactgagatgacatgtgtaaactagtataacacggttcacagagagaacattggacaagtgtgggctcttctctaggtgccaggttgagagtcaagctctccaactccacatcacttcgagtcacaggggcacaagggaagcctgcaatgtcatcgaaaggccctggccagggagactgggaggctgcttctggtctctctcacttccatttatgtgttgtggatttgacagacattgtgccttctatgtgtcttcctttgtatttagccttcaatcgtttgtatttattcttcaatacctttgccttctgaaccatttacttgtccttgagtactggctatgttactgaagttttatttttagaagcatatgttttattttagaagtatatgtcttaactctccaaccaggacatcaactgcttgaggttagagactaatcatattcatctctgcatctaccccatctaccccacccccatccagttcataaaatgcacccagcacacattgactgttaagtaaatattgatcgatagatggtttttggccagtttgtgaattaggcccttgatttagaatataaggtatttgttgatattatttatcttcatttaacagttatttcttgtgtactggtttaggcactgggaaaatagtggtgaatatgatagaaaagttccctgtcctcaatgagcattttagtgaggaagagacaattatcaagtgtggaagagaacaggtagcgataagtgttatgatgggaataactcaaggtgctttgcagcagtggtaagagaagttaatagggtggccagagacagcctctatgaggaagtcaaacataagctgagctgcagatgaccagtgggaaccagccatgcagagatacacagaaagaatgtttcagaatgatggaacagctcgggctaaaatcctcagacaaatgctcatgcaaatgtcctagttcatcaagttaggggaccagaaagaatgcagatgggagggaaagcacagtggggactgtggttgaggatcaggtttctaagtacttaagcacatgaaatgatccactctcaacacacggcactgtcattctgacttagtggctcggtgcttttgcttttcaacattcagcaggcagcactattttgacattctcttgttctacattgagaagaaatagccccaaatttcttatgatttcttccctttagtaaagtaatttacgagccatactcactgctaaatttgcttttcttccctgcacttacctacttcagaatttccaaaattttcagaaagaatgatgaaaaggatgctaagttgtcactgatctacttatttacagtttttttgggttttttgttgttgttgttgtttgtttgtttgtttgagacagagtttcgctctttcacccaggctggagtgaggtggcatgatctcggctcactgcaacctctgtcccccaggttcaagcgattctcctgcctcagcctcccgagtagttgggattataggcacctgccaccacacctggctaatttttgtatttttagtagagacagggtttcaccactttggccaggtctcgaactcctgacctcaggtgattcacctgccttggcctcccaaagtcctaggattacaggtgtgagccaccttgcctggcttatttacacattcatttgttctttatctactttcccaaaagatttgtggctgcctatgttaaaaagcacagattatctatatcgatacctatatataaatatatctatatctacatttaaatcaaacaatttaaacaaaatattatgacaaaccaagtcataccacagcctatgctgatgggatggtgaggagctgcacgctgtgccagagaaggtaatggaggggcacagccaagctgccaggcagccggtacaacaacttcccacagcccacaatgtactcacagttttgagtttcattccagttatggaatgagactgtgaggcctcaggcagctcacctcccttctgggcctcaatttcatctgagaaatgagggagttactaggtaagaagactaaatctgtgggcttgtctagctttaacattttgtgttaaattttgtgtttaacactctagttgtggcttgagccacagactggccagagtggaattgccaggtaggaaagggtacttggaaggggtcagtcctgctgcaggagaagacaaggtgttccaaaaaggcctgctcactctttaaatggcatagtgtagtggttaaaagcctacattctgacaggtggactccctcagtttgcatcctttgttcagttaccaagtttttctttgcatctttatgtcatagggcttgtcttagtcttttcaggctgctatagcaaaataccacactactgagtggcttatatacaacagaaacttatttctccgagttctggaggctggaaagttcaagaacaaggcactggctggtttggtgtctggcaaggcctgcttcctggttcacagatggccatctgagattggagtaaacacaaaatgtttcttctctgctcttacgccacaacaatcaacacagaagacttatgtgactaaatgtttagggattttctctctaccatcaagcaagcattcaattctgtagtggatgccagctgggtgtcttattcaattcaattcaattcagttcttacactatctacctgcagggctatctactgagccctttcaagttgaaggctcagtccccaagactgtcccctacttttttttttttttttttttttttttttgaggtggagtctcgctctgtcacccaggctggagtgcaatggtgcaatctctgctcactgcaacctccacctcctgggctcaagcaattctcctgcctcagcctcctgagtagctgggattacaggcagccatcaccatgcctggctaatttttgtatttttagtagagatggggtttcaccctgttggccagggtggtttcagactcctgatcgcgagtgatccacctgccttggcctctcaaagtgctgggattacaggtgagagccactgcgcctcaggctgctttacctgtgcttctgaccaaccagatataaatcagggatctcattacccacctccttgggttctataaatttgttagagcagttcacagaactcagggaaacacttacttatgcttaatggtttattataaagaatattacaaaggatacaaataaagagatgcataaggtgaggtatgggaatgggcatagagctcccatgacattcctgggtgcaccaccctccagggacctctacgtgttcagctatctggaggctctctgaattctgtccttttgggccttttatggagacttcattggataggcttgattgacagccatgtggaaatgtgattggacaagaagagtataatctaatactaataactgagcagggatccccagcaagtcctgcctgttcaaattctttttggcctctctgtgcagtgttccttccccagggtacgaggctgaacctctttggaagcagaggtcttatgatctacaatcagacaaggtgggtcagaaaatttctttatgaccagaggtgggggaagattagagtgtatttttagtttctaaatcctgccttgaggagaaaaagaagcaggtgaaaaaacggcaggagaaaggtcagtgagagagagcttctgctttctgacacctaaagtgccccagcattataacaaaagactgtaataagggctatgggagtgataaactgggaactgtggatgaaaacacacacacacacacacacacacacacacacacatatacaatctcataatatcacaccatatttttactatgttctcacatggctgaagggggcaaatgagctctctggggtcctttttacaagagcactaatctcatttatgagggcctctaacctgacctaatcacctctccaaggccctgcctccaaatgccatcaccttgggggttgggtttcaacatatgaattttgcagtgacacaaatattcagtgtttagcaggtctatggacacaatgaatggtgttaatacttctaaaatgggattaatggtagggcggctgacgacattaatgacaattattcatggagaacactaaatgttcagaaaataggaattcctgctgctgtctttgctactgttcagcacccagaacttttcaaattagaggatatcactgcttccatgcacgctcatgcccagagagtgactctggcgaaggctttgagcaataatgtaagataagataagagcctggacccccacctctcagatgtgatacagaagtgaacagggtactcaacaagaattgctctcatttactgagcattttcggtgtgccatgagctgtgatggataccacatggcgtcttttcatacaattttgtcaacaatgctgtgaggtgagtggagatgttgaggatcggtgcaatctatccctgctggaactcaggtctgtctgactcagaagtccatgctcttaaagcaagccaaatacttgtggaatgtaaaatgctaacctctgagcacagccagtctggggactgccagagtgctctctgatgcaggaaaatacatctgaggacagggaagccgagtgaggtgcccagaaaagacaatttggaaggtgcagggtgaaaatagaatcagtctctctttctctctacacacatatacacacacataccatatttgtggcataaagctttccacttagagtcagaaaacttggattcgagtatttgttgctctttcacttacagggatgtgaactttggtaagtcatttccctagttttgccacctataaaatggaaagtcaggtatttctcaatttcttcatagagtagcacaaagcttaaatcctatagataatggatgtgaatgttctttgtaagcagtatagcagtattaatggtatttgatttttaaaatcacttatactcaatattaccaagattttggattgcctccttcccggaagacttccctcccttttcaaaaaatcatgatcatccttttagcaatgattctgtcccagaggacaaccatgtggatcagggaaagaacaaattgccttaatttagttccaaagatatttgaagagatcaatttccagagtgttgtcaaggggcgaatgtgtggacactgaattttagtgaagagtaatggctcacctctgtcaatagaggcaacaaggagcatggtgagggtgggaaagctgccagcccgtgtaatctgcagctgagagaggaggcttccattcgaaagcaaaaagagttaggtggaaaagcttagttcctgtctttttctttttggagaaatgtaattactgtgttgatgtgttgaccattcaggtttgcttgttttgtaattatttcttccttcctttttctttgtttatcctaccttaatgggataattagacctgcaggtgctcatcaaatacagtgggtgcctgggaacgcactccctggagggtgggtaaggcaggtgccaagagagggccaatgcaggggtgcaggcacagggctgagcattatagctctcagcactcgtctgacttggacactccttcctgagtgggagggtgcacttgttaaagtgtctgtttccgagatgtgtctctggagagcacagagtgagccagtgtgaggtcatctgggtctgcccctctcatccatgtggtctgaccacttagccttctgagtttcagttgcttcatctgcaaaatagtaataatgatgcctcctgctcctcaaggctgtggggagaatcgcattcacaatgtattcttttattccctcaaaaggtcttaactgagcaactactgtgttccaggcactgggaatatagccatgaaaatacaaagatctcattccctagggagctcacattctacaagtaaaatgtatagcaagtcagacagtgaggagtgctgtggagaagcatatcatgggaagcggacagggagtttcaggggaggtgggcacagttgcaattttcctttaggccaataggaaagataacatttgaacacagttctgaagtaggtgagggagcaagccaggtagatatctgagggaggaatgttcaggataggggaaacagtaaatgcaaagtgatgtgatatgtgtgaaaataccttataaatggtaaagaattgtctaagaatagctgttgttattataactcttaaatacagatagcctgataacagagatttttcatcaatatgtattactgccttgtagtgctacagaagtctttctacaagttcctatcaagtcttagcaactgagcagttcacggaactcctcggagaaaggcacaagacggtctctctagcattttcaccttcttcacagtattattcctgtagtaaccgtttcttaggccatgtttaaaagaactacaggcaattaacaagtcaactaaacttaaaaaaaaatggtcagaccagttttgcattctgtgaaccacaaagaaaaaagtagttgctgaatgttttttggtttctgctttacttttcatttggttgtgctagaatggtgaagtctgcctccctagtataaaatgtacatttctactgacatttaaaaaatggctctgagggtttcagacagaagtctctctagatgtgcaagaagtttcaattattctgtttgggaacattgtcattttttttttttttttgagatgctttttggtgtcgggaggcctcagctaagacacgtgggagagttaatgaacagaattgataatgacagataggaaaattgattgtcagacaagaaatggtaggaacataagcagggagatctgtctagggagatggaggatggggctgtcagtgatgggaaatagagatgggttgtggtaggggaaatactatagctactgacagaagacagtgccaacctgagactgggcaatggagctcaaaggcatatgaccatttaggacttaagaagagaggctaatttctcattgcattgtttctgggctacttcttacctcccaaactcaaatggattcaaggctggtaaagaatgtcaatatgatattgctaagcctggctttctctgtttagcccctggataagcttgttattccaagctccttgtcttccagccttcccatggctagcagcaaagacaattagtcttgtgatcttgcgttgctgagcttaaaagaacctcttgtccaacagtcacgttgcaatggaggatgcccaatgccttgaaacagaaagtgactttgatcaggttcctataggcatttgatggaaaattcaggactggagccaaggtccagtctccaagttaggaacttttaaaaatcatttcatgttgtttgagaagaatactccatgttaatatgtgtgatttgttgagtggccaatttgtcagtgtttactcagtaaacctacagagagatcctgttctggccagtgttcaaatgataactacacctacacctagacagttggattctgaaatatttggaaatatgagccaaggaaagttgaatggatagggcaaaaaatgcataggataaagtatgacttggaggacttgggttcacatcctgactgatgagatactggctgggggctttgggtcaggcatagaaccatggatgcatatggtcaggaaggagcttaatgaatatctaagtcaactcttcatcatttcacagtcgcctgtgccatatctctgagcggtcctctggtcctgtgatggtacaggggctcatttccaatgacggcaactccaattgttggaaaggtcattttcttgccaacctaaactcataaattcatctttaataaatttctccaatattacttctctggacctcagttttcttgttagaaaattgcaaattatattaccagtatgttctacctctctgatggggtacaagtaagattatacaataaaatacaataaaaaagaagcagtagtgatatagcaaaaagtgcactggaagtccccgctacctactgtgagactgaaaagtctctttgagcttcaactttatgctccataaaatggaaatgggaatacttgccctttttcgctggcaggatttttgtaaggatccaatagagaagataagaaaaagaggcaatacaatgtagccaaaggaatattacactggagaaagaaaaatctgccatcagcttcctacatttaatcactttacatttatgcagaaatccttcaacatttctgagcattaatttcccaacatgcaaggtagaggcatagtacttacttcttcttccttttgcaaggttgttaaaatcaaattatctatgatttgcacaccgccactctgggtgcgtgtgttaggttatggttattcctctgtgagtgtcagagagcccatgccttccctccacattccttactatgccatgctcctccagggagtcagcccttatatcagaggccactgtgacagtggcttcatgttatcaagagtgggcgatctttgctggtgtctgaaagccaaggtaagcatctcaggcaagccttgggggtgcttagggctgaatattcacttgtcttcagcagaacaaaaggcagccctccatcctggccacattcatgatggattaaaaagtgtactcatgtcacttctcctgtgggcctcagatgccatctaacttagtcatagtgaaggtgtttcatctagcactcggccaaaattcagactcaagctctccaacactcaatggattaaaaaatgtcagagctgaaagcaacctttgatcatctagtctacctctgattgtgtagatagggaatctaaagcccaaggaaattcttaccccagaataagtcacagttaatatcacaaagaggcctaggactcaaggctcctcactccaggtgcagggctctttgattcacaccatgcagttgcaattcaacaaatagtgagggcctactgtgttttagacactgggtcagactctattaagttcccaaaatgaaaaggcctattcctgcttgaaaaagctagagagtaattcaggtgatttgcatgcaaataaacaactcgagtccaactctagtctagaaaggctttatcctatacctctttatatcactatctttccaaaagttagtgttgagcaaaacgggccaaatttctaactcttaaagcttgtttcaatatctctaaaatggggacattatgtattcattcattcattgactgtcaaatatttattaatacctacataccacattattcataactagggctgtacatcatcattagaacttcaacaaaacacgcaaactcaggttccacctccaacagacatactgatttaataactccagagttagatctagaggatttgcatcatgaacaaactaactcaggtaaccatgacaagcagccaagttgagaattcatggtttaccatatatgagataccgtaccagacactaggattgtggaggtatacaaagcctacacttgctctcgaagaactcacagtctagttggaggtggggagtctggaaagatgggttaactggctatgatattgcagtctgataagtgttatgccagaagcaaacactagtgctgcagaatatagccctagggcacctaagtcatcttagagaattgggtaaggctttctggagttggttgagctgaatctttaaggatatatatgagttagctattaatacttggatgacctgggtgatgtgggtagttcagggacagagaaaaataggaagacaaaatgtcatttaatgtgttcagagaattgcaagaatgaatgggaaaggagtggcgagagacaaggctgaggaggagggtaggggtgaaccctagcaggcctttatcctctgggcaatgaggagaagccaaggatttactttaagcagaggaatgacatgattcagtttgaacttcagcagattactttggcagctgtgtggggaacaaatggggaatacattgggaaagacagagggagagagtaggttgaggtagtgatagttctgcttgttgtctacaccagactgttgggagatgctgtgagatgatgggaaatcactcgataaatagtatccctctgcagaaaagacacatgtgccattactttcattacacttcacgactttgagcggagtcagggagtcacagttaaaaaggaaagggactgaaaaggtggttggtggaagagttagaggggaggaagggagggaggcaggaagaggacagaggagtacttggtgtcaaatggtgtttaaaatattcttcttgcatcacactagctcttaattggtaccaaccactgaggggctgattgatcccagcaagagtccagcaaaacagataatttcttacaagcatctgaaattcatgaactctgtggggtcccacacaccaacgctttgttgttgctaaagtctgagacttccttgaagggataagtatccaggggtggcagggttttttattttttcttttcaaaatgcagaatatgtttatgtagttaatgcctgtggtcttgctgagcagatgaaaagacaatacagcaaagagctgggctaccaagctacttattaacgtaatggactcattaaagagctgttatggctagaaggatgtgtgccgtaaatctaattttgcattaaggccttgatatataaaagacttgcttaccacacactcagggtttgggtcaaaggaagttaccctctaatgttgcctgtcatttacaactagaacatgggttctcttcagatttcttgggcatttatttgcacagtgggaaggcagactacacttattgagaacctaactatgtgccaggtagtttgtctttgattattttcccttagaagccctatcaggataaatacttctctttctcagatttgaaaacgaaccaaaaaagactacatcatctgtccgaggtcccactagtaaatgctttggagagttatctgggcaccaagactacagagcttttgagttaaggcatggttttggctgctcattgaattacttttactgacattggcatagtacagacaaagcattttatttattggaagtgtgtagatatcgatcacaacagtatgctctttatgacgactttcaggtctcaatactgggatatacttgctgtttctggaagccagtttgtgtttgtctcctagagaaaacttgatatatcagaaagttgtggaactaatgcgcaaggccttggcaccctgttagattaaataggacattaggaaattctttgcggatgctaaccctaccctgggtttccccttattttgttattgaatgtttttctaatctatttactgtaacaacaacaatgatgacatacacaacaacaaaaaccttctccttattcttacggtgttgaacaggctgcctcatttttctcttggtgtgtttaatcttcaactcacacatgcacacacacacacacatgcctctttctgtgctgctttttttacactatgccctgggacagattgtgtgtatgtgcatttgtggtacaagtgtccttattaattccaggtagatccatggtgaaggctaacacatcctgttgaagttagttagtgactttatgacaaatatccgcctgctgttaaaaatgtgatatcatgcaacacaatctttagatgtttgttctcggtgacgtgaaagcgagtactgatttttttctcctttgtaaaccatttggttgtcatgtagactcaagccttttaaagagaataacagaaacaccctgttaatttgtcatggaaacggatgaatctggacctcacagtccattagggagacagacatgtatgcagataaattatgatcaacgtgatgcaataaggatacgattctagttatagaggactaccttatagtttacatcactttctcgtatctattagtttatttgatcctcacaatgtggtggccatgccaagaatgaaaatcctgtttcacagatggggaaatggaggaacagagaattacatgtcctgtttggcctgagtcatagttgagaattaaaccagtgcactttctctcttacatagtgctcattgcttgccgagtcagaaagagattcttttatgcttgactctaggaaagcaagcaagacactaaaaacttgataaaagaacaaacaacagaacaagttggtttaataacagatttatttcccgtgtcaagtgttctgccattttcacaatactcatcaatttcccagagcatctgagcagaaagatcatccattctggcttctgtgaaatagatttgcatcttgattctttctagacctttctcacaaagagtaggccccatttatggtggttcctcattactcggatggatgatgtgttcagctgtaaggacactgttattataaatagcaaaatggcaattaatactctcctcaactcttacgagttagaagcctcccaggaacatccatttcaggaactttcatttcaaaggaaatgccgtcaataggaaatagttatttaatttccaagcaggctgagagcttttctatttaaaagcttctacacaaatataagtggattattatattaatcatttttaataaggcagttgaggcaagaaactgccacagaataaaaacaaaccagaaaacccaccccacatcaagaaaagcacgttttaggcaaatcttaacaaatgagaccttgagttttgctgccccctgcctgtggcagatgtatttgctaggaagccctgtgcccttatttggccacccccatgtcttgtagtgcagtagagagaagaaccatgagcctggtatggcagaaattttgtgaagtttggagccagactctgagacagactctgattatcagagagtaatcctttgtgaagataatgttactaacatcattggaccagagaaaaagatgcctctttctagacaatccattttctctccatcagagtagttgctgtgagaaaaaaggttgtaaagcttttgaaagcagctagctaccttggaaggttttattcactaagcaaaaggcaaactccattttgaagttgtcagcatgggccaataatgatatttagataaactctactactggtgaattaaaaattggtgtaatagatttattgatttccagagagtttcaactgaggcagcttcaatttttatcattggatttcttcacaaactctgtgctgtcatcccaggtaaagtgatcccagcttaatcgacaattgtcttcttatagacattttatgtaggagatgctgcttatcactcacagccacactgcaaggaggacataaatctctagtaatgcatgtggaccttttcacatacttgaagggggtagatgctcacacacatcccagcccacttcctttagaacgcaaccacacactgaagaaagagctatttgaagtgtagaactgcccactatgggctattcacgaaacttgcagtgagccaaacttctcttttgcaataatttaatcaaatgcatgcaatggtttgtctttagaggacttcaaaatgatgtcagatgaacacttagggatgctggctagagggttcaactctaaggtttcctccaaccctgaggttttattataacattatcctatgctttctagctctagctctgctcttgattttggtaatctgagtaaataaattggaaagtcctttctgacttgagaattttacagctcttctgttctttgagatcagtggaaagcattatcttgccgataaattccttggagacatgtcacactcaccttggcacaattgatcatttctttcttaatagaaagtcaacattttcttcatgagaagagttattggtataatatattttctgaaatctccaggactcaagaaataaaagattctttttcatatcctttcagtataaggaaggatttcttaattatcaatataaacccaggccagaaaatggggaatatggagataataaacaaaattcaccccaattccatcatcataacccagctattaaggcttgtccaccttgtccatgacatatccatagtgtcttgaacagtgccttgcccataatagggccttagtgctatttggtaaaggaattagtgaatgaattataattttgatatattttcttttaaccctttccctcatgcatatttttcatagctatattcataacatttatgatggcttttgtaccttgctttttctttgttttatgtgccattatagaaaacatgctcactggggccatatagtcctcttaatcatcgtctctaatggctaagtaatatagcgagcactttctaacgtagctgcctaaagattcagtgtgttgcttacagaactagtgttttccttaaccctagcagtgttcacgcataggctggatactcatgtatcaagtatgagttgaactagatgcatggctttaagaccactttccagtctaagacttacaaactttgaggaccagtcattttgcaaaaactaacaggctttcacaaaacatcactatcaggaatacaagcatttccaagaaccaccccttcccactcacacatcatattccttgatacccactactaagtttgtaatgtaaatttgaaaaactatggagcgttacttccttagaaatagccactagttcagaatttcttttggattaacaagtaataaggaaattcctatgtgtcaagtacattttgagatgactaaacctcaatctctgatctcagagtattcagttagcagttattaacgctgtattagacattgagcatacaaggatgagaaaatacctctgtcctgtggaactcagaattgacaatgagaggaaggagttgaggactgagaataagaaaataaccaagagaaaataaggtaaatgctacagaagagtcatgtggaaggggctgccttgactcccaagagagctaagttaattctgcataatggagtaatatctgaggtcagaaagccaagacatgtagactaacaacatttaacaaggaagaaagagctaaatgtctcaagagaggatggaggaaagtgggaggtttttgttttttgtctgtttgtttgtttgtttttccgagaggtgtccaagagggatccaatgccacgggatatccaattacacttcgacaaggtttatgactggatgtgaggatggtaaaagggttccattatgatagaataaatccagtaaatagtgtctgtgtttagatccccaggacacagtgtttgcctttgtttaatggtttaactttttacttgttttccctttctttttttttttttttttttttttgccttttcgtagccagaggaagaatttgcagcagccagcacaccagcggctctggtgttggcttgggaatgcataagtgaaactggtccaccttcagctatgctctccttcctttggagccagaccagccaacctggaatcagcactgaaattatgcccagagcctcctccctgctgctgcatgccaggcagcccctgtcttgcctggcctaatgtacctctctgggagacagtgtgcactggcatttctgcccaatgggacattacctgcctgggcctccggtaaagagcaaatcactgttagaaaatttgaaatggttgcagaactcaggagcagatggccttctctctccactgggagggaagagacgaaccccagaggagaaagagaagttttctctttcagaatggcagaaaaatgtatcttcatagaagcagccatagatgaccatggcaggcagtgctcttggagaaggtccatggtaactgcctgtgatatagaagtggacaagggaggccacagcagaaagtggcccatacataccctggttcatgccaggccagagccctgagggtgctaacagggaccctgagcttagaggtagaaaacctcagtcctagccttctgattccagattaaataagatagtgataataaaaagtaataacagcaaacatatagagccttttttatgcactaggccctgttgtgagtgcttttacatacataaattctttattctgtttagtctttgtagcaactttatgaggtagaaacaattgcaatccccattttagagaagatctatgaaaataatgcctgtagaagaataaaagcttctttatatgaagcacagagtgttagttctagtaaacctcccagggcttttgtggggttcagatgggatcacatctgtgaagcactttaaagtgctgtccatacatgagagagtcccattgcatcatggtttctcctgcattttccttgtccatttgttgtgagcaaatggtaaatggcataaagccaatactgcaagagaaatcaatggaagagacccagcaccccgtgagtgattgcaaaggaaggaagatggagtaagtgccaggaggacagcccaaagaagctttaaaaaacacaaaagcaaaaaacccataaccttcttttctgattgagagtagggtggaggtcaggaaaaagcctctaggggagattgcttcaaaattaaacttcaaagggtcaataactctgtgctgttctgccttcttcccaataatgacctaccactgaatatcctgtgaattctttcttttttattttgtgtttttggtattttacagcattttaagaatgtgtttgaagccccaaatgaaaacaactctatcagtcctatttggtcatcacaagcagacttaagctgcacaaacttccaggggcaccattatctgtttatgaacaacaggcaatcaggccaatgaaccatgttattgtcattcctctcatgtctctcaaatcatttttcatcttgactaatcaggagataaagttgatccttctccactttccacctccatactcatttcagttccctgcagtttcacgctgggctgggctgtttgaaatctagtataaaacacccgagaagagctataattttcaaatttgcccatgggtaatgtgtgtagtaaatgtaaagtactagcaatttggttgtttgagatgcaatgattttttttttttacatcaatgtgcagggtctgaggcaggcacaagtttccagaggcaatatatatcactgctggccagacccctgggagtccatgagggtcacccaaacaagaaagggaggaggcaaagtgaggaaaccaagggccccctcaatgctgatccctgtggaagttttaacacaagacagcacgagggggtgcctacaggggaactactggctggttaccttgaggggtcctaaaggatgccttccttccctcagaggattgaccatggcctggtatctgacccccaatcatgtaggctcaggattgattttattaccgccaggagtgtgtgctcttccagggcagactcatactagccaaactcacaatgctgatgcacaaaactacagcttctcaaggaaggaccatggccacaaggcccagaccacatacatcagtatgccagagctgtctcttcacagaagaaagcctccctgggaagctaaaccttaatcaggaggctgctcgctgagaatgaattcatatcaagaggaatctcacaaggaaaatagtggcatcaggctgtccatccagcaaaggcctaggtctggactctaatgattttccctccccaagacaatgcttgcatggacactaatagttctcctctctgtgacattctttagtgatgcatttctgactagccatcccattgtccacgttggctgaggcaccaagttctggaaaatcctgtctctgtggtttgaactgcttgatgtttacatcaagcagagtgaacaactctgcttcccagactttagaagagtcatgtctctcagctttttggctgccttgcctgtgaagggaggggttgttggtggactcattgtgggatagaatttagtccagggaaggggtctaatggtcaatactttgaccctaaattttctggttgatttggctgcagattttctgggtgactgtatgacctttagtaagttaatgtctctgaaactgtgactgtatttttgtgttagcagctaggaagtggagaacaaaatctgtggctttttctggcaacagtgtaagatcatgtggcacacattaactgtgctgatctgaggatctctggctttttgtttttgtttttttttcctacaatctgctcaacaattgttttatacttttatatttttgtaagctgtctcatacaagcctcattccctaaacagaattgagagctcaaaaatctcaatgtgcatgctggcaatgaatttctatatataaaagagaaatagctgcaaatttcttgggacacttgagaaagaaaatgtaattttgtgaagctatttgaactcctcagatagaaaatgctattttatagtcctatgtgagtgcaattgccttatctatgagatttggctgaacttcttgcatatgagggagaaaaatggtgaagatggaatgggagtggggaggactttatgcacaagaaggactttgtgcacattgggaggactttattgatgggggcaaacttcatgtgtatctcctgggtacaaggggagtgtaaggaggggcaagagagttagaagtctcagagagtctccgattgaaaatgaaggaattcagggaggagctttctaggaaccttatttcttatcattggaaatgtgaagctccttgcttcatggggtttacagactggttgcttccctgtgttgggaccatggagatacctggcccaaattcactgcaaaaatgaagaaactaaggtcaaaagacaggatgtaactcgctcaaaatcaccaacatttagcagccaaactcgggtagaatctgggctggggggtcttacagcacagctcattttctccaggctcatgcctgacacttctcctacctatttccagtttactctctgtttaattctgcactatgaatgtaccattgtccttccctcctctcaatcccagattggagacagaaagatgtcttcaaggaatactttacaacagactagctttatgtatttcatttagggaataacttcagtggcaagtaagatttaaaaaatggcatagataacatatagaaatctgtttttctatcaagcaatgaaagactcagaggtggacaatctattgctggcacatcacccatacatgtcgatggtgatcctaggaactcctatgcagctcagccgtcctttgtgtttatgtgacctacgatggtctcaggatgcctgcaggagcaccagccatattattattctaattaagaagcatagagaaggggttctgagcgatcatcatgacagatgggaggcagaactagattgcagctttgactcaaatggacagagcagggtgtgaaggctcatatcatgaattttagctccagaatgactgcaagaacaaaccaggaatcctgagaggacccacagaccctctgaaggaagccgactgcttgtgcaggacctgggagacatcccaaatactgtgaatgcctcaactgcaaaagtgggaaagggagaacctccatccctgaacatacacctccactggggaaaatgaaagtctagtttgcaggagaagtttcctaccttagctggagctgagtcaatttagagagctgagtgaaatgcagaggtagaggaagcagtgggaaaggtcctgggagcttgctgcatccccaaacaggccattcctgcctggcaccacagagatcctttgggagggtggccagaggcatggggggaaatgccacagggagaagaaagtctccagctgaatttgtaacaatttgaaccgggcaagaagcctcctggccagaactccagggagggtgcaaatccagtgtgcagactccacaggctggggaagagccaaagtcctgttctttcgaagctgggaggcgggtagcctggggcaagttcttagccctgcttgcccactgcctggaaacagactcagtgctgtttgctgggggcatggtgggagtgagaccagcccttcagattgtgtgggagctgggagagggctgtgactactggctttcctccacttccttgacaacctgcatgattcagcagaggcagccataatcctcctaggtacgcaactccagtgatctgggaatctcacctcaatcccccacagcagccacagaaagacctgcctaaggagagtctcagctcagacatgcctatcattgcccccacctgatgagccttcgctgtccaccctggtagctgaagacaaagggcatatactcttgggagttctagggccacatccaccaccagttcctctccataataccacagctaatgctctctggaaagcaccacctcctggcaggaggccaaccagcataaaaataaaatattaaaccaccaaagctaaggaccctcacagagtccatttcatccccctgccacctgcaccagaacaggtgctggtatccatggctgagagacccatagacagttcacatcacaggactctgtgcagacaagccccagtaccagcctggagccaggtagacttgctgggtggctagacccagaagagagataacaatcactgcagctcggctcacaggaagccacatctataggaaaagaaggagagtactacatcaagggagcaccccatgggacaaaagaatctgaacaatagccttcagccctagactttccctctgacagatcctacccaaatgagaaggaaacagaaaaccaactctggtaatatgaccaaagaaggctctttaacacccctcaaaaaccataccagctcatcagcaattgatccaaaccaagaagaaatccctgatttacctgaaaaagaattcaggaggttagttattaagctaatcagggaggcaccaaagaaaggtaaagcccaatgcaaggaaataaaaaaaagacaatataagtagtgaagggagaaatattccaggaaatagcataaagaaaaaaaatcaaaacttcaggaaatattggacacacttatagaaatgcaaaatgttttggaaagtctcagcaatagaatcgaacaagtagaagaaagaaattcagagctcaaagacaaggtcttggaattaacccaatccaataagacaaagaaaaaagaataagaaaatatgaacaaagcctccaagaggtctgggattatgttaaaccactaaacctaaaaataattggtgatcctgaggaagaagagaaatctaaaagtttggaaaacatatttgggggaataatcgaggaaaacttccccagccttgctagagacctagacatccaaatactagaagatcaaagaacacctgggaaattcatccccaaaagatcattgcctaggcacattgtcatcaggttatctaaagttaagacaaaggaaagaatcttaaaaattgtgagacaaaagcaccagataacctataaagaaaacctatcagattaacagcagatttctcagcagaaaccctacaagctaggaaggataggcgccctatcttcagcctcctcagacaaaaccattatcagccaagaagtttgtatccagcgaaactaagcatcatatatgaaggaaagatacagtctttttcagacaaacagatgctgacagaatttgccactaccaagccaccactacaagaactgctaaaagagctctaactcttgaaacaaatcctggaaacacatcaaaacaaaacctcttaaagcataaatcatacaggacctataaaacaaaagcacaatttaaaaagcaaaaacaagaaacaaaataaaccaaggtacacagacaacaaatagcatgatgaatacaatggtatctcacatctcaatgctaacattgagtgtaaatggcctaaatgctccacttaaaacatacagaactgcagaatggataagaactcaccaaccaactatctgctgccttcaggagcctaacctaacatatagggattcacataaacttaaagtaaaggggtggaaaaaggcacttcatgcaaatggacaccaaaagcgagcagaggcagttattcttacatcagacaaaacaaacttggaagcaacagcagttaaaagagacaaagagggacattatgtaatggtaaaaggccttgtccaacaggaaaatatcacaatcctaaacataaatgcacctaacactggagctcccaaatttataaaacaattactaatagacctaaaaactgagatagacagcaacacaataatagtgggggacttcagtactccactgacagcactagacaggtcatcaagagagaaagtcaacaaaggaacaatggatttaagctataccttggaacaaacggacttaacagatatatacagaacatttcatccaacaaccacagaatgtacattctattcaagagtgcatggaactttctccaagataaatcgtatgatatttatgatatctatatgataagccataatatgatagatagaccatatgataagccataaaatgagcctcaataaatttaagaaaattgaaactatattgagcactctttcagaccacagtggaataaaactggaaatcagctccaaagggaagcttcaaaaccatgcaagaacaacctatcaaaagctctgggatacagcaaaggcagtgctaagaggaaagttcatagccctaaatacctacatcaaaaagactgaaagagcacaaacttgacaatccaaggtcacacctcaaggaactagataaacaagaataaaccaaacccaaacccagcagaagaaagaaaataacctgagaagaactaaatgaaattgaaacaaacaaacaaaacataatacaaaaaataaatgaaacataaagctggttctttgaaaagataaataaaatagaccattatcaagattaatcaagaaaagaaagaaaattcaaataacctcattaagaaatgaaatgagagatattacaactgacaccactgaaatacaaaagatcattgaaggctactatgaacacctttacacaaataaactggaaaacctaaaagagaaggataaattcctggaaaaatacaatcctcctagcttaaatcaggaagaattagatactctgaacagaccaataacaagcagcaagattgaaatggtaatttaaaaattaccaacaaaaaaagtccagaactggatggattcacaacagaattctaccagacattcaaagaagaattggtaccaatccttttgtcactattccacaaggtagagaaagagggaaccctccctaattaattcgatgaagccagcatcacgctaataccaaaaccaggaaaggacataaccaaaaaagaaaactacagactgatatccctgatgaacatagatgctaaaatccttaacaaagtactagctaatcgaatccaacaacacatcaaaaagacaatccaccatgatcaagtgggtttcataccagagatgcagggaaggtttaacaaatgcaagtcaataaatgagatacaccacataaacagaattaaaaacaaaaatcacatgatcatctcaatagatacggaaaaagcatttgacaaaatccaacatcctttatgattaaaactctcagcaaaattggcatataagggacatatcttaatgtaataaaagccatctatgacaatcccaaagccaacataatactgaatgcggaaaagttgaaagcattccctctgagaactggaacaggacaaggaagcccactctcactactcctcttcaacatagtactggaagtcctagccagagcaatcagacaagagaaagaaataaagggcatccaaattggtaaaaaggaagccaaactgtcactgtttgctgaaaatatgctcgtttatatgctgaaaatatggcattttcagtgacctggatgagactggagactattattctaagtgaagtaactcaagattggcaaaccaaacattgtacgctgtcactgatatgtggaagctaagctatgaggatgcaaaggcataagaatgatacaatggacaatggattttggggacttggggggaaggatgcaagggggagcagggataaaagactacaaataggatgcagtgtatactgctcaggtgatgggtgtaccaaaatctcacaaatcaccactaaagaacttagtcatgtaaccaaataccacctgtaccccaacaatgaatggaatttttttaaagaagcatagagaagggtaagaaacacagtaacatgtgcaatcttattcagactcctttaaagagcttcttagaaccagctccctacaagtgactatgttacatgtctacttcaatcataagggaggctgggaagtatagtttttagctgagtattttattgactgaataaaattggagtctattctaaggaagagagtagggtggatattaagcagagaactttcattctctgccacttttatgaccacgggtaaattaattaaccttttaaagtttactcatctataaagtggaaattaaataaggtcgaatatgaaaagtacttagcaaagtatctagcacggaggaaatgctaaaaaatgtagactatccagaatatagaacagtattagcttttttataagacataaaaaatttcccactgtcattaaggtagaagtgagaactatttttggaaggaggaaagaagttataaaatttggaaggcagatattttatttccttttctagccagcacgttgggtgatgaattttctgaggtgttctggaagcttttgttcttcaggggacctgtgtcacatttaggagaattacaaaagcaaaggtggtcctctgctcagccatcacctcttcccagaagatgtctctgaaccatcaggctgggctaaatgcacctctaggaaattctctctttacatgtctgcctctccctggttatgagctattgagaataagcactgtgtcttagtcaccgtcatcttccaagagcccagcgcagtactaggagcatggtagaaagtcaataaatgcatattacattgggagtagcggctttgggctaactcctttaatatcttccttggccagatgcagagaaaacttaaagctttcattcctaaaatgcttctctgttggagaagtcttctgaaaaatgagacaggcattcaagtttctccgtgctacactccatcagggaatgtgcaaagccccaaaaagccttcaagttataactgaaaattacaaagatgaaaagatgggcatgatactgatatttttgggatcatggccctggtaagtgtccctgggagttagtattgtacaggggattcacactgaacctagaaacagttcttgggtctaaattttgattctgctacttggttactaggataacggaggagaccaagttaatatttcatctttgtggggggcagctaaaaactctcatggatgggaagagctttgcactgaatgtgaaggaccaccatggctgtgactggtggtactcatgaaaccattactggcctctaatattcaccttactgaatgtattagtttgctagggctgctgtaacaaagtaccacaaacttagtggcttgaacaacagaaatgtattgtctcacaattctggaggctggaagtcggaaatccagacatcggcagagttggatccttctgagggctgtaaaagagaatctggtccatgcctctcccccgtcttttggtggcttgctggcaacctttgttgttccttggctcatagaaacatcacccttatctctgctttcatcttcacatggcgttttccctgcacatgtctgtttccatcttcaaatttcccctttctataaagacaccagtcatattggattagggtgcactctaaggacctaattttaacttgattgtcttcgtgaagggtctccctccaattagcattacattctaaggttctgggagttaggatttcaacatacaattttgggggacataatttaactcataacactggggattgtgaaaggtcaataaatgaataaataggttattcttgatctgaagatgaaactctgaactttaactccatttagttcctggtgaatgtggaggctacagccaccttttctaattcaaatttcagtacttgctaactctgtcctgtttaacttcttgagtgtcagttttctcatcaataaaatgagaatcttaaaaacattctgctaagtttgttgagattatcacatgtgatggcatatgataaatgaccactccctttcttcacagcactgtgagataaagttgagagaccagaaaaggagtggtggtgggcgctaggcttcataaagcagtgatgttactttttctaactatattgtttttgtgaagagctatttgagtttgacgctttggaaacggaaagcaagcagtcagaaagctttttgagctgacaagagacaagctctttgataatccatcatcttaaattacctaccctggatcatgtcctgctatttttgccgatgatatcaccaataatgacttctattaactttcaatgtgccttttttataaagagatgattcgtaaataaaaatatcctcccagactctgttgatgaccttgaaaactatgagatttgatttatcattccaatactttgcacttttacaatacatgatcaaaatacgccgaaaaaggaagcttgaataagtgacctcgttgtgatgaagtggaagatgactctgaaataatataattcaatctccgcatttttcagatgaggaaactgaggaacagatgaggagactttcctgaggttgcccagcaggcggaacctggacttgaaccagggagtcccacctcccagtctttacaagttcctttactttgtgctctgggctaattaatgttttaggcagggccatttttgcttcctgggtctcagttcccacttgtaagagggaccggagcaagattctgttctggcattgcttcacagagccacaatcaggcaactcccacatgtccatcctgctcctcaaagcagcaggtcctccctcctctcctgctcagcccaccaccctcgtgtctgagccctgtggcagcacaagaaggcagaacctgacccagcttatagtggtgaccttcaacttcatccagaaatcagtggctctgaaggagtgttccctgtgataaataacaacacacaaaactaaaccatgttagtgaaaatggctattgtgcagtggagtgtgtaaacgctcttcagactgtggcaaattggaatcccgcccatcttgctagtgaagtaaccttggtcaagttagattaaatcaaactaagccaagttactcaattgtttcattagtactgacaataaaaatacctaaggtagaaggttgttgtgagtattaaatgagataacataggtaaagcacctacagaagacctggcacatggaaaacacattagtaaaggtattttacaagagaaaatcgaagtgatccagtggttcttagcctgttctagatgtgctggaagcgatctcccccacaatacacttacatgtgcaaacgtacaaacaatctggggaggggggtgttataatattcctgagacccatatggagaccttatgggccatgatttctgcttaagaactcctgaagaaaactctgtaaggctgtgctttattagttattcagtgacatttcttaagtttgcctgacaactagagaagcactatctagatgttccataaatcaactgaatcataatgttgtacgaataatactctttggcaagggcccgaaatagagtaagagtaggaactttgacgggagaaataaaaagtcccaaatttcacattaactgagaatccagttagcagttatccaaaaataagaaataaagtgcctcattatgattctacaaaattagaaaaagccaaatgtgagatgttaacagtttttagagtctgaatcccagagatgtcaaagtgatctcttggactcctggccgtgctgaccatgaccctgacagtgactatgaccatggccctccatttgcatgggatgtgcctgcccagggctgcccaagccccactgctaatagaagtgctaggttgttttgttccccaagatgccctttgtggaattagcaagaatccatttaactagttggctcatttgtttgttttcaagaatctgtaaccaactcttttctgaagagactgtgctccacttacacactccttgttgatagcacagacatttactaagaccccctatgtgcagaactatgtggtgagctgtgttttgagggatgcaaagagaaacggtcctttatgtttgtttttagtgtaaactgaattttctggtttacactctttctgttgcatgctcctcctggctacactttcactccaattattttatttgcaacactcagaaagattgtgagaaatgtctgatggtgctttttattcctactttacagataagcctgaatgcacgttactctgggccatagtaaaaagaaagtttatgtacccttatttcaaatgcaaccactttccactgtacagaattgccctccacttgcttggtttaatatgacacagacatgtatgcacaactgactgtaatggaaggcagcacagaggaaccatgagagttcagagatcaaaagagatccctttccatggtccgaggggagggatcggaggagactttggggaggtgagcttgttggcctttccctattgacatctccaatagagattggaggagaagtgactgagcaatctctttacttcttcctatgtcaagaagacttgcagctgatctacatctatgtatagctgtagctgattcatatcttgtatagcacatgcatggttagttttctgcatgcacacacatatatgtttcttttcctgctgagccaatcatttctatttaagtacccatcactgtatccatattagttcctgggccatacaaaagaaccacaaacttattctcttacagttctggagaccagaagtctgacattaggtgtcagctgagtttgttcctctggaggctctgaggatgaattagcctcctttcctctttcctggcttctggtgtttgtggtaatccctgacatccttgggttgtaattgcaccactccaatctctgtatccatcttcacattgcatttctctctgggtctgtgtgtctcaaatctcttataaagccaccaatcattagatttatggcctactctaaatctaggataatctcgtcctgagattcttaactcaattttatccacaaagatcctacgttcaaataaggtcactttgggaggtgctgaagcttaggactcagacatatctttttggatgacactgtttaacccgctgcaatgtccagacgggacttagcttcccatctttggttagagatgatttatgctttctaatgaacatttatattatttgtagcagtaacactatgaaagagatactcatttcaaagagagtgacattccatgtaaaagaagggaaaaaatctcttagttgaataaacgaggagaggtaaatgaataacacaccacaaatgatttacctgcagctgcaatttaaaggatatttctgtggattcatccctcaagtataaagtgctctgaacctctagaagagtggcttgactgtaagtgtctagatactacttattatgcaaaaatccaggattgctctcatatcaagtgcctggacttatttttcttaagaagtgttagataaaatattttttgttacactgtgaaaatcaatgtgtatttcagacagtgtgttctttcaagcctctatttgccaaaaagaacagggcacttgaattacactgggtcacagagatctcgtgtaagtgggttgtgtacaatgaggaagacaggtgactaggatatgagctcattttggcattgtggaatgctagagatttagacaatcagggtttgattggaaacctttcgcgttaatgtacagtcactatagatgtttaccttgacttgagttatcaaaggaaaaacatgaatgtagctaaattgtcttcagtggttcatatatttaggttgacgcattattgcttattttatgcccagcatgaaacaggaaaggaaactcaacaatatttagattgggattatggtttcaattttttaaaggataaaaatggtgcagaagtcttttgggggaaataatgactatttatgataaataaaaaattttgctcttcttttttttaaaaaaaaatatctgttccctggaagccaggtttattaaatgatttagcctcttagttttcaacctcaaatcaccacatgacttgtggtgacctcagaaagtatacatggcaagcctaatgctttgtgaaggttttctttagtgcaaaccacttttggacaacagtttatcccttcacctgaggacaatagattaaaaagtaagaagctgccatgacacttcaccaaacatcttctgccctttctttaaaggatgttgaaggtgactaatggggtctgacatgtttttgttatgtatgaaatatcaaaatggcaaatcctaatgtttgcttcatccgaggacactttcataccttatgctttaccttgtcagcttgaattgatatcaagctgggacaggtcatgactgttcctttgattctctgtcatagctaaaaatgctcagatcagctgcttaaatgtgtggtaaaatgtgtgagaccatgtggtgtagtgaagaggacactggagcagctgccaaaaacctgggttccagtcttgactttactagctctgcaaaccttgaaaaaccaatagaaatcagtagatatttattgagcacttaacatgtgccagttcttgtgcaatagaagagcagagagacaactaagacatggatcccgcagaatggtaaaatgttgaggtacactcataaatataactttaatatgagggatagaggtttatgccacaaataggactagattaaaagctatagcaagccaaggagggagcaatttcttaggtttgggaagatcaaggaagatttcataaaagaggctgatccatgagctgaggctagaaggtggggtaggatttgagcttgtggtaatgggcgttgtgggtgggaaagacagtgcagacaaagtaaaccatgtgatcaagctcagggagatagtaaagtgcacagcactgtggagactgatgagacacctgttaattgcacgtgcaggggtgtaagggggtagtgcagtgggctgagaaagccaaagctacaaaaatattgaagctaagttctctgttgagattgatctattagaagaagaagaaagagaagacaaaacaaagaagaaaggaaaaggatggatggaggaaaagaaggaaggaaggaaggaaggaaggaaggaaggaaggaaggaaggaaggaaggaaggaaggaaggaaaagaaagaaaagctaagcctggggaatacctatgttactgttcagcacctctgcttggtcaaggagcaagtggaaaaaatgccctttgagaggaccatgtcctgtcacagaaacagtctgattcaaaggcctggttggtcaaaggggccccgaatttctgcccagatcactttgacaggcttcatgagagacaacaaaacatgtttgcttgtgtaaatccatccaaagtttgtgtaggctcttccctgtactatggcagacaaactaagcataaaaatggtattaagaacattgttctaacactttgtggtttatgaactcttgtaaatacaatgcttatgaaagcaggcaatgatataccattttatggtataatatctttgcctgctttcataagcaatgtatttactgcatacaagggctcataaaccacaaaaagaagaaagagggagagaaggatattaaactcaggtctctttttgagatcaggtgttggtaggatggtacaattgtgcaaaaaccccaaattttgatagtggcagtgtttcaaagttgggacaatgttggcgaccttacaaaaatgatttaactgaattcttgaagagaatattaatttgagttttatggtcagcactgtaaagcatccttaggaagttatttactttctttctcatggataataatatttcatttttaaaataaaggagacaaacctgattttaaaaagtcttccctttcttttctttgtatgattttaagtatatgccagtatatagtcaaaccatcatccagatttgtatctgcatgttattagatattcaaatagaataaattttcctttgtttaaatatatagttaatgcatgcatagaatttaaaatattcaaacagtacaaaagaacaaaaattaaatgtaaaataatcctctacttcatcatcaacccctcttacccaagacagccagtgtcagtattctttcttgttaattttactagcaattattgttataactttgtataatatatgtggattcctactttttgatttctcaactctcaagagaagctattatttcctggagagaagctattatatgagagctgagaagtttacttatttatattgctatctactttttatttccccctcacctctgaaattttgttagcttgatcattatttttggatcttttactggttgtcttcacaaatttaagtaatataactaaggtctatttcatgatttagcacctttagacagttacaaaacagtataaggaaaatgacactaatgcagccttctacccacaaatttttctttcctctgtaattatttttatacgatctaaatttgttacatctgcattatcttctgtcattgtaaatacattttatgtgattatatactacacggattattttgaaaagaaaagtaatatccagaattaacaatataatgattatgtaaataatattcaatgcagaactagaaagtgtagataaagtcatagagaagaaacagttctatgccactcacatttcaggtaaaggagaccctctaaatgtcctatctagtggattctctcttacctgattccaagtctcccttacgcaccagccattctcggccgctgcctcttcttgtatcccatttcatcttctttctcaaattttggttctattttggtagaagaccacatctcaagtagtatattttcaattagtgtaagggcagtaaacttcttgagtttttgcacatccaaaactgtctgaactgatggtttgactgagtatagaattctatgttcaaatcccattccctctgaaatttgaagttttcattgtcttctaatacccaaaagatgctgacaagaagtctgatattactctaagttttgttcctatgttagggaccacctccccatcaccctgacgtctacatagccccccgtccttggagtttccaacttctaccgtgatgtgtctatttgtcctttctcactggtccttctcggcatttagcacctgtgggagtcaagttgatgatagtgagaggaaatgtggtctattggactgaacaaaggattttgagtcagacgatttgagttcaagtcttgattttgccacttctttttgtctgtctgtgaaaccttgcaaagtactttatcttcacttagaaacattttttttttctaccaggacaaaatagtaatcacccctgctctttcctcccatggcccacttatgttgcaaggttattgttattgtaaactattgggagtaaaatggttttacaaattctagagttgtgtattagggtcaatattgttgcaatgaatgtgaacacaatgaaaagtgttcattggtgttatagaaatattggggtcttatttttcctgcatttattgtttgtcgctgcctagatgcctggattctggatattacggtgaggtcgtaacttggcaatcttgcaaggcaagcttgctacttagtagacttggcccctggacacctgccaggcagctatgtagagcatctctctcactcagcaaatctcgaggtaaggcacatgggtccactcagcatgaggcctgagtgattactgatctgtctctttatccttcttagaataactccccactgcctaggaaatagaaattgcacacatactgacatactgtatagctccaaaattcagccagtcacaaaaggggtaagaagaaataatctaaatgaccatttgaggcataagcatgaacgcttccaggaactgcaaaatttagctttctgaagtatacttttcatctttcatatattctgggaaatatcaaacaatgatgtaagctggaggaggagagagtaaattagaatcacaaatcattagattaggaaagaatcttccaattaaccaagatccctgttttacaactaaggaaactgagactgtgtctggtttacacacgcacacacagggacttgcccaaggtcatatgagctagctggaagtaaattctaggtcccttaaccccatttcacagttcttttacccaaagagtccattctgccaatagtcttttgaactttccaataggttgctttttaaacggagagcagagagagtccctgcaacagagtgatctggaggctgttctcaaggcaggtagtggcagtacctcagagcaattcctgctgcagaccccgtgtggatgctacaagcattgaccacaggcttctctccacagtcatgggaggcaggaattactgcttctaccttaaagattcaaggaactttcagggaggcaagcaaggtcacacaatctgtaaaatttgtttttgttaaatggcagaggcagaacttgtacccaaatttgattttaatcatgggactggttctcacaattgagttgaaaagatagtctaggaaatctagtaccctaaatacttcattctgcctcacaatttttcagcacatgctgtgataaataaaggcacaggaaccagttttaagatagccagtcctgggcacaatttaaaggaattttaatgggcttaactttactggatcttggttttagtttcctttgtctggcatatggattcctttcatatggtctttttggcatactcatggggctcggtagatttaaaattccttgagaaagagatgagctgtgctttgccttggtgagagcactgcttcaacagtgcattcagccctgggtaccactcatggtgaagataaagtgtgtccaggaggagaggggcctgggaacaaaacatgagacaagccatggaaggcaatggacatgttcagcttagtgacctcagtcaaaagaaagctcgcggagcacttactagctgtgttcaaattcctggaggaccatggagtgaagatgagattagactcgcatcatgcaccttcaagaggctgcataaccaacagatgaaaattatagagaacaacattttagctgacaatcagaatgattttctaacagctgagctctctgaagatgacatgagctgccattacatgagctcagttctgagaggcagtgtgaactgtccttggcagaggagttgtggttgagttattgagacagccaagtgtaaagggatccctggagaacctctgacctgcctgcacactgggaggactgtgcatttgggtggagcctcgggaagctcatgccggttgcagtaggcaggagcctggcccctcctcttcctgggtggaagctgggattcaatctgatgtgagagcatgtttacaggaacctatctcgtgttgctgagtttttttccttttcgcccaataaattccatttttctcacccttcaaagagtctgcgagcctaatatttcatggtcatgtggcaaggacccaatttttagctaaactaaggagaaagtcttacaacattatgatggaaattaagctggagccatcagaaagtctgtccagcacagagaatgatggtattccttcgtttaagagttcaaaatctctgcagctcaaaaatcacctatctagcataactaaacacacacacacacgttattttatcttcctgattacaatcatgacaacctaaattgattgagcatttactatatgccacagaagtttagctcctcatatgctttattaaatttaatccttctcactgtcctattgaaagtttatattattatgtatttcatagataattatgaatattataaattaagtaaccaataatattcagatattactaaacatcataggcatgtagtgagggagccaggatttcaatccaagtgtgtttaataccgggatcctaaatactctgcttttctgcctcttttcttcatgaagcttagtacattggaaatgccaaaaataacctggtttgcgcccagaataactcaatgagaattggaggggtgctgaagataaactaaaataatattatgatttctctgtcatgaataagagacagctatgctccattttgcccaaggaagtaaaattatcttattaatgagagaagcagaaattcacagccccagaggaggaaaccttcccagtttttgtggttctccatcagttttagatggagggggcttctagatgtcaacctaatttatggctgcgtccttgaagttcttgtgcaggagttgaggttggggaagagagtagggaaaagagggtcaagtctgctctcccgaggaagaacttgtttaacttcagaacctttgggagtttgaataattaaaggtgtgtgtgtgagtgtgttgtttcctgtggaagattttctggccatgacttccggtcatcacagctgctttagcacatgctcaaggaggagtcacttcaagtctgattcaattttaaaatactaaaagagaaaagagaaaacagaaaagctctcctgcaactcctcaagacaataagaaaaacaaacacagaattccctatgtcagaaaaggagctctagaggctcttttatcagtttgatgtttgcagccaccctgagatgatgttgcaaactttggatttttcaaacaattgatgatttgcattccaagagaagcttttcattttctctacttttctaaaggtcatgttatacaagggattcttgaagctgcttgagtcatttgattccacagagactcaggagcactgtggaaatagcctcaactaaggaatctggatatcttcaaaagttttcaaagcagggccctggaaagcatgagagttttaaatgttgccttaaaactagtctggatttcccttaaaaatactggaaaatattgaaaaatatttcctcctagcactttggaaggccaaggcaggaggatcacgtgagcccaatagttcaagaccagcctggcaacatagtgagatcctatctctattaaaaacaattttgaattgattacagacatgcccttgtcccaaggacaaaggagcacaggagaggcatccacagcaagagatgccaacatattttgaaaagtctgaaagtggggtaaagaccatgccaacacaaggaccccaaaagtggggtgctatgagaagtgagctgatgtgacccacagaacccttacgaatctcagctgtggcagaaagagcagggagagggtgctgggagcaaaagcagggagattagctggaagcctgaaaaagaatcgtgagcactccggttccctttcttactacagactactagggagttagccgtgcctcacaacactggagacctgaggcttgctctcttggaaaacagaatcatttcattcctgagttggggcaccacacatagtgcaaggctgatgtctaatatatggcctaaaacacggggaaggggaagggaaagatttgcatactgaaccaaggaagtctcatttcactttctaaccgcatcccacccgccccctgcccctccccctgggccttggtagctggagctctggccacagggcagaatgtgtttttctatggggaaaccaaaggaattcatttaaaaagacttgtagattttatataaagtgccaaacaaaagctaaccagatgcctgagaactccacagaaaagatagagagtcggcatgtcccatccacagtcacaaagaagtatgaacgtatgaatgggttgccaaggataccaggcatctgaaaagccttcaaacatgagtgtaaaagagatgattacaacaaacaaacaataataataatgaattcagaggacacagagacaatgcagggcagaagaaaattaaaatataataacttacaattaacatccccggagagataagagctgaaacaagaataggaagcataaaaaccagaaggaggccttggaattaaaaaaaaaaaaaaatcatttctgaaataaaatcccaatagaagaagatgaaatcaaaagaatctatcagaaatagaataagaagatagagatgtaaaagatattggcgattccagaaagtgaacagaaaaaaaggaaggagaggatatgatgaaggatataattccagaactgaaagcttaagttttcagattgaaaagcaccactgagtgttcagctcagcaaatttaaaaagactctcactaatacacagcattatggaatttgttgatttttttttttttagatggagtttttgttcttgttgtccaggctggagtgcagtggcatgacctcagctcactgcaacctccacctcccgggttcaagaaattatcctgcctcagcctctcaagtagttgggattataggcgtgtgctaccacacctggctaatttttgtattttcagtagagacagggattcaccatgttggtcaggctggtctcgaactcctgacctcaggtgatctacctgcctcggcctcccaaaggaggtctcccaagagccaaacagaagaattttattgagttgaacctgatcttgtgatatttttacttcatctgaaacctaatgttacttactagttaatagcagtaacagatagaccctaataagggtaatggctcaaatacaacagagaatggtttctcactcaggtaacagtatcagtgggtaaaaacatcagcatgatggtttattctatgctgtcattcttagaccctcaactgatggaagatctgccatcttgaacatagggctcccaagattgtcctgggtaccacctccattcctgctagtcagacatgaaaaagaaaatgctaaagcacaacatgaaagggtttatatgggccaggtctggaagtggcacacattatttgcctcaatattccactgactagaactcctgaaaatggccacaatgaactataagcttgaggtaaggagagtggaaaaggattgagaaatgtagtgcctggttgggtaggcagtttctgacctaatcctacactaaggaagagggatcatgtttgaaatggacagctagccatctttctcaagtggatattttgttgctatttttggatttgagtcaaagtaaaatagaatgctctcaattgatgttcgtattacttaaataggatttcctttaactattttaattttttctttttttcctttttttcttttctttcttttttttttttttttttttttgaggtggagtcttgctctgtcgcccaggctggagtgcagtggcgctatctcggcttaccacaagctctgcctcctgggttcacgccattctcctgcctcagcctcccgagtagctgggactacaagcgcctaccaccatgcctggctaattttttgtatttttagtagagacagggtttcactgtgttagccaggatggtctggatctcctgacctcatgatccacccacctcggcctcccaaagttaatatattctattcttgatatggtttggctctgtgtccgcaccctaacctcatcttgaattgtaatccctgtaatccccaggtgttgagggcaggacctggtgggaggtgattggatcatgggggcagtttcccccatgccattcttgtgatagtgagtgagttctcatgagatctgatggatttataagtgtttgacacacgcattctctctctcacctgctgccatgtaagtcatgcctgctttgctttccaccgtcattgtaagttccctgagacctccccagtcatgcagaactgtgagtcgagtaaacttctttcttttataaattacccagtctcggtggtattctttataacagtgtgagaacaaactaatacaattgtaataagcaaagaatgactattctgcatatccagccaatttttacctctaaaacaatagtatccatcaatttttaaaaaaatcaatagcttagtcaaaaaacaatatgttcatctacaaccgtctgacctttgacaaacctgacaaaaacaagcaaagatcaaatgattccttgtttaataaatggtgctgggagaactgactagccatatgcagaaaactgaaactggaccccttccttacaccttatacaaaaattaactcaaggtggattaaagacttaaatgtaaaatcaaaaccataaaaaccctagaagaaaacctaggcaataccattcaggacataggtatgggcaaagatttcatgacaaaaatgccaaaagcacttgcaacaaaaactaacattgacaaattggaattaaactaaagagcttctgcacagtcaatgaaactatcatcagagtgaacaggcaacctacagaatgggagaaaatttctgcaatctaaccatctgacaaaggtccaatatccagaatctacaaggaacttaaacaaatttacaagaatgaaacaaaaaaccccatcaaaaagtgggcaaaggacatgaacagacacttctcaaaagaagacatctatgctaccaagaaacatatgaaaaaaagttcaacatcacagaaatacctcaggtctccagtgttgtgaggcacgactaactccctagtagtctgtagtaagaaagggaactggagtacccgtgattctttttcagaaataccatttgacccaacaatcccattactgggtatatacccaaaggagtataaatcattctactacaaagacacatgtacacctatgtttattgcagcactatttacaatagcaaagacatggaaccaacccaaatgcccatcaatgatatactggataaagaaaatgtggtacatacacaccatggaatactatgtagccataaaaaggaacaagatcatgccctttgcagggacatggatgaagctggaagccattatcctcagcaaactaatacaggaacagaaaaccaaacactgcatgttctcactcataagtgggagttgaacaatgagaccacatggacacagggaagggaacaacacacaccagggcctgtcagaaggtgggggatgaggagagggaaagcatcaagacaaatacctaatgcatgcggggcttaaaacctaggtgacgggttgatagatgcaacaaaccaccatggcacatgtgtgcctatgtaacaaacctgcacattctgcacatgcatcccagaacttaaagtataaacaaaaacactgtgttaaaccttataccaggttttggggatataccaatgagcaggacaggcaagtcttctgcttgcgtggtcctcagattccaacaaggacagactggggatagacaataaacagatttttaaaatcaagtagcgctaagtggtaaaagtaaaataagacaaggtagtgagaaatggaatggctggctgctatttagaatgtgaagttagacacgtgccctttgaggaagtggcatttaaactgagacctcagtgactaaaggcgggcagccgttttgggatcttgggtaagaacttttcaggttcagggattggctcatgcaaatgcccttacatagtaatgggcttgactgtgagacagagacaaggcaagtgtggttaaaaagttgtgagaggagggtgtgatggggttgagagcagacatggtgtcagggaattagataacacagtatcttgaaggccatgataaggagttttacttttatttcacatgcaatgggaagcagttggaggtttgaagcaggagagtgactctcctttcagttgttgttgttgttgttaactctactctgcttgttatgacaagagtggatggaagagggccaggagaggcagggatggtacttaggaggcctttgttatgatccaacatagggtaatagcaagtttggaatatggaggtagtagcagagatgaatgaaggatgaaactgatgagtattttggagcttctgtggtccaaatttctgaaggatttgttgtggagggagtgaaaaagtacagatttctaactgcctcttatgtgggatgcatttgccaactttcattattttactgaatccaagatacctctagaagaagtttcttatggtctaggtagagggtcagaagatctggtttctgtttgcttttccttgctgtcttatttgcctgaacaaactccttgctctttaatttttgtaagaaaatgaaaatggcctctaacacttacctaagaaaactggtgaagggtgataaatgtgataacattctctgcaacaaaattctaataggaacaaagatgctcttctggctgggagatacatcctgagcatttgaatttaatcagactgcagcatatttctttgaccttttacaatgatgatgactaactggctcccatgtgggtagcttatattttagacaaaggagggaaaataaaatcattcttgacttggggcagttgatatcatttaattgagtcatagctgcatagactacaactgaatatgcagaggaatccagggagaatttgttcattaaaagggtgatttcttccttttgcttttttgcccctttgttaagaaagggtcttctgttcattttgtctttacctgatttgacttgtgatgcagacaagaaactcaaaagagcatgtgagaagggatttcagtctgtatatcagctgtcattttctataagtgagcaggcacttgtaggacccagagattatggaactggaattttaggtacactataaagcaaagtagaactacaattcaccctttcacatgttagagttttgagtttgcaaaatcatttactcagactgcagtcaaatattagtgattttgtgcaaactaaattccccccttgtaggaaatatacaatgaaaacaatagttctatagttgggagactttagcttctgtgatttctatttccccaggtatgtatgatcattcagtactgatgctctcttacatttttaattaaaactatctgaatttttgcactttgtaggccttgcaatatatacttctaaaggtagtatttaagatcatacacctcagatcttacatcactccctattagggaaaggtgtgtggctttttatagcaccaagagaaaaattctcctgagtatgactgtctatgtgtctgttagaaggagaagttataaagatctacaaagagacttacagtcccagacactaatagtgaaaaacttcaacactccattgacagtattagtcagatgattgaggcagaagattagtaaagatactcaggatgtgagctcaacattggactcagtggagctggtagaggtctacaaaactctccatccaaaaacaacataatatacattcttctcatttgcacagggaacatactctaaaattgaccacacaaccggacataaaacaatcctcagcaagtgcaaaagaaactaaatgacacctaacacactctcggacacaatgcaataaaaatagaaatcaagactttaaaaaattgctcaaaaccatgcaattacatgaacattaaacaacctgctcctgaatgacttttgggtaaataatgaaattaaggcaaaaatcaggaagttctttgaaactaatgagaacaaagatacaacatatcagaatctctaggtcacagctaagtcagtgttaagagggaagtttatagcacaaaacacccacatcaaaaagtttagaaagatctcaaattaacaacctaacatcacaactaaaagaactagagaagcaagagcaaaccaacaccagagttagcattagacaagaaataaccaaaatcagagctcaactgaaggagattaagacatgaaaaaccattcaaaaaaataaacacatccaggagttggttttttaaagaaattagtaagtaggcaactagctagactaaaaaagaagaaaagagaaaaggtccaaataaacacaattaaaatgacaaaaaggatattacaactgaccctaaaaaaccacaaataacatcagagactactatgaacacttgtacacacacaaaccaggaaacctaggagagatgggtaaattcctggacacatgcaccctcctaagactgaaccaggaagaaattgattccctagacagaccaataacaagccctgaaattgaatcagtaataaatagcctaccaaccaaaaaaagcccgggaccagactaattcactgccaaattctaccagatgaacaaagaagagctggtaccatttctactgaaactattccaaaaaacttagaaggagagactcttccccaactcattctatgagactagcatcctcctgataccaaaacctggcagagatacaataaaaaaggaaacactaggccaatatccttgatgaatattgatgcaaaaatcctcaacaaaatacttgtaaacagaatccagtaacataaaaagctaatccattgcatcgagtaggctttatccctgggatgcaaggttggttcaacatatgcaaataaataatgtgattcatcacataaacagaactaaagacaaaatccacatgatcatctcaatagatgcagaaaaggcttttggtaaaattcaacatccctttatgttaaaaactctcaataaagtacgcatcgaaggaacatacctcaaaataacaagagacatttatgataaacccatggtcaacgtcatcctaaatgggcaaatgctggaagcatttcttttgaaaaccagcacaagacaaggatgccctctttcatcattcctattcaatatagtattggaagttctggccagagcaatcaggcaagataaagaaaaaaagagcatccaaatagaaagagaggaagtcaaactatccctatttacagatgacatgattctgtatctagaaaaccccatagtctcagcccaaatgttatttcagctaataaacaacttcagcaaaatttcaggatacaaaattaatatacaaaaatcactagcattcctatactctgatatggcttggttctgtgtccccatccaaatctcatcttgtagctcgcataattcccacgtgttgtgggagggacccagtgggagatgattgaatcatgagggcaggtctttcctgtgctgttctcctgatagtgaatgggtctcacgagatctgatggttttagaaatgggagttttctgcacaagctctctttgcctgctaccattcacataagatgtgacttgctcctccttgccttccaccatgattgtgaggcctccccagccatgtggaactgtaagtccaataaacctctatcttttgtaaattgccctgtctcaggtatgtctttatcagcaacatgaaaatggactaatacatacaccaaaaacaacaaggctgagagccaaataaggaacacaatcccattcacaattaccacaaaaagaataaaatacctagaaatacagctaaccagggagggaaaaatctctacaatgagattacaaaactctgctcaaagaaatgaaagatgacataaacaaatggagaaacattcgatgctcatgggtaggaagaatcaatatcattaaaatggtcatactgcccaaagcaatttatagagttaatgctattcctgttaaactacctatgacattcttcacagaactagaaaaattgactttaaggttcacaaagaaccaaaaaagagccagaatagccaaaacagtcccaaccaaaaagaacaaagctgtgggcatcatgttcccaatttccaactatactactacagggctacataaccaaacagcatggtactgttgcaaaaacagacacatagaccaatggaacagaatagacagcccggaaataaagctgcacaactacaaccatctgatcttcaacaaagctgaccaaaacaagcaatggggaaaagagtccctatgcaataaatggtgctggagtaattggatagccatatgcagaagattgaaactggacacattccttacaccatataccaaaatcaactaaagatagattaaatacttaaagatgaaacctaaaaagtgtaaaattcctggaagacaacctaagcaaaatgtaagacttcatcatttcatgacaaagatgctaaaagctacagcaacaaaagcaaaaaattaacaaatggagtctaattgatctaaagagcttctgcacagcaaaagaaaccatcaacagactaaacagacagcttacaaaatgggagaaaacttttgcaaactatgcatctgccaaagatgtaatatccagcatctattagaaacttaaattttcaagtaaaaaaacaaacaactccattaaaaagtgggcaaaggagatgaacagacacttcaaaagaagatatacgtgcagccaacaatcataagaaaaaaagctcaaaatcactgatcattagagcaatgcaaaccaaaaccacaatgagatcacctcacaccggtaagaatggctgttatcaaaaagtcaaaaaataacaggtgctggcaagattagagagaaaagcgtttgcttatacactgttggtgggaatgtaaattagttcagccattgtggaaagcagtgtggcaattcctcaaagaactgaaaacagaactaccattcaacccagcaatcccattactgggtatatacccagaggaataaaagttattctgatataatgacacatgcaggcatgtgttcactggagcactattcataatagcaaacacatggaatccacctaaacaaccatcaatggcagaccagatgaagaaaacgtggtacgtacacaccatggaatactatgcagccttaaaaaggaacaagatcatgtcatttgcaggaacatgaatggagctggaggccattatctttagcaaactaatgcaggaacagaaaatcaaataatgcatgttctcacttataagtggatgataaatgatgagaacatatggacacaaagaggggagcaacagacactgggggatactggtgggtggagggttggaggagggagagaatcagaaaaaatagctattgggtactagacttagtatctgagtgatgaaataatctgcacaacaaaccccatgacatgaatacctatataataaacctgtacatgtacccctgaacctaaaataaaagtttaaacaaaaagaagaaaataatttctattgtctttttatttagccccataattgttttcatgaatgaacacaatgtacagtgcagccactatgtctagttatttttctgtttttaattattttaaaatataataatttttatagtctgtagcagatagttctattatgtcaagtccttgagagtatttaattttctgccttttgtatctataatctcgctctgtctctctctttcaaggtggttaatttccttgtgttttcataattttaggttttaagatcatcttctgtagggttttgtctgtgaaaatattgggagtcctggattcgaatttttcatttgcctctgggaggtataactaactctgtacaacttctgtttttttttttttttctttctttctttttttttttttttgagatgaagtatcactctgtcacccaggctggagtgcaatggcaccatctcagctcactgtaacctctgcctcctggggttcaagcgattctcctgcctcagcctcctaagtagctgggattacagctgtgtaccaccacgcccagctaatttttttctatttttagtagagacagggtttcaccatgttggccaggatgatctcgaactcctgacctcaagtaatccacccaccttggcctcccaaagtgcttggattacaggtgtgagccaccatgcccagcttatttaaaaacttctgtttttaaataaactttttattgtagaatagtttttcatttacagaaaagttgctaagatagaatagaggattcttgtatgccctatactcagtttgtcctattgttaatatcttacagtagtattatgcatttaccaccactaatgaaacaacattaacaagttattattaactgaagtccatattttactcaaatttccttggaatttacctaatgtcctttttctctcccaggatctcatccaaaacatcacatcacatttagtcatcatatctccttaggttcttctaccctgtggcttcttgagactttctcagcctttctttttttgatgatcttgaccctgtacctctcatgcacctaaaatatgtcctcaaaatacatgaggaaaaataatccaaattataagaagaaagagtcaaaaccacagtcgtgctgaaagattttcacactcctccctcagatttcataaatcaagtagataaagcttagtgaaaatatcgagaatatgaataacacaattatcaaacttgagctaatggagatgcatagatagagctctgtatctccaaattttagaaaacctactgtttcaagcacatataaaatttttacaagagttgaccatctgctcctccacaaaccaggtttcaacaaatataaaaatcaggccgtgtcccttgaccgtagcacatcagaaattaactacccaagataattaaaaatccatgcttaaaatacatttaaaaataaaagaacacacataattcatggatcaaatacaatatcaaaacaaacttagaaagtatgtaatattgactgaacaaaaatgtgtcaaaactttttagatgaaactaaaacagaacttagaagggaaattttggccttaacatttatatcgccaaagaagaaagttttatcttaaagttgatgcacaaagactatttcttaagaagttagaaaaagaagaaaataaaaccgatgaaatgggggaggacattctgcatggcctatgcaaggaagtacaaagaattgccagtacttagggctttctgaagcacaggtgtacacacagacacacacacacattgtattcagaaattagatatactgtggaaatggtacgcttaagacatttcttccataaaaaagttaacataatattataaagtcacctatatacccttcaatgagattcaacaattttaacattttttcatatatcttctctctctctctttgtatgtatacttttttctgtaccatttcagaataagtttttggcattgacacctcgcatataaatacatcgacattcatcttctaagaataaaaaaaattcactttatgatactgttgtcacctccaagaaaataaataataatttcataatattgcccagtattaatacttaagtgttcctaattaccctgataatgtctttttagctgtttctcttttcttttctttctcttcccaaccagatctgaggcaagcctcatacattgaatttagttgttatgttacgtctctttactttcttttagtctagacgctaaaggaattctcccacaatttttttaaatgagattgaattttttaatagtacagatggttgtcctataaaacatcctatattcatgacttttctgattacctcttcacagtatcatttaactcgttttgctgtctctcatattttctctaaactggaagtgtgtctcaagggctagattacatccagatgaaatcctttgggacaagaagacatcacagagaatcttgtgaattttgcactgcagtacatagacagccactgatgccagcctaccccactgccagtgatgtaaagtttgatcattggtgaacgtgctgaccatcaaatctctcccttgcaatcatttattttcccatttaaatttgtaatttgtgtggtgatattttgccaccatgagaatatcctgttccccacagctttttacttcactgtttcagctttctttgactatcctcaactgcatcaattattatactggggcttacgaaaaggtgattttccattcttatcctttattactttgaagactttggatgtgattcaaatttgagttctttttctgtatgcagagtggagtcaatggatctttatatagcggagtttgaagaagcgagagaataaaggtgttttatggaatttgtaccaggatcctggggttccaatatcattttctcatctttgaggctcctggtgaagaaagttactttagtctgagcactctttctaatctgcagggggaccttctgtgggaaaatgggggcccttgtaccctggatgtgaggttgtcctcagaggaaatgtacagtgtaagcagcctttgactcaattatggcctttaactttacaaacaactgtcaagtccttgcttataggggaaattatatgtgtgtatatgtgtgtgtgtattatatgtattatatgcacacatacatatagctccttctgtgagagaatgctttgtccatacccgtttctacatcacagctttgcaccttctcccacgcagcctcctggccgccatctcctgcctccctggagcaattattctctggggtctattaatctctcctcttcttagagcaattccctgtttgccaattctttcccacttattaatagcaactttaaataggtctaagaacattatagtgaggatgaaggattttgtctaccctccgtagacaaaagatcctccagttacctggacctatgcttttcatatatacatatatatatatatatacacacacacacgtatatatatacacacacacatatacacacacataatttcccctgtaatatatgtattatattatacatataacacataatatatgcatatttaatgtggtatatatatatatgtgtgtatgtatgtgtgtgtgtgtgtgtgtgtatatatatatatctcgtataactacaaagtgaaaatagacacacagaatagattgccttaacacataagactcatttttactgacccatagttgttgggttttttttttttttaaacttttattttaggtttgaggatacatgcgcaggtttgtcacataggtaaacttgtgacattatttttgtaaacaaaaataatctgtttgttgcacagattatttcatcacccagatactaagcctagtaccaagtcattatttttcctgatcctatccctccctccaccctccaccctccagtaggccccgcgtctgctgtttccctctttgtgtccatgagttctcatcctttggctcccacttatacgtgagagcatgtggcatttggttttctattcctgcattagtttgctaaggataatagtctccagctccatccatgttcctgcaaaagccatgatctggttgatttttatggctgcataatatttcatggcatatatgtaccacattttctttatccagtctcattgatgggcatttaggctgattccatgtctttgccattgtgaatagcactgcaatgaacattcatatgcatgtttctttatggtaaaatgatttacagtcttctgaatatatacccagtaacgtgattgctgtgacccatagattttactcttagaaatttttcatcaggaaaatgtacaagaacctatctacaacatctcggtgtggtttacttcaataagtcaaataaacagtgataatgccaagcaatatatattgcttaaataaatttttgtgcggctctataatggatattatgaagctattgaatattatatggtaggagtagatttaatgacaattttataagtttaatatgtaaattagtagatgcaaatacgtacaaggacacagacctgcaaaaaggacacagactgattcccttccagaaatctccaggccccagcgcagatgtgcactttggaaacttggggttgccagactccacttgctgtcaacattgtggcttcatttcagctgcgatataagcaaaattactgtaaaggggattatccattcctctacccaccagcgtctgcatcccaagtccttttaagccaaaatgcctgatatatgtaaatgtatgcttgctgctcgttcctgtttccctgttctctttctttaagctccctccaaactgacttcattcttaaggaataatgagcaatgtagaatattgtagaattcacagagaaggcagagaagaagactgatgtttcacagtgcacaggccctcatctcaaatcctcccgtgagaggatgctttttccatacctgtttctacgtcacagctttgcaccttctcacacgcagcctcctggccatcacctcctgcctccctggagcaattattctctggggcctcttaaactctcctcttctttgagcaattccctgattgccaatcctttcccactcattaatatcaactttaaataggtctaaggccattaaagtgaggatgaaggattttgtctaccctcagtaaacaaaagatcctccagctacttggatctatacttttcatatcaagaaagattataaataataaatatttttctccagcctgtcatgtattaaataaatgttctattattaatatgtttctcatgtaataaatgtaaaacaaaaaggggaaaaggtggtctttttcaatctttagtctggagcaggtactagtgaatgtccagtctccagggtagggatgaggtgaggtcggtcacaaggtaaggcctctcagcaacagaaggggggaccaggacactctctgagtgatgaggtcagagacatgggacagggatcaagacagtgactttgttactgggactagattagagggggataattacagtttccgttaggatgcttttggtcataagcaacagaaaatcagaaaaatcaaatttaggcaaaaatagaatttattgacttatctagcaaatatgatttgatccaaggctcacgaatgtcacaaaaatatttttcttcatttctctgttccctttcctattttaactccattcctaggcagactttctccataaagtagcaatacggctgtcagataacaatcaagtagaaaagaggtatcttttttccccccagcattactgtaccagcaaagtggggtaaattaagacccatgcccattcgcatgcaggggatgcatatatgattggcttctgtttgggtcgtgtgtttcaccccaaaacactcaggctggaggtgaggaagggctgaatccttaaagaagagtagagctgtatccagaagacttcaaaatggataccaaggaggtaagtaaaagatgtttcctacacaaatctgaggtctgacaaaggcctgagccattgcgtataactgagaaacaacagaattgctgactggagttccagtttggggctttattttttggtttatttttattgtagggtttatttttagggtttagcattattttaggctttatttctcttccctgagttttctagcaggtttcaagaggctctaattttaggaaaaaggaacatatgatgcagactggtcttgacaattaaaaaacaaaaaccagtctcagaactgaaaacaacattacctgcaccctgtctgtataagaagcttacatacaggctgggcgtagtggcttacatacaggctgggcgcctgtaatcccagcactttgggaggccgaggcgggcagatcatgaggtcaggagtttgagaccagcctggccaatatggtgaaaccccatctctactaaaaatacaaaaacttagccaggcgtggaggtgcccacctgtaatcccagctactcaggaggctgaggcaggagaatcgcttgaactcgggaggcaggggttgcagtgagccaagatcacaccactgcactctggccttctggcctgggtgacagagcgagactccatctcaaaaaaaaaaaaaaaaaaaaaagaagaagcttacgtagagtattaaagaggtaatatgtgaattttatttattaccgtagtagaactcttttatatatataaaggttttgattctcaaactgccccataagaattatcctcagaaatataaatctttcagacttcaataatattcaaagccctcatgaagactggctttctaaaaagctgttgctcttcctaccaacccctgtctttctttaattgaaagaaactttgatccaggcaggtgagcaagtgaggctgatgggtgatattttccagatgcattttaattggaagctagttttccaaggtattttcctggttcattatttgtaattagttttgctaaaaatttttgtgctattttaattctgtttaaaaacctccttgttcataagatataattgctttacaaggaaaggaagaataataagggaaattgtaccttaaaatccaatagcctgaatacaagcctcaactctaccatgtaataactttgtggttttgagaatatgtatatctctaagcttcattttcatcatctctaaaatggagataatattaacatgcagggcaattgtgaggattaaatgagaaaactcaagtaaaaagtctctgacacatccagaaacatatacaagctcaataaatgttatttcccattgtcgtcttccctaacttctaacaaagtagggatcttacatcagaggagaacttctcagctctatattccaatgcagaaggggcatctggtgatcattaaaatatctgagaaacattttttaaaatcttattttttttcctcctttaaagaatatccagagaattcactggagtctgttcataggtcatgttcaaactaggaaaatgaccgctgtctgcagggcacccaggtgaattgggagaagttaaagtgccatctcctttgagaagcctcccttgatcccccaaggctgatccaggtggccattttttcccccagctccctggtacaacacctccagaacaggagctagcaaactacaaaccaggggttaaatccaatccaccatctatttttttgtacagcttgcaagctaagaatgattttttacatgtttaaatgattggaaaacatgaaatgaagaatagtattgcatgacacataaaaatgagatgaaatccgagtttcagtctccacaaatcctatgttgttgaaacatagctgtgctcgtacatttgagtattgcctatagctgcttttgcattacaatggcagaatcaagtagttgtgacagagaccacatagccattaaagctgaaaatatgtattgtctgttgaacccttatagaaaaagcttgccaacttctctagaacattcacaattgagtcatactgcacgtgtttcctccaggctctatatcccttgaggactgggactgtctttcatctttgtgtctttagcatctagcacagtgcctggcaaatattaggcatctgtaaatttgcatctttcccctttttgggtatctctagtaaggtgtcttcttactgtaatccacaataggtctgtcccagggtatccagccttcagtcattctctgcatcccatgggtacttaaaggtctgataattgtaggtgtggccagagcctgttgaacctttcaggtatctgaaaactagagaagggatcactggaaggttccttttctctgtatcctgttttctgaggtggtatagtgtcagggaaggagcactggatgttgagacttggcctgatgaggctgtcctcaactaacgacttccgggttgtgtgatcttgggaataaaccacctaagtatcactttcttcatctgtggtatagagataaatattaccccacaaacctcactgggtcttgattatgttggagaatacctgcctctggtgggttcaggggccttgtctgttttgtttacctttatatgtcctggtttgcacaatgcctggcacacaggaaaccggaggttctcagctgaggctgaacattagaatcagctgcggacttttagctgaccaccaacacagagcaccaccccagaccaattcaaatagagactctgggaatggatctggacatcaggtttttatttttcaagctccctaggtgattctgatacttaggcaggattcacagcccctgttgtggagtgctcaataactatttgctgaatgaatgaatgggatgaagttgttcctgcagatgctttgctcctctgtgctttgagatgctaactaaagaagtcaggatttttttttgcgtcagggataaaatgtactgttcctcactgattgagtcactctctccagttcacggaggtctgattcctgtcttctttacccttcactgacttgcatgactgataattctcttgttatgtatttgacccttttgccactcctgccttttgtcctccacttccttttcatccttgttcttgtcagtttccccttctcctttgtaatcttctcaggctatttttcttgctgttaagttcactagtagcactcgcttaccacccataacaccaggtattttcaactattgccatttttttcttggggctaaattagttttaccctgtgcttcacatcagaaaataaatctctagacacttcctttttcactctctaaatttctgtgtctgggaataaatagatagttgcagaagctttcagctagttgaagaagtaggaaatccaacttctcactttgcagaaaagaaaactgaggctcagcaagaggagcagcctgctctgggtcacagagtgagcttatggcccagctggggctggatcagagatttcatcaggtccagttcacgtgcccttcagactgccacacagcctgataggtaggccctagggtgttttggacaattcattgcctctctgtcacgggggtcggcacctttccaaagctgcatcttgccagactctattactttgatctctcaaaggagaagggagtgttgctagtagtagtcacatgtaggtgtgggagggcctggctgaccactttggtttagtgacactccagaggacccagccctgcatgtgtaagcctcctggcatacagaccaggagaagcaggtgatgacagatgtcccggaggggcagcagagcatcaagagagctttccccataaccacgtctagctgcacccccaacaatgacatggtcatgaagagctaggcactttcctgcctgcagagacctgcactgtccaatacagtagcccctagctataattaaaattcatgaaaataggattaaattaaagcctcatttatttagttgcactagccacatttcaagtgctcagtagcttctgaattactgtattcaaggctaccatattgaacaacatagatatagagcatttctaacatgccaacaattcttttggacaggcagctccagatgcttgggtaggatgagttagtctacagaatgaacaccacagctaaggacaattaaaaagaggtctccccatgctgttcttctcaggttctgagattccaaggctggtggtgcaaccaatcagcaccttgtctcccctctcacatcctgccatctccatgtatggtttatttccctatgagactctgagcttcttgggagcactgtctgtcattgattaattttgtttccacagaataaagcacaggacttgatataggataggcctcagtaaaatgtactaaataaaattgtgagttaatgttctttaaccattcagtattatttttaaaacaattgtattcaatacaatggcaaaagaaaaatctgtctttttggtaaagaggaagacatattgaaactagctgttgcttacgtgggaatcagtgttaagtttccttctcctgggggagaaggctctgacactttgctgggggtgaagggcagtaggacaggaggatggcagggctgagcacaggttctcagtaaacataggcttacaaactaatcctccacttggggattagctctgcctcttgcacagggttctgggatggaatttctactgataattctaagccagaaggcaatgtggagtggtgaactaggaggccaggggtccaaatttaaatcctggccccaaaatcaatgagctgtttcgtgaaatttagtcttttcatgacagtccaggctggtaataaactctgtcctccccagtgcacagacaggattgaagtgaggctcaagtgagattaagtcctaggagaagctttgtagcctgaacaatgtatgtcaccgtgagggatagtggtccagagggttactctgagcaagttttattagactatggggcctaccatcgtctaattaaaaactctggaaatgctagaaactgctctggaaatgccagcaacccctatggaaatgtgaatttttccttttggcaagtgatgtttgtacttgccaatcaattgcctggttcaatcctagatttattaaagtaatgcaacagccacaaaaatctctggcaagtcaacaacaacaaaaaaagggcttaaaaaaaagctgacctaaaagacccagcacatcccactgcccatgttgtcttcaagccaaccagaaagtgatagagcaagggtgagattcaaatccatattttctgactgcaaaccttaagctttctccagggctctctggatgcctgagctatggctcaaatcagttctctaccagacatgccataatttgggtttatgataaggctaaacatttcttgttccctttagaaaaatctaggtaattttggaaggttttctggtctgagataatctcattcaaatattttgatcctattttggattacaccaactttgctgataattctatgtagttatggcaacaaataaatgttaatgttccccaagagtacagctaaccttttcattatctagttaacttttcacaacccctatctggcaccatttcctagtatttggagactgatgggatacagacctggcaatattccttattccttttcaggttaaaatcccttccaggagtgcttcacagtcaggtgcttttattaattcagtcattttctctcagccagcagtttcttgacaagcccataggctgtggcttgacccttactgaacctacaccgtggacatcagtggggttccgtgtgtcctaatgtagcctgaaggtacaacttgcagtattaagtgtgggatggagtgaggtcagggacagatctgtcacttactcagtggtcctgagccttgatgattttacccatcttataaatgagaataacaatcttagctttgcctacctcccagggtaaaatggatttaagagacattgattgttatgggttgaattgtgtctcctccaaaattcctgtgtcaaatatctactcccaatagctcagcatgtgacctatgaattgcaacaattcagtcacatcttcacgctctgtcatgcaggctggagtgcagtggtgggatctcggctcactgcaacctctgccccccgggttcacgccattctcctgcctcagcctcctgagtaaccgggactacaggcatccgccaccacacccggctaatttttttgtatttttttttagcggagacggggtttcaccatgttagccaggacggtctcgatctcctgacctcgtgatccgcccaccccagcctcccaaagtgctgggattacaggcgtgagccaccacccctggccccttcaatagctttttatttgtattcagaatttggctagaggccaatttgacacaagaggcttagctttcagcttatcttggcttttgacatgctttcttcactaagcttagtcatttctaacttttgatttaaagtgagagatgtgtgactcttcctttcacttgaacacctggaggccattgtagggttgttaattgatctaattgtctcaagttacagggaaatccaaggagagggagagagacatgggaatggccaattcatagagcagtcaaaacacgcacatttatctattaagtttgccatcttatatggtgtggtttgtgatactccaaacagttgtaatattaacttcaaggatcactgatcacagatcaccataacagatatgataataatgaaaaagtttgaagtattgcaagaattaccaaaatgtgacacagagacatgaaggaagcacatgctgttggaaaactggcaccagtggacttacttggtgaatgcaaggttgccacaatccttcaatttgtaaaaaactcagtatttgtcaagtgcaataaagcaaagtcaacaaaacaatgtatgcctgtatgtattttgcatttgctggaaaccacataaaatactttactgattttgtgaagtgaacaaaatgtctccatcagccaaaggggtaatccttgattcattcttcctcctgagatttagcacatagagcccaggagcagaagccaagggtggcctgcctggttggccgccctgtgccaccagtccacttccggctgaagccttggcctgccccatgttggctccaacccagctcccaccagtcgctcatgccaaaggaaaaaattcaacatatgcttttttgactcctgattcaccaccctctccaccacaggcatggatctcagactcttctttaacacgctgaaactgagtttatttagcttgtctcatctctctttgaaaaacaattgctgcatattctgagctgccttctcagtcccatgcttctctgttatggatgacaatcctacttctcccagactttgccaatcattttaaagaagcttttcaaatgctgtgagcagctgtgtgtgtgtgtgtgcacatgtgtgtgtataatgtcagtgtgttgggctccctcaccagagagtcagctccaaaatgtcagaaccccaggtctctcttgctcaatcagtacctagcgcatgattgggctacaacatgattactgaatgcataaatgaatgacttttatgtgagaaaggtggtatgatctaactttaagaatttaagaccgtcaaaacctgtggtttaattattacatccagaaataacatttactagctgtgtacaagtgaacaaatcaccactcagaagagcctcagcattggaatctgtggaatgtagataatgctaacttctctgcttagctaaaagaaattgggaagttcaaatgaggtaaagaatggtgtggttgttttatgcaccaacttggctaggttgttgtactcagttatttaatcaaatacaaacttaagttgttgctgtgaaggtattgtgtagacatagataacatataccattagttgactctaagtagaagagattatactctccaactggatggatcttatctaatcagttgaaaggttttaggagcaaaaaaccgaattttcccacagaagaagaaattctccctcaagactgcagcagccagtcctgcctgaatttccaccctgctagcctgccttacaaattttaaacttgccagtcctcacaattacatcagctagttccttgaaataactcatacatatatgattataaataaatgataaatataaattatttatttcaaggaatatatacataagcattatatgcatattggccatctacatatatatagtttttcctctggagaacactgactgatacaggtgacatcatgttggtcagtatggagggttatgaaatgaagggcagggaaccaagggaggaagtcagaagtttcactgccaagccaagggaaaccgagaggctgggagtgccaagtactgcagtctctctgtcttccttggaaatgtgcatcactgcaatgctttctgcaggaaggaaggtgtcccagatggtttaaaggtcccacctccccaggtcctggctggggcggggctggcatacacattctcagggggttgagtgtgtaggaaatagatattaacaaacaggcccctaaggtgggaaagagagggcatcaggggcagcaaaacttggcagctccttgcaccctacccttgcagaaaagacacagagctgtctgtgtgggcgttctcctggccgacactatcctaattagtataggccccctctggagctgcagcttcttttattaatgccttcattaaaaggtctcccctaatcagtcagctgtggagcgtgcttacaagaagaagtttctctgggctcatacacaggccttgtatctgagaaagaaaagtatccagtttatgtgtgcagggttagagggtcttctagaaacctttttgcagacagtgcttgcccttaaccagtctcttccactctctttgcactcctcctcccaccctacaggcatttgatgtgacaaataaaaactaaaccctatgcagcacattggactcacaccttattctcaaaaagaaacaaagttttgcaaaagttcttagccaacctaaatgagcaagtggctcattgaaataggaaatgttatatcttatgctccttcactgtaataataacagcaacactaattattcttcacattagtatatcagctggtgatttaaaacatgtattcatctccattatctgcccagtgcctgctatgtgccattctctgaagttggcactgggaagtcaaagatgattgacttgaaagtaggatattttattcatcaggaaaaaatgatcatgaaaacattatgctgagaagatgcaccgcaggaagctctgggaagggatagccaattgtctggagaattagaaaaagtctttagaggaaatgtgaataagctaggttgtttgagaaagaaaaacaatcatgcatttaggaatacatacacacatatacatacatttaggaaaaactttaggatattcctctctttccccacagttccatgatgaaaggtctttttgggatcaagaccttggagcggggcatggtgcataatgatgaaattgtgatatgcagcctgggtggtggccatgtgtctctaggcattttgtggtggggcccgaacccataggaagctgtagtagaagcagtcccggaaggggaggcaggaggcctgggtgctagatctcgctctgctgaaaagtcagcatttgactttggggaagtcatttctccttctagacttcagtctcttcatgtgttaaattagttccgttttctttgtttaatattgaaagcttctttccagatatagacagaaaactgaaaagtaggtgaaattgatagaacagagctattttcattcttaggctcattattcttcccactgaagctggggaatgggtaagagccacagcagccttttttccctttttactcccaaaggaaccccagaagcatgtctctttcactcttgagcactgaagagcagtttgaaagccataggaccgagggctcttggaatcctctactctgaaagcaagtacttctatgaaactcaccaagaaatctggtttttaaaaaaatgataacagccaatagctaatatttatggaatattgtttatcaggttgtgttctaagagcctttcgcaaccccgtaagttaggcatattgtcatcaccattttagagatgaagtaaatggaacatgaaagggctgtgactcacccagggccatgcaatttttaagaggcaagattcaaacccagacagtacggctccaaaggccatgataataaataataaccattatgctatactgctttttaacagtcccacaaatgtgttccttgacatttgcttaaatagctcaagctatagcttaagttcatttatttttaagcccataacagaagtaaccaattgaagaattaaatatgtcatcctataacctaattgctgttctttagaacaaagttatgatgaggagtttgttttcctgaatgtagctgggcgatatttttctgctctactgaattccatttcttcttcctctctccatattccacaggccctgatttttttcctttggtggagaggaagaacagctggtccccatcttcataatatcctccatttggccaccattaacaaatttatcagcctccccagatctaagcaaaagcagcagaaaagatctaggtatccccatatcccacagcactgggcaggggtctgcactgagttgctggtttcaggacagtcagagaagttctgggaaagggacaagagtaagctccctgcaaagtcctagcctccaacctcagctgagccctcgccactcatcactaagtttttatttcctgttttctaatgtctgattgcttcccaaagcagtcgtgcaaattcttctccacatttccacgtctcaaactgcaccctatttcctcagtttccccagttcacagcttgtctttgatttgccagcagggatcttctctgctctgagcttcctcagcttcctgtggctcactaggaaaatctttcagagctcctccccgttcttttctccttttcttttccttttgatgaagaagtgccctgtatccttccccatggactcctggccttaccctgcccagctctccccaagcacttagctctgtccactctctctcttaagtctcctgctccctcagttgctttttctcctcccactctatgccttcaaccaacaaataatgcaggtttcactcatttcaaacagacctttctttgatctagtttcctagtcttcgcatcatcttattgtcctttccgctaccaaatcatgtgttcattttttcttctcgagatggagtttcactttcgttgcctagtctggactggaatggtgtgatcttgtctcactgcaacctccgcctcctgggttcaagcaattctcctgcctcagcctcccgagtagctgggattacaggttcgttcccccatgcccagctaatttttgtgtttttttagtagagacggggtttcaccatgtccgccaggctggtcttgaattcctgacctcaagtgatccgtccgcctcgacctcccaaagtgctgagattacaggcatgagccaccgcgcccggccgatgttttcattcttccagcacttctctctcctcattcttccttgtaaacccgaatcacagctcctcctcaaaaatcactcctgaggtctcagccgtcatctctagccaccatcataaaacactagacttctgccaacccataacttcttccatgccctgtcactaacttgctctgtgattctgggaaagtctggcctctttctggacctcagtcctttcaaatgtgagttttcaaagtttttaaagcttaattcaaacaacggtattttcagaatcctaacgtgtacaacagataaaaggcacggtggtcacgggtataaatgtgtgtatatgtatttatttatacgttaatatatattctttgacctggtcagcaggaagtataaatgtgtatgtatgtatgtatgtgtgtgtgtgtgtgtgtttatgcatgtgcacatgtgtgcatgtctgtgtaggggccaatgagaacctcggataacttgaatgagtagctcagcttctttcccctgaaaaattcccactctgttcagaattgggttctcagcaggtctattttaaaatgtgactctgacccatggacacagtcaattgcttcaggaataggcactgaacaccagcagagccaatcagaacccttctgagggcctaagaaattccagtttcagtctgatttaatcctcatgatagacagcctccaggatgacccttaataatcccacctcctggtgttcacatctttatgtaatcccctcactttcagtgtgagctggatttagtggatatcacatggctgaagttatgccatgtaacttcctaggttagattacagaaataatgtggcttctgccataggggccctatctggggctctctgtctgttatagtttgtacatttgttcccacaaacctcatgctgaaatttggtaatgatgaagttggggcctcatgggagatgtttgggtcatgggggcaggtcactcatgagaggcttggtgccatcctcagagtaatgagtgagttatcattctattagttcctgagagtgagttatcattctattagttcctgagagttggttgtttaaatgagtctggcacctccccactttctttccagcctcctatcttgccatgtgatctttgcacatgctgcttcccctttgccttctgtcatgggtgaaaggagcctgaagcccttactagaagtagatgctggagccatgtgtcttgtacagcctgtgatccaaataaacctcttctttataaattacccagcctcaggtattcctttacaacactaaatgtctctctctttctcagatcagtcatgtggaggaaagtaagttgccatgttataagcaataatatgaagagggctgtaaggcttagcaaggcactgaggtttcagtcctacagcccacgaggaactgaagcttgccaacaatcacatgactgggtttggaattaaatcatctgaagcctgccaacagtaatgtgagcaaacctggaagcaggtccttttcatcctttgcccaacccactccccacttgaaccttcagaagagaccaaagttgtggacaacaacttaactgcagcctctttgcaaaccttgagccagagatactcagagaaacttggcccacagaaactttgaaataatacattcttgttgttttaagccaccaagtgttggagtaatttgttacatagcaatagataactaaaacaacccttgaccagggaagtgtcagcctgggagctctaggagaccatgttttactgtgtcccagaaagcagacacaataagtctgcagtgacagagaaggtgaagtcaatgtgaagtaattccttgtggccttcagcgccttggttccagtttacttctgagacatagttcacccttgcctttgaaaattctgttactcataattgaggactgaaatgaaagccctaagcctctccaacagactaatggatgctcctttggttaaaatagaccctacaaattttaagatcttgacataacaagatgagaggctggtcatgttctctttgctgccatgacccacccctcactttccattactaatcattaatagattttctcaaaagcaagctggggagaacaaaagactggaagaacccctcacttacttcatccaaccacccagtgcccttctcctattttttggctctgacatgacttctatcccagtgtacaaacttctccttgatagctgacagctggctgaagactgattttggttttcttaagatgctcagaaagcagccctatgcatcatgctttacctttgtacatataagagctaattataatgtatttaaatgttaagtctccaccccaaagtgaacatgggttatatgtttcatacatgtaaacctaatgtgcatgcacgtctccttcatgaatattaataaactcctcctatatactgatgaatatgtatactctgccatcctgtttagcatacattcctacctctaattcctcctccttgaagcacagatttctgatttgcaggaggtttcacttcatgcctgccggatatagtcctcctttagaaacaaagctctccttcctaaaattactgactttgtgaattttttggtcaacataatgaaagtcttttttttctccgctatttgtatttgtaatgaaatacaggggctctaacacatacatcctctttcttttgccatgccatcctgcaggatgacccaggcattgtccatgctgtggaactttcctttccttgaccagatgtccctctcctctccagatagccagagacacttttctgtgtgcttccttagacatctaacatgtttgagatatttaccacaattctgagactgtgcaatgcacctgtccggtttcccagttaaaagaatgaaattgtttcattcatctctgtgttctgccaacaccttatgaaatgagtttgttagccaataaaatagagtagtattcaagacacaacagctttcctcctataaagcagattttcagtacgtattatcatttataaattctgaaaatctgatatcaaaaaatgcctgtgtgcatgtgaacttcagtagagagaaggaatacatcctgggaaggtttcatgaaaacatcatttgagctagactttgactaagaaataagattttgacagctaaaggtaaggggccaggtaaagtccttcaggtacacagaacagcttgagcaaaagcattgagacataaaagtgcctgaagtattagaggcatcataaagtagtaagtggactgaagggtttgtagtacatatcatagaaaacaaggctagaaaggctagaaagatagtggagagcctcaaattcctttgtctgtgtttattttgtgttctagtattaaggagaacttcgtggggtgcaaggattaaaagatggcatcataatagctgggttttaggaagagaactctgtagtatagattaggcaagaggattggtggaagacggatacaggaacaacaattcagtgaccggtctggcagtgtcagtaggaaaagaggcaaagggaagactgaagtgatttgggaggcaggctctgtcctggtctgcaactgggcttggagtgtttacagtccagggtaatgattccaccgggctgcctggtggagaataactcatgagctggcactgaggataggacagagaggatgttgtcttttttatcagaagtccgcccataggcaatagtcagataaaccatgaaacattcattcagtagaatattatataggcactacaaaatataaatgaggcaggttatagaaaaaagggggctagtgggaaactatgagatagatcaaaattgaataataaattacaaaggagatgggaaagaagttggagatacaaaggaaaagttgatgtggaacaaacagctggaaccatatggatgagcatgtaatggatgtcttggagacagcatttgtaactcagtgtgtgaggggaggtgccctagccacttcatagagcagggctcatacaccaaaggctacaggactccacttgaaagagcacccagataagaaaaatgtccaaagtgtgtgcccaatttgataacataataatagcgcagatgtagagttccgagatgaactgttcccattcagcactgttcaaggaggtgcccaccttgcactttacattccagttataataaactgattgtattttcccaaattcatcagacattatgcctctatgtctttgaaaatgtggatgtcactgtttgaactgattttctctgtgttaatgtgaaacactcttatttatgcttcaaaactcaactgtaaaaagaaagagacagaaagaatgaaagggaagaaggcagggagggggaaagaagagagagagagagagaaagaaaagaaagaaggaaagagagagagagagagagagaaagagagagagagagagaggtattctcccctccacaccaaaaaagtaagaaaaaaaaaaaaacccaacttacataaatccaactcatagaattctaatataaaatctgtagcatccctagataaagcatcattattttttcatatgaaactttccttacataacatgcacagaaaaaggtaaacacaaaacactaaaaactgaggtgatatccttctaggatgtttttcatctgcatactcaggttacctcctcacgagggagactcttcctgaataaaagtgctgaataaacataatgtagtatcaccattgtataaaaaggtatgggttctatgttatgaagcaaacagagcttcctatgtcatacatgggtgtgcatgcacacaaacacccacacacgctactttccaagcatctttctgcactgaatttaaagacagaaactttgagaaagcaacaaaactgggtatgatgtttaagtgcatagtataggggcatagtggggagtgcaaggactatagaggtggagatagaggttgatgatggctgatgatatctttggaagtgtacatcctacagagaaagagctgtaggtggtgaggaaatattgagctggtttaaacaatatgcactggagaaaagttgagtcttggcattctgttattattggtttagagtatatccttgtaaaaataagcaagaaaatcaatcagtaaacaggtaaatgtaaataacaatctataaaaaaggttcaaactgttgaaaaatatttgaaaaagttaacattatgcataactttaaaactccaaataaaaccttggatatccatttttagttttcatatagatgacaattttgaaaaatagtaatactcaagcactctcatacgctactagagataattaagtgctttctggaggacaatttgacaatgcatatcaagtgtccaaagattaactatgtcctttgatccaaaaactatattactaaaaaaatcataatagaaaaataaacaaagatgcatattataatttatgaacaatgatgtttatcacagcactacttatgagcaaaagttagaaaacatcacaaatccttattgataggaaaatgattaaatacacaaaatatttaaaaagttttatgttattaattacaaataataattttagagtaatgatacaggaatatgttcacattataatgtgaaaaaagtaaaatataaaaatctgtacttacagactaatcttgatgttgtaataaaataaaacatatattttatagttacatgcaaaacaaaagacctgaaaggcatatgtagtttacagataattataatattcatctttatttttatttattttccatatttttacaattaacatttgttacttctccaataaaaggaaaaaacaactaatatattacctcctctttaccctaatcctgacagtcattttatttgttgtgccatttttatgcttatacaaacttttaatattttaacatttaatgctttattttcattttaaaaattaatttgtcttaactcattgattcatcaaatacttactgaaacctattacattccagacgctgttctatgtactgtcgattaagcagggacaaacaaaacccttatgtctttgatttatatggcctagaatatggtttatcttggtaaatgtttcaggtgcacttgaaaagaatgtctgttttgctgttttggggtggagtgttccgtaagtgttcaattgttctctgtcttttctggttttctgttgactcgttccattgattacagagaaggatgtggtgaagcctccaactatatttgtggatttgcctatttgtactttcacttttatcagtttttgctacatgtatttcgaggttctgatgttaggtgcatatacatttaagattgttatgttttcttggtgaattgatctttaatcattacagaatgtcctttttgaacctgttaattctttattctatggtcttttttgtcaaatattaatatagccactgaagttttcttttgattagtgtttacatggtatatttttccatatttttacttttaacctataaacatcattatattttaagtaggtttctcatagatagcatttatcttctgcattttaaaatccattctgacaatctgtctttaaattggtatttttagtccacttatatttaacgtaattattgatattgttgaatttgggcctacgaatttctttctaaaaagtttctctaatttttcccttaacatctgttggacttgatctaccaacttattaattgtttcttgttttttctctgtttttcactcctctgttttccctttgctttctattttggtactacctattttttagtattccatttaaatctagctcttgcattttgaccacatgtctttgtaaatattttctggtggtttctctaaggactgagacatagatataaatatagatacagataggcacatgtgaattaaatacatattcacacatattttcacagtatacttggaattaatattttactacttcaagtggaagatatagaaatgtaaccaccacatagctcttttcagcttccccattttatgttgcaattgtcatctagaatacatcaacatacgttgcaaacctcaccagttgatgtcattttatttgctttcaattatcattttaaagaacttaagagaaaaatattgtatcttatttacccagtcatttatcatttctgttgctctttattcagaaagttccaagtttccctctggtattatttctcttttacctgaagaacttcttgcagaccaagtctgctggtaatagatcttcatagatttttttttcttctgagaatatcttacttttcattttatttctcatgggcatgttcatggacatagaattctggttgacagctcttttatttcagcatttaaaaacgttttattgaattatgtctaccattatttctgatgagaaatctactccaattcaaatcactggccttccaactgttttgtgttgtttttacctctggctgctttcaggttattgtatttgtgtttatttttcagcaactttattttcatgtatctaggcagacatatttatttgaatttatcctaatgggattcaatgagcttaaatcttgttgaatttatatatttttccaacattggaaaaattttaaccattatttcttcaaaactttaatgcgcatcatagtctttcttctctccttctgaaaccttgatgatatcgttattagatcttttggtactgtcggaggtcctaaagtctctgttcattttttaaaattttgtatttactgtttttagattgaataattttttattaatctgccttcaaatttaatgacctttttttcccttgtctgcatcctgctattgagtacatccagtgtatttttttattttggttattgtattttttttggttctaaaatttccatttggattgttctaatatgttctatttcccctcatgcagcttttaatctttccatttattttaacagtgatcacgctcactttttggagcatggttaaaacagcttctttgatcattccagcatttgtgttatctcaggttagcatctgttgaatgtcctttcccttgcaaatcattgaaattttccagggacttcatatattgagtaatttcagactgtaattcctggacatattgaatattatgtcgtgaggcacttggttttaagtcatggaaaatattgatgttaactttttaaaggaagcaattgattaagatgaatttagaccacaagttccagctggctcaaatgtcaatttagttttcagagactttgaagtgctatttgaatcctcctgcttctgtgccacccagtaaccagtattagacctgcacagtggtctactttatagatgatttctcaaagcttttgctgtattgtttatgttcaaatatatgcgtgtgaaggttgagggtaagcccaggagtttataaataatgttttgggatggatttccgcagcttcctcagctgaatacttttcctggaactttccagcttcaaagattttcctttctcatcttctgctgagaaaactgaggctttgaattgtctactctgctgtttatattttgttattagttctgccagccagttcaaatggtgaaagaattc

SEQ ID NO: 39 - DNA, 207835 bp, Homo sapiens
gaattcaaccaacacttaccaagaatcctttatatattgaagcccttggttcagcaccttggagaggatccagaaaagacctggagacctattttgttcctaagatatttatagtatcaggtactaacaaactatgacaaagtagaaaataactgtgatatgtagaagtaggaggttcaattaaggagtgagtggaacttgggaagattattcttaccaagagaatcgggaaaactttcctagccagtcaatattggagctgaatcttgagaatgagaagaatgcagacatgccaggaggaaggtgagtcaaggcactacctgagaggcaggtgagtgtgaggactgttcatggtacaaggagctaatccacagcatttatcaagtgcctactgtatgccaggagttgtgcagagctcttgaaacaaattatttcatttgattgagaaaactgaggcacagataggctgatcaccttgcttgaagcttagaagtgacagaatggatgccatgtctggtagtagttataggagtttgtataaaaggtgctgacgctaaatcaagaggactttggatatcaagcttaggaggcaaatatgtccagctcttgagatattctctataggtcttgttactgaaaagattgaacatattagttattagctaaatgtttctctcatcgtagtgatttgggatgtcttgaaaacctgggcttctatggcagaagtgaagatgttcaactgctgttactttttcttaccacatggttcttgcctctaaattaagcagaactctgaaataatctaagaaaagtcttacttcagttggaatcctttgactctggcagaggagaagtaaggagtcttgccacaggtaggcaacagactggtttagaaaggagtccccaccactcacttcagcctgagtaagaaagccctattgtgtggagaatagacagaagaggctagaacaagcacctacaaaccagggatcagcaaaccaagttcagctttccacttgctttgtaaagaacattgtaatgaaacaaagccaggctcattcatctatttattgtctatggctgctttcacacaacgatgaagtgttgagtagctgtgacaaagtccatgtggtccacaaagcctaaaccctctggccctttacagaaaaatgttgctgacctctgaaacaaaaaactcagaaaatcctagcatatccacatgggaagggagagtggccatcctgtaatccaattaccttctccctctccaccctgctgccgcccacacaccgataaagaatctgaacccaagagaggaagagatttgcctaaaatcacagaactggtaagagagcatacttggggtccctaactgttagactaatattccttctgttaataccacaccaatcctgaaaggctaaggtaagttgttttcttttatttttttccttttcttttttttttttttttttttttttttagacagagtctcactctgtcaccaggctggaatgcagtggcatgatcttggatcactgcaacctccacctccctggttcaaaagattcttctgcctcagcctcccaagtagctggaactacaggtgtgtgtcaccgcacccagctaatttttgtatttttagtagagacggggtttcaccgtgttggccaggatggtctcgatctcttgacctcgtgatccacctgcctcggcctcccaaagtgctgggattacaggtgtgaaccactgtgcccaggcaggtaagttcttttctaagcaactattcaataactacttcctgaaacactgggtgcccagcaccatcccttctcaggctgctgtgaggagtacaagttgcagaaaggaagcctgatgccttcccatcatgtggtctgcaccagaagtggtgggagacctcacacagtggagcagtaccctaaaacctgcagcttgcgaagggaaaggatacagcatcataatttccctcttaaccctctcagaaagtccccacaatgcagattgactttacattcctctatgagtccgatgccagcagtcggtcctccagggctggaaatgatttctgcttgtggataatgcctcagatgaagtcgccagcttgcgtttagcagccgtgtaattcaggatgcctacaactctgagcagcactcagggaatgagacacattgaggaaacggcaggcactcggctgccatcctaccctcagcctgggctggggctctgcttaatgagcagaaggtcaggcggcctccccaaactgttcaaattactttcctgctcttcttccccatcaagctcaggtagttaaatgagagcaagtgtgactccactgaacataggaagcaattcgagcgtggggttgtgtgtggtaaagctttcagtgtctaatgcagactggccatgtaggggaagtgtgtggagtgtatgtgtgtgcgggtgggggggtttctaatggttaggaaccctaattatgctcccttagcagttctgtaattttaggcaaatcccttcttctctcttgggctcagattcttgtcataagctagtgggaagaggagataacagagtggattatgactgtttgatccacccccatgagtagattacatgggagcaccatgtttggggaggtgagagatttcctcaaacaggaaagtcttttctggaaatagcggaattggatctggactttttatcagagatttatagaatcatgcaatcagaatgtcacctgaaggtcactgactcccaggtgatgcccagagtgagaactgcacctgaagcatctgagacagacaggctgtgctgagttatcccagcggcacgctcactatttcccggggcgcccgccatgtattcagacaacttcaattgtcaagtaatgattctttacattgaaatgaactcacagttttcagtcctgtcttcaagtccacatagaatgagtctgttctcccattcctcatgttggcactgagggtgtttgctttaggcagtaaagtcccctttctatcccctcttctgtcctcctgatcatggagcagatggatggatgatgtgtgtgtacatatgtgagaagacatgtgtgtatgcacatgtacatatgtgttgggatatgcacaggagagaagagggagtaaatacagcagttctgaattagtacagtataaaagccaggtggaagagagggtagaaaaacaggcaggctgtactgcagagggcattatatgtgaaactcacgcagctagacttgaagtaggagagtgacacagccaaactggcagtttaaaaagatttctctgtggctgggctcagtggctcaagcctgtaatcccagcactttgggaggccgaggcgggccaatcacctgaggtcaggagttcgagaccagcctggccaatatggtgaaaccctgtctctactaaaaaatacaaaaaattagctgggcatggtggcgcatgcctgtagtcccagctatgcaggaggctaaggcaggagaattgcctgaacctgggaggcagaggttgcagtgagccgagatcgcgccactgcactccagcctgggtgacagagggagactctgtctcaaaaaaaaaagaaaaaagaaaaaaaagaaagatcaatctgccctatgttgcagaggagatgcctgcaggaccaggacaggaagattcggaagaaaatattctaagaggtccaagtgagagacagtgagtgctgagcaaatcaaaggacataaagatggagaaacaaagttacctccaagaaatgttcaggagggaaccttggcaagacctgatgactggtgtagagtttgacatggagaaaagagtcagggatgatggcaaggggttggctcggggtgatgggacagtcagcagatggaacatcttcaaaagtctgccgctgccagagagttttattttgtggccacctcagagccctcccaaaggagtttctgcagagagagaagtgatacattaacttcatgagttggcaaggcatgaggaataggaaacactaattacaggccaagataattaaccagcaggtctgggatcagctgcatgtaacctcagctcatctgctcctgaaaatgaccaagggaagatgtggaggaagagtgtgggcaggacattttgcaaatactgagggagcagctgagctcaggccttgatgacacttgagtttgatgttctcggcactttggctctggtttctggagcccttgggggtgccagatgcactgcagccggccagccggttgtccaaacatcacttatgcctctgggccactaattacaaggctcccctttagccttactgctgtgctccattagggcttgctggtggcaggcacaggaaatggactagaggccattagaccatccagattgagaaaggtcaggtcttgcctcttgggacaaaagcctaaagcctagctttataatctgatgcttgaagcaggaaaaagatctcaggactaggaaagagggataagttctcgtccaagcccagccatatgaccttgtgcaagcaaatcatttcacttcacacagcctctgtttgcttaccccttacctaggcataaataagccctggttgggaagatcagatgatatcaaaagcacggaaacaccttgtgaacggcaagtgcattttaagagctatttttactgctgttaatgttaatttctagcacaaacattaaggcacactgaactgggaaggaagaaaacagggttttaatcccatttctgactctgatcttcatgtgaccttaggcaagtcacgtctctccaggccacagtttcatctgaaaactgaaaacgttgatttagatcagttattctcaactaaaattttgcattagaattgccagtggagctttgtaaagatgtccattctccaccccagatatgctgaagcagattctctagagaaaggaatggttctcacgcccactgagaaccattggaatggacggtcaagttttgcctgcctcccacctctgcatacctgctccctccactgctagaactataggacccctctcttaggataaggctggatgcaaccttcagcactgaccctatccttaggctgaggcacttaaaccacctcaggcccaagctctggacctcagcgtcaagtcctccgagccccgaactggctctgatctcttgtctcagtcacatctaaactccacccagacatcaagatgtggtgctcacctcattccctaggagagctgcatgatggccttgtccagctctgcttggaaaggcattgtctggcttttctcagagtctgaaccctaggctgatgggagacctgctgctaatggaaagattgccctgctctgaccacctgcagggattatgcagctatcactggctgtcagacccttccttttgtcatgccacctgcctcacaaagaactccttcccatcctgaattcgtgttggacagcatgatgggcttcccaggactacatgtggcctgttgtgcagcggagcaggtggcattttctgcctctaggctgcctactctatccttccctactccaagcttattcctacagtgttcagctgcagccaatcattttgtccatttctgccccacatgtgatttcagtggttgctaatatccctcagggctgaaaagaaccacagcggtttctccggacttcaggaaaagcactgagcctctctgggcctgtttgctcatctgtaaaataagagtggcaacctctgccttgcaggagcattagctgactcaaatgctcctccccatctattaactgaatgaacttcctgtcctctggccttaggtcttaagtgttgcttcctaaagaaggtctccctcacaaacattcccccgcaactcttctgtgctctgatagcaacctgtacttttcctctgcaactccttaaacttgtgtaattttcaattaccagttgaaagtctttctcccggcctgacacagtggctcatgcctgtaatcccagcactttgggaggccagggtgggtggatcacttgaggtcaggaattcaagaccagcctggccaacatggcgaaactccatctctactaaaaatacaaaaattagccaggcatggtggcgggtacctgtaatcccagctactcaagagtctgagacaggagaatcacttgaacctggtaggtggaggttgcagtgagttgggatcacatcactgcactccaggctgggcgacaagaatgaaatcccatctccaaaaaataaaataaaataaaaaataaagtctttctcccttactatttcataagtgccatgaggacaaaaactgcctaactcatcactgttaaatcccccatacctggaacatagcggacatgaaatacacatatctgatgacagacagatgaaatgttgaatgtgtctgacacatagctggtgctcacgaatattattctctcctctcctctcctctttgagagtagaccactaagccctccacaggcagtgatccctcagcacagagcaacacagagcagagctgagctgctgcatgaggccgagcccagcctctctcctgggtcctgtgtgatccgaaacccaagcagcagccccaagtcactcgaagtctggtgagagtgatgcccatatcagcagttatcaatcctgaagtattcagtatttaagaattttcatctggaaatcttttttaaaatagtggtgccttggtcctactcatagtgattttcatgtagttggtctggaatgtggcctggtctttggtatttttaaataatttccctaggtgatcccaatatacagtaatggatgagaaccactgatctggttcaatcaccatttttcagatacaaaggctgaggcgcgagggggaacggagttagcccaagaacctccaataccttttgcagagctggagctagaagtagaagagctaactttccacccacagctccttccactgcaccaagtaacaaattgaaatcccctttatcaataacagaggctgctttcctggcatcagacaaagctgggagcagagagcttgttttttcaccctaaaagatctgttattaaaagcctgtttatgcaagaagggtataattaaaagtgaatgagtgccattttttatcgcaatgaatattaattaaaggaaaacactgagtcaatactcattagaaaaagacggaggctgaaaggcagactgctcataccagggttgtcaatcacatcaagcagtaatgagatgacaggaccctaatagcaaaatgttgctctattttcctcaaatcctcttggatttagaagttagccaaaatgcaaatctcaggctaggctccgtggctctgcattctgcttgggcacaggactgtcttgcctaggacacagccctccgtgggagtcaggctgtaaatggttttacttatgcagggttagaatgctagagaagtaagtggcctcttcagcctccctagagagtgaggggccaaacagatccagtgattcttgccacattgttcctgtccctgagccctgggagaaaggcaaaagcacagactttcccaaagaagaatcctcaagtcatcagcaggtcgccagagctgataaattaggctcaactgggaggcttttaaaaatgtgtttgccaggccttgccttggtcctactgaatctgaatcttttgggctgaagagacgtaaatgggagtaagcatttaacagattctcatgttaaactctggtttttagcccagctcaagatctttgctttcctttgtcaattggggtcttagatgattttagtcatctaagaatcaatcaatcattgattcattcattcagctgataaatatttatcttcattaggcactgtgctagtcacacgtgaagacagagacttgacctctgttttctagtttcctgtggtttaacaacagaaattaccatcgtgatgactgcgccatgaaggaggaacacaatggtgagggaacacagagataggagagctcagctctgaatggggagtccatgaaggcttctagagatgatgaatggagaactaggttgagtggcatgttctcccagcaaatgtgcagagccttagagaggtggctggagaatccattttaactggaaggcagagggtgtggtgtttcatgaggctgatgagtgctggatggggaagagctcatgccatgtaaaggcatgtgcatttcatcatgtcaaacacaaattgtacctaaattgtctgacggaatacaaatatcagcaaagaggaaaagaagcgaatggttcaggagactgacacacacactggtgggttctagtgggagcacatgcagagacggcaggtttaaatgcttcttcattacactggacattggaaccaaacaagtgtttgggggagtgatatggtttggcttgtgccccatccaaatctcatttcgaattgtaatccctgcatgtcaagggagggaggtgactggatcatgggggcagtttcccccatgctgctatcatcatagctagtgagttctcatgagatctgatggcttcttaagtgtttggaagtttctcctttgctcttctctctcctgctgccttatgaagaagatgcttgcttccccttcgtcttccactgtgattgtaagtatcctgaggcctccctggccatgtggaactgtgagtcaagtaaatctctttcctttataaattacccagtctggggtatttcttcatagcagtgtgaaaatggactaataccgggaatttcaaaagaaatgccagataggaagggcacatccacttaggagccaagatagcaaatatttaagtaataatggaagacaattaaaaaaagagaccagaagttcagagaaaggagtgatatcttcccagagaagctgagtagatcctgagcaggcagggaggagaggaaaaggaattttaagctgggcaagtcttggccctgggaccagcagctgtgagcaagggccctgaccactattgtaaaccgagaacatcttcctgggctttttgacccatggctgtggacaaatgcctaacaaattcctaaagagaagggccccatgtctggttgcacctgcacaaacagagcagcaggatgggtaccagttctgaccaccaggaacaggtgagctccgcactcatgtgggtccatgtggaacattttagaagagagtaagtggattctattttttctgagactggtcttacagaattggggttcctcagctctggcagggcctgcggagctcctccataccagctctcacaactcagagagacgcgagatttcaaaatgaatgtctgagggtacagggaccctcccactatcactctgccatctagtcccacctgaaatgagaccttttcccttgaaggacctgttctctattcttctggttagcaaacccagcttcacattgcattggactcacctggggaattttaaaacttgttgatgcttgggtcccacctctagagattttttttttttttcttagagacagggcattgctttgttgcccagactggagtgccatggcatgatcatggcttactgcaattttgaactcctgggctcaagcgatcctcctgcctcagcctcccaagtagctgggactacaagcacataccaccatgcctggataatttatttttgttttttgtagagacagggtctcactatgttgctcaggctggtcttgaacttatgatttcaagccgtcctcctgccttggcttcccagagtgctggaattacaagcataagccactattctaggccagaaattcttattaactgatgtggagtggggcctgagcattaagccttgtaaatattgcccattcttactctcatttagatagtcaaccaacagatgttagaaggaagttaaggaattattcagcaattgagatgttcgctaagaatgttattcccattttaatgaaggagtgttttctttttcttcttattcatatcttgttgattttcctttcaaactccaaaagcagttcacacttattgctatagtccaaacaacacaataaacatttttgtatatctaaaattaagctatctatagtctcccttatttataataacgaaaacaataacttcctactacccacatcctacatagggatcatttgggggttgggatctagcataatattgattttttatagtccaacaattattgagatttaattttaaattttctttcgttactcaagaatgtttctctctcttatgaattcccattgtattcctttttcattttaaagattagagctttcaggaattcttatagtgagaattgtgcagacttttgtatcctgcaatacttttattttgatcttgcctttcaatgatcacttgagtcggtacagaattctgggttcaaaattattttccctcataacattgaagatactatactattccattgtctcttgaggccattattgccaaccagaagcttgttgtttattattgttctgttctttctcctttgtacataatctttggtttctttctagaagcttttatattgtttttgccttcgttttccaaaatttggctagaatatatctagggttgatttgtttcttcccactcattttgcttagaaacctggtgtgccctttcaatctaaaaattctggcactaggctgggcgcagtggctcatgcctgtaatcccggcactttgggaagctgaggtgggtggatcacgagatcaggagttcaagaccagcctggctaagatggtgaaaccctgtcctgtctatactaaaaatacaaaaaacttagccaggtgtggtggcgggcacctgtaatcccagctacttgggaggctgaggcagagaattgcttgaatccgggaggcagggattgcagtgagccgagatcatgccactgcatgccagcctgggcaacagagtgagactctgtctcaaaaaaaaaaaaaaaattctggcactaggatattatcttatattgtgtctttgatttttttctcattcattttgtctgttctctccatcttttactcttattattatagataccggaatttttacactatcctccgaatgtcttaactttccccatatattctatctcttggtccttctgtttgtttgtttgtttgtttgtttgtttttgtttgttttgagatagagtctcactgtgtctcccaggctggagttcagtggcgcgatctcggctcactgcaacctctgcctcccgggttgaggcaattctcctgcctcagcctctggagtagctgggattacaggtgtgtgccaccatgcccggccagtccttcagttttaagtactggcagaatcactccattcagtcttgctgcacacaacctttctcttcacgtatatccaatgagtctttgcagcccatttattgactttcttctcaaccagcttttttttttcatttctaagatctttaattggtacttttttataacagcttgttcttattttataaatgtaaatattaattatagtttctacattttatttactgaattttctctttcctatggtgctattttctgttaagttttgttcctttctttctcaatatttgtttccttaaatacttagcgattatttgtgacatattcaactttgtattagagatgactttcaaggccatctgagagtgctctttctttaccaaaatctgactctagtcctgtggtggaggaatgggatatgttctaggcaatgagttgtggctgtgcccagacttgggcatgggaggtggaggggttccagcttctcttggatgtcacaggtacatccctgcctctggggccacagcactaggaggcactgtcctgtagcactcattcatccggcttgctgcttggctctgcgaagggagttcaaggtgaagactgacagcactactagtgggtcttgagaccctctaggtctggggaagtagtctgccaatgctcacatatagaggaagcgggcctctctttgaattttattagcactgggctcagagacacttgggaaatacatgaacccaaatataatccaaagacaaaaaaaaatcctttaaacatttcactatgttgcctttccttattctagggtgaatgcatgagtttaaaaggccagaccctagtggttacgtgtgcatagttaacttgaataatttaagtgttttccacaagacctgaagcttaataaattagagccactatgaaaagacattcaaagaatgtattatagtcatcaaaagtcatacgctctcctcttttcccctctatctctactgcttctctttttaaaatcagattttaagttagaatgggtcttagaagccatttacttcaatccctatattttcacttttttgaggttaatacattaatatttcaaggttaattaaaacattttcattgcagcaaatatggaaagtaaagataaaacaatatgaaaaaagtcatccataaactcattaccagagaccagatcagctccataatgtataagctgtggctcaggaaggagaagtggtgggccgggaatctggctagcagtgagtaggtcatttgtcaagtcttctccatgccaatcctctgtccttccccctgaaacaggaagactttgttttttctattggttggagaaacacaagattgacaacaagcctgggtagggttgtggttttgcaaagcgagtacagcacacagaagagaaggagaggcaagggagttgggagtaaatacaaggaagttgtagcaatagaccctgaaggaaacattactgtcttacccaagaagcctagatgaaacctcaattctgcctgctcatgccctctttcctgtccctaattgtgttggtcacagtgtctgtcttttgaatctcatggcctctcagagctgaaagaatcattctgctctttgcttgtcttaaagtgtgagtgtggtacgggctttgtcattccaggtgtgaggccgtgccaagaccagtctcgggagagctgtggtggctgtgcgattgttcccctgcactaccaggaaaactcttctaagaagcttcaatgtcacctccaacttgaagtcctccttcctctgcccaggtagtgactcaatcccagctctgtgttccttaatacttagggcatatttctcctacagcatttatagggtgaatgtttatttataggtctgtcttaactgaacttcctaaagacaaagatataacagctagaacaattccaggcacatagcaagggattaataaaagtttgatggattaatgaatgaatgttcaaattaatacacttcactaaggaagcttaccaaatattttggaagcatttttgtttatatagaaaacagccccaagaacaaataagataaattcacctgccatactaaacatgatataaacattctaattaaggctttcttctgttaacatagacatttattccctgacatatcctagaatcaagggtggaaagcatgtgagcagtcatttactctaacaccacaatcactgcttgaatttattctgcagaatctcagaagagtgctaatctagtgcaaactcctccactgtcagggatacacctgctctccaattcacctatttcaaactcaggaaaacactatttttagaagaaaacattttaggaaatggaaagagaattgaatttaaagttaaagatttagacttgaagtctagatctgctattagccagcttttgtgttcatctcttcactatcccaagccacattgtattatcttgaaagtagaaataataataactgctatcataggtgactgtggacacaaagtgtgaaaatgaatataaaagattttgtgaatagtgaaacattgtgtacatttaaggaaagaaaggaagggaggatgggggggttggtaaaattaaagtgatccttctccaaagatgagaggggaatcattgcagtcatggaatatcatattacagggaacaggaatgccttccttgaggttacgtggggagtcagcagaaggaatcagttttgtaactctaatctgatgccctgtctttcctgcctccatcctcccacctttctgatcctgtgtctctcatagggagctatgtgctttgagccacactgcctgggtttggattctggctctgccattgatcaaacctcaaaaagtacttaacttctctgtgtatcactttccacacctgtaaaattggtgtaatcatagtatctccacgtagggtcctttcttccctcttatccaattttttcttcagggtctatcactacaacttctttatatttactctcgactcccttgcctctccttctcttctgtgtgctgtactcgctttgcaaaaccaatactcttgttaatcaaaactctccttttactctctgcctactaccatgcaactgagaggagcttgagaaaaacccatgaccacacaaactgccctgctttaaatataggacaaaggaccacaggtgtgcccttaaagctacctggctaccatattgtattttcttattctactcactctcctacctgctagaaacaattttgcagcttcccctctcctcaatctgccattgcccacacctgcggccactgaccttgctttccacatctctgagggaatggaaacaatcagacgagctttctatggaatgtcacaaatatatccataaaactgccagcatgttcaaacgaatcctctaccttcccttttattactaaagacaaattttccatctcttttctaaagctgttatgggttctttgtgtattccaaaaattcatacgttaaagtcttaatccccatggcctcaggatgtgaccttatttggaaatgaggtcattgcagatctaattagttaagatgaggtcatactggaagagggtgggcccctaattcaatatgactgatccttaaaaagaggaaaagtgtattcacagacgtgcacatggggagaatgccatattaagatgaaggctgagatcagagtgatgcacctacaagccaaggaacaccaacgattaccagcaaacactagaagccagggagcagcatggaacggattctgcctcacagctctcagaacaaccaaccctgttcacaccttgattttggactctcagcctccagaactgtaagacaatgaatttctgttgcctaaaccacccagtttgtggtactttgttatggcagcctagtagactaccatgaagtccaacccttcaattacctacagtggctaggtcttaccccctttcaactactcaaagacgttgttttaaaaacacttccttttctcccctatcgtgttagtttttcccactctgttgcatcattcttattggcatccacacaggctgttatttgtcccatcataaaaaataatagtttttagcttcctttgactccacttcctctgccttccaccccctcttttctctgtagtactttgcagcaaaaaatcttgtgttgatatattcactgtctccagttcttctcctattttctcttaaagagactcgaactaaggctttcatgctgatgactccacatgaagagctcttgtccaggtcaccagtgactccacattgctaagcccagtggttgattttcagccatgctcctacttaagccaccggcaacatttgatgcagccaatctttgcttcctccttgaggcatttcctttccttggcttgtgggacagcaccactttgtctttctttgtcctttttcactgactgctccttctcattctcatcttctctgagactcctgacattggagcccacagggccctgtccttggtcctcctctgtgtgtgcatacatttcctcagcaagctcttccaggcttaaggttttaactaccacttgtgtaccaaagacttctaaatgtataccttcagccaagcctgttccctgaatcccagactcacctgtcctgctgcccactctggtagataccaataagcttaacatgtcccaaactggactcctcatcttcctccacatgcctactcaccagtattcttctccctctcagtaatggccaactccatccttccaggatctcaggctagaacctggtagtcatctttaactcttcactttctctcactccacagactcactaagtcaagaagtctgattggtgctacatttaaaccatatctggcatctaaacgtttctcacttcctctgctaagctatcatcatctctccctagaattatttcaatcgcctccgactggtctctggacttccactttggcaccctatgtcatgggggtaactggctggggctgacttcgtaggtggtaaaggaatttatcaagagagttgtaggtacaaaaaggcagatttattagagaaagcatgaaatttttttgcaaggtggcagtgggcagcacagcagagaaaggactatctgcaaagatgcaggggctggaggaaagttttttagcatcctgctgaagggggatatgtgtggaataaggtcattgtgcctgccaaataaggtcatcatacccatggattgttctcccccacctggggccccttcctcattgttgcttccttaccttctcaggattccacaccctacagtccatctcaactcagcagtcagagagatcttgtaaaacacaagttgcattaagtcagctcacttttaaagtcctccagtggctccctacttgatcctaccggatttggagagaaagccaaacccttacagtggccccttaggcccttcatggcctctgcccatccttttatctctgacctcatctcttttattcccctccttcctccactccagccacaggactccctgctggccctggaccatcaaagttgctctcccctgagagtccatgcactggctggtccttctgcctggatcgctgtgcctccagctacccacagggataactttcttactgcttctgcttaaatgtcactacctcaatgaggcctacctggatgacaattatttaaaattgtaatccctgctctcatttccttttcttttccctgacccatcacctcctaacatacaatataatttacttattcatgtgattatcatatatgttctgcctccctgtgctagactataagctctggagggctgggatttatttttctgttttgtttattcatgtatgcaataagtgtttgtgaaaggaaaatacatctcaggacccccaaatcactaagtgaaaggcaaaagtcaagctgggaactgcatcaggcaaactgcctcctcttttaatcctaaataagatagctgcaaatatttttttaaaaaactatatccctccctcacaatttgcctgcaaggaaattcattgtgggcctcaagatctttgccctaaaccagttctgtggaatttcaccctgacaacgtaaattgatagcttatcttcataggtgcaggacaaaggacagacagaatcaaggtaattcctctgctcacctgagacaaatgcatatccaattgcttcctctgtcgtattgcttatgcaaaaatgcagattcactgagccagactaaggcataaaagaccatttctcctctaccccttcttatatgtagcgtgtgtcttcagtgaaatattgatcaaagacccaaaagaatgcaagcttttgtctcttatctacctatgacctagaaacccccattttgagtagtcccgcctttctggacagaaccaatgtatatcttacatgtctcatgtctccctaaaatgcataaaaccaagctgtgccccagccaccactgggcacatgtcattaggacctcctgaggctgtgtcacagatgtatcctgaaccttggcaaaataaactttctacattgatagagacccatctcagatacttttgtattcacatactcaaaacagatttgttggatgagtgaataaatgaatggatataaaatttttagaatagtgcctggcaccaaaagggtgcttaataattatttgctatcatcaatattactgcccattgttcagatcacatttgcattataaagatctaggaacttggttggcaaagaaccccttgaaggaaaagaccatgggcgaggaggaaaacgcagggaatgtttgcggattaatgaagctcatccaagactcatttatttccggtagactttgcatgggctctttgatttttccccaatcgatatgttatgccagccttgaatggatcccttggacctaaccctggcagagctctgctaaaatcaccgctctgggtttctcaggagaaccacaggcccaatttagctagcaggaagtaaaaattaacaacttcgaagaaacctcaacctatttctgctgttatctcatttccagaaattttctgtctttaagaataaataaaagaagtaaactctagccaaagagctggtaatggttaatgctactaaacaaagaataagcaggctctgcacagtctgtcaggatattccagtgatcagtagaaaatacaaatcatttaaaaattgtttttaatagaagggcttacaaggggactgacttaataaacccatgtgacttctgctttacaggatgactctggctgtggcttttaaaacagagtgtagggtagaagtagggaaaccagctaggaggctactgcaatcatcctggagagaagtgatcacagctcagatcacagcagtgacagtagaagatgtgacaggtgggtgggtactagatatgtcttgaaaaagggagtcagtaggacttcctggctggccggatgtgtgatgtgtggcatgagagaaaaagagaggtcagaaacaccagcacagctttggagctgagcatctggaagggcagagttgctctcagctgggttagagggagccctcagagcacctcaccccacccctaggacactgctgatgttcagagaatgtgtgcgtgcggttgccttacattttttttgtacatgaatatttcacgtcttttttattttagtttattttattttatttttttgacagaatcttgctctgttgcccaggctggagtgcagtggcacgatctcagctaaccgcaacctccgcctcctgggttcaagcgattctcctgcctcagcctcctgagtagctgggatcacaggtgtgcaccaccacacccagctaatttttttttttttaatagagacagggtttcaccatgttgcccaggctggtctcgaactcctgacctcaggtgatccaccgcctcagcctcccagagtgctaggattacaggcgtgagccgcatgtcttctttaatgcagaactgacatgtatttttcaattttctcagaagcaagagagaggaattcaaaatccctaatcattaattcctcccgtccctgcctttttcactctgtccagaaaaattagttttctgaataattttcatggaacagaaatagctcaagtctgacatgttcttcaataaaaatgcagatattagtgaccttcacacacacagagcctctcccgagtgaacatagcccctcaacgtgcaagtcttgcctgaatgcctcgatgtccatttaaagccacctggtaagaggagcaggtatttctgtaactgagaggagtattgggaagaggctagagacaacattttatatttctgagcccttgggataagaaagagccccattttcttgcctgaagtcctctgagcagttagaaccactgggccactgctgctcatctgtagcccatccactgatggctccttgcccagacacagagcctgacccagccagtggacctggagaggaaaaggggataagatgagaaatgggagttgagggcctcccagctccccattactaatattaatttactttctatatgcaactatggctatgggaatttaggaccacatgaagcaataagatcaaatggaaatcttgacctgcttgtttgggtgaatcaattttcctggaaggctcagggcactgtggggaaaaaacgcatacgaggtgaaaacatggctgttgctagagcccaggagaccctatgagttcagtcaaggctgggagagagtcaggggctctaccctgtgacccccaggagagtttgcacccaccatgtcacaagggcactgctatatgctcagaagggagctgtgttacgaattttcaaatgattcactgctctctagatcaaggttgttgttatcaagcaaaagcagtaggaagagtgtgtgagtagagcactccgtagttaacagaaggtgttcagatacttgctgatttgattctcaaactaccctggactgtcggcttcatcaagacagagaatcatgtctgtcccattcattgctatcaactgtgctaaggacggggagtggcacgtaacaggcgctccgtgcatatttgttaaataaaaataaaagaacccaataagataagaaataggagttattattcctattttataattgaggccgagagtcccacagttaataaacggcagagtcaagacaagactgagcatcttaatcccaaggtcattgctagctattttgtcttatgaagcttctaggtcacaagcttcaggatgcaaagaactccaaaggtaggagcatatggaggagctgtacagcgcagagaaaagcaggcagagtccctggagcttcccagaacacagaaagatttacaaagaaagctcaggactgagatgtggacaccgacatggcaagaagcttcacttcctccctgcgtggccaggacacatccccagcgagcagggactcattggggatatgtgtggctctttagcctcccctgcaggagagtttcagaatgcaccctctctaaggggctgaagtgctcataggaaagcccagatctgatggatgatccactattgaggtattcctaaacagtgggatgcatcacccccacttctccagaggaaataaccaagagtttagtcttactacaaattagaaagctgctaatgtgcatagctcgttatgaagtacaactataagacattgggttcttaaagctgagaggaaccctaaatagtccatagcctgggttcctagataaaaggtctgcgaagctgctgaaataatctgcatattatgagtattctggaggggattgtccatgactttcatcagatcctcagaggcgtctcagattcaaacccagccacaggagggtctagaattacctcctcagcccctcaactaagcagatttgctcaaagccgcagggatgggaagtccgtctttcccaaggcagctgaggtcatttcctgtgatcaattcctgctccccacagagagtgaggaatgtacagatggttccactagaacccgaacaaaacaactccctccatgtgtccggcatatgaggtccaaaaatgagctgtagggtgggagtactgggacagccttcaaaatgcaccagccagcacggaaagggctgcttttgaaatttgtgcatttaaagacaactaacgactagtttcattgcctcccccaaagtgaagtttttaagtgacagattctgctcctctgtctcataatattcttacataaaggttaggcatggagctgatggcacccatcagccccaaattcgagtagaccacccccagaatgaagtctaagtcatggagacaaagccccgcgcttgtgctgaatgagatcctctagtgctctctggtggctacgacttgttactgcacctttcacaacacatttgtacgaagtttgtatttctgattttttttaagtattccaaaactgaaatcagtttaaagtcctctctttgcttacatatgagttggggctcaaggattgtataatcaatatgtcatgtgacttatcaatggcagagccaacactggggcttaggcctttcctcttgttcgggagctgtttcccactctgagatttgaaggtgggtgcaagtgaaacatggtggagagcaggaactgccaggctcagggtgggagcaagcaggtgtgttaaggatatctccggggcacagagcagatttgagagttgggggcgacccaagagctgcacaggggccaaatcaccaaaggtcctttatgccaggatatggagcttagcgtctgtttgtaaggaggagagccccatgaaggattttaaggaggagagcaatgggatggggtcaaggcagcagtggggaggatgaactgggaagcattaaaaagtaggcccacaggccggacactgtggctcgtgcctgtaatcccaacactttgggaagccaaggacggtggatcacttgaggccatgagtttgagaccagcctcggcaacattatgaaaccctgtctctactaaaaatacaaaaatggtgcatgtctgtaatcccacctacccagcaggctgagatacgagaatcttttgaacccgggaggcagaagttgcagtgagctgagatcccggcactgcactccaacctgaacaacagagtgagatcctgtcccacacacacacacacacacacacacacacacacacacagaaaaagtatgacccacagcctgggctaaatagcaaagcctcatctctacaaaatatttagaaattagccaagtgtggtggtgcacacctgtagtctcaggtacttgggaggctgagttgggaggatctcttgagctcagaacatgaaagctgcactgaatcgtgatcataccactgcactcttgcctgggtgacagagcaagaccctgtcagggtgggtgtggagtgggggcggggaagtgtggtccagggaaagtgtcagaatctccaggagagacagcttataatgcctgttcctacccacctccagagactccatacagtcggtctggactagaactccagtcacacctttagtaagcagaaagctccttgggtgtttctgacacaaatgattccagagccacacttgaagagtcactggaggagaatgagaggaggaggcagtcaaagacagaggcaatttgcaagggatgaaagggaaagagtgccttgagatttcagctgaaggggggcagtccggggtgtaggaaggagaaaggagaacagacaatgtgtgaaaaactaaaggaagattgtcttaagagggagacaatccttcacaaaaacatactcagcaggaaagttaaagtaggtgtgaacaaaaaacgggttcatacctactctgtggattggatgtggccactcggagggtccctaatggctccacctggcagcagttttattggaaaaacgagggcagaatcagacaatagagaagaggagctaattggagaagagaaataaagagaactcaggaaatattcctctctccagaagcttgactgggaaagaaaacgagaaagaggatgaaggctgaatgggaagggaaattttgtgccacagaaagattttgttttacagatgggaaagatttgaatatcagtctaagctgtggaagacgagcaggctgagagtcacaagcagtggatacaagacagagcaggcatcgctggagaggggaggttcctgaggaccaaggaggaaggccccttccctcttgaggcaggtggctagaagcaaggggagagtgtgagggaaaatagatttgcaggttgattaaaggcaaaggcaatgaaaataaatgtcctgaatacaaaagctcatttggtaaaatttgagatactattaatctgggagaattgatgagttcattaaacaactgaagattcaaaaagatatttacaatctagagtgaagagctacaaactggcttctgtagtgtaagtggaaattctgcagttgatttttaaattagcttgtgcaaatacaggagggtgacttgatgtaatggcaaatgataacataaaaaattaattgatggtatctccatttgactaaaaaggcttaggaggctttgaaaagccaagaatttgaggttatcaatgtgggttctcaggggtttgcagaattctagcctaacaactattataccaattctttctaaagatgcaaaggcaaggaatagtgggtggtgtgattgttgaggcaacttaatctatactgttctttataatattttaatgtcctttatttgcaaaccttgctatttaagctataattggaaaccagttctctgtgatctatctcaaaactgactataccaaaggatgtggctacaaatgaggctcataaacctccctgacaacctgggaattttttttttttaaatagagtctcgctttgtcacccaacctggagtgcagtggtgctatctcagctcacttcaacctccgtctccaaggttcaagcgattctcttgcctcaacgtcctgagtagctgggattacaggtgtgcgccaccatgcccggctaatgtttgtatttttagtagagatgggggtttcaccatgttggccaggctggtctcgaactcctgacctcaaatgatttgcctgcctcgccctcccaaagttctgggattacaggcatgagccaccatgcccggcctggaaaaactttttaagaagtgtccccacagaaattccaattgattaagtctgggcaggggatgaggtcaatgaatcattctgatgatcagttagatttgaaaccactgaactgcgtaggaaactagtcattaactggtttggaggtgactggttcccatcctaaacacctacagagagatagaacttttttccttgtgcttcgcaagcattcagaacaattagattgggcctgtagtgggtatgacaaacttatgtgcttgaatctgtggctaattatgatttactagaggcatttgttggtattggatataaaaatgtagaaagatctgcttagacttataaaactcattttcttaaaacaattcagttttcaaaataaattcaatcagtatgtatctattctttttaatattttcaagtgaatagtcattaataagcaatagctatgtgtaatgatgctgtggatgttatgaagagagatgaataaagtcataagaggtggtttggaactaactcgtcatacccagagaacctacattttaaaaaatgaacaaataatttatcatctgtattctttaggtttaattttattagtcgtcatatttaagttatgattgatataccatgaagtccatgcttcgtaagtgtattgtttgatgggttttagtaaatctgtcccgctgtgtaagcaccatcaccgttctagaacacttccattttctgacagcaaagtcccctcctgcctgtatacagtcccacagcctcagtgaatctctgatctactttctgtctctattatttttgccttttctagaaattccctataaatggaatcataaaacctttagggttttgtgatgggcttctttcactcagcataatgtctgtgaggacgatcctattcttcgtgtgtataagtgtaatcagtcactccttatttttcgctgttgcatttctgtctgtgatccatttactaatcaattttttgtgtatcatgtgaagtaagactctaagtttatgtatttatgtatgtatgtatttatttatttttgcatctggataaccagttgtcccactactatttaaaaagaccatctttccccattgagttacctgggcacccttgttagaaatcaattgaccataagtgtacagatttatctgtacattctctcttctgttccatcaatctttatgtctgttcccacagaaagcataagtattaatttatgaaacctttgtttcagttatataaagtaggctattgtgtaaaatgtatttcctactgaggattatggtaaaaatattttttaaacgacatttgtctagggagtgccagataatattcacaataagacacaaaaaagagtcctagaataaataggctgttggaaacccataaagattgcagaaccaggtacaccctcatgctttgcagaaggggaaactgaggcttatggagagaaactaaccttcccaaggttatgacagaatgcaagactggaggacccctgcctggaagaccccatcttcccactgcacctcccagcttcttctatctcctccctccaccaagctcctgctggcagcagctggcagagcccacgggggcacagggctaggcagcagcccactggtgctcctgtcttaacccctctcctcagcctcctctctgaatctctctgaaaacagtctccccagatgctgcagagccctgccaggtccagatgacagttccctgggctcctaccccttccttcttcggagatgaaggagctggcttttcttcaaggactcttctcagaatggaaaaaagaaagcagtgccaccgacgtcaaatggctcttacacaatggtggagtcttgctcagaattgtgtaaataactggggaacatatgaattaaatttccctctacttacccagggatgtaataagtcaggactgtgagaaaggctgccactcggccccagcactcagaacacctgaaggagttgtcatgtccccaaccctagtggcttcttaccctggagcatttctatccctctcaagttccaagggctcctatgctctgcaaggcacccacacatgggcttgcctctgtccctgacagggtggcctcggtcatgactgcagcgtcccaggcagcctccaccccttcttcatagggagagcatgcttccaacctctcagacagggctggatatgtctgatcattagttcattcattcatcccttcactcaactaatacttgttaagcactgtgttgggaaatgctgtgctagcagtgggaatgcaacagtgaacaagaaaacacagtcctgctctcatgcctagtgaaagaactttctggcattccaagttagcaaagcttttagagacaggtgagttcctaacactggaagtgttctgcagaggttgagactcaagcatcagttgaagaattgaatggtcagcctccaagatcacacccaagtgcaaggtttcaggaggcttttaagtgccttcaacgctgcacctgctctcttcctccctcctgcctgtgcagttctcttcggacagcacctgcagaagctttcagccagaggtttctgttgagggcatggatggtccctggagaagcaacgatgagtctgagtaaagcagatgctcatttttcctgcctgaaaaaataattttaaaaaatcattataattttttaaaatgttctgtcttctctgtcccttcagaagagatctgagaactttctcctgaatgtgaataaacctgaagaataaaacaaaaatactcaaatataaaagttctagaagagatgttcccattgggagaaattgcataaagaatacatgggaaatctctgtgttatttttataactgaatgttataaaattaactcaaaataaaaggtataactaaacaccccaagagttcttgatgcttgtaccatgggtatgtaagatgttacaatgaggagaagaggagtgaagcaggctttagcaagggagctgcagatccaagcctgggagacaaagagagggcatagcctgggagacagacagatgacagcctgggtgagagagagatggcatgacctgcgagagacagagatggcatggtctgggagagagagagatggcatggcctgtgagagagagagagatggaatggcctggacaagagatggcatggcctgggagagagagagatgggatggcctgcaagagagagatggcatggtctggaagaaagatggcatggcctgggaaagagagatggcatgtcctgaaagagagagagagagagatggcacgacctggaagagagagagagagatggcatggcatgggagagagagagatggcatagcccagtagagagaaatagatggaaggcccaggagagagaggtggcatggcctggaagagggagagagatggcaaagcctgggagggaaagagagagatggcatggcctgggagaaagagatggcttggtctggaagagagagagagatggcatggtctgggagagagagagagagagatggcatggtctgggggagagagagagagagatggcatggtctgggggagagagagagagagagatggcatggtctggaggagagagagaaagagatggcatggcccaggagagggagagagagagagatggcatggtctgggagagagagagagagagagagagatggcatggtttgggggagagagagacagagatggcatggcccaggagagagagagagagatggcatggccagagaagagagagagaaagagatggcatggtctgggggagacagagatagagagatggcatggcccaggagagagagagagagagagagagctggcatggtctgggggggagagagagagagatggcatggcccaggagagagagagatggcatggccagaggagagagagagagatggcatggcccaggagagagagagatggcatggtctgaaagagagagagagagatggcatggcccaggagagagatggcatggccttgggcatgggagatcagaacaggtctcattcctccaagataaagggtagagggagaaattgctccagcttctctaatttctcctttcctacctacaacaaagccctgccctctataaaccccaccccctccccacccccacccctgcagctccagagccaggaggctgggactcaagttcagagaagggaggatggggctcaggctgaagtgctggctgcaaaagcagagggaaggaaaagaaggagtgagggaatttccccaaagtctagaacaaacaagctgagaggggagaattgagcaaatttagtcaattccggtgtggggggaatgttcctgggtaatctgggaaactagataagttgaaggttgcctgtgattgtgtttgtcaacacacaggtgatctagtggaaagttacatggacgatgaaaaaaaaatggctaacattcaggaagcattcaagtcaatggctgactctacactaagcagcttacatattatgtcttcatgaagtaggcattattccccattcatacatggtgactgtatgtcataccagtacctgagttacatggacacccaaactgcctgaggcctggaatcagactcttgctctatccactaggttgctttataacctcctgggctctgtcactgcctacaagctttacgacttccagcagattaacttttctgagctttaggattttttaccagtaaaagaagttatgctaagtattccccaaaagattttgaggttcagataaaatagcaagttgaaatgcaggttgcttcatgagtctcaaacaccaacctaatcgctattagtagtggccatggcctctgacattcacaaggccagccacttagagagtggacatttagttctcagcaccactgggttgacattttaattctgttttaaataaaaccattactcactaatgtaactaatgttttattgttgctaattccagaaccattacactatggagccagaagttaaaaagaatttaactgaagaccaaaacatgctcagtagcaaatgcctcttttataaataatttctgttcccaattctaacttggaaattaaacaatacactcctgaacaaccaagggatcaaagaagatatccaaaagtatcttgagagtagtgaaaatggaaacacacataactaaatgtgtggacttcaacaaaagtggtcctaagagggaagtttatagtaataagtaccaatattaagaaaaaacaaaggtctcaaataaacaacctaactgtatacctcaaggaagtagaaaaaaagaacaaactgagcccaatgttaacagaaggaactaaagattacttctgaatacataaaacagagactagaaagacaatataaaaaatcaacaaaactaagagatctttttaaaaaaggataaaattaacaattatctgggctatctaagaaaaaataaagagaaaactcaaataaataaaattataaatgaaaaagaagacattaaaagtgataccacagaaattcaaagaatgtattttatgtcaacaaattggataatctggaataagtggataaatccctaaaaacatacaacctaccatgaaggaatagaaaatctaaacagtccaataatgagtaaggagactgagtgagtaatgaaaaacttcccaataaagaaaagctcaagaccagatggtttcataggtgaattccaacaaacatttaaagaggaactaaaaccaatcctactcaaactcttccaaaaaaaaaaaaaagatgaagaggagagaaaacttcctaattcattttatgaagtcagcatcaccctcatacaaaagccagacaaggataatacaagaaaggaaaactataggaaaatatcccagataaacataaatgggaaaatgtaataaaataaatatagcaaactgaattcaacagcatatttaaaaaatcattaatcgtgatgaagtgggatttacccctgggatgcaatgatggtttaacatatgcaaatcagtaaatatgatatactacattaacaaaatttagaagaaaaactatatgatcatctcaacggatgcagcaaaagcatttgacaaaattcagcatcctttcatgattaaaaaagactctcaagaaattaactataaaagaaatgtaattcaacacaatgaagaccatatataacaagcccacagctaacattatactcaattgtgaaaagctgaaagctttttctctaagataaggagtaagacaagagtgcccactctggccacttctattcagcacaatactagaaatcctagccagcgcaattagaaaaataaaaataaggacatcccattcagaaagaaagaagttaaattgtctctgtttacagaggtatgactttatatacagaaagctctaaaaacgccatcaaaacagttaaaactgataaacaaattcagtaaagtttcagaatacaaagtcaacatacaaagatcagtagcattcctatacattgacaacaaactagccaacccctgcccccgccaacaacaacaaaaaaaaacaaaactgagaggccaggcacagtggctcatgctcccagcagtctgggaggtcgaggcaggcagatcacctaagctcaggagtttgagaccagcctggccaacatggtgaaacttgcctctacttaaaacacaaaaaaaattagccagacatggtggtgggtgtctgtagtcccagctactttgggaggctgaggcaggagaatcacttgaagccaggaggcagaggctacagtgagccgagatcgtgccactgcactccagcctgggtggcagagtgaaactccatctcaaaaaaaaaaaaaaaaaaaaagaaagaaagaaagaaacagaagattccatttacaatcccataaaaatattaaaatacagtcatatggtgcttaatgacacggatatgttctgagaaatgtcttaagtgattttgtcatcgtgcaaacatcatggagtgtacttagacaaaccttaatagtacaacctgctacacacctaggctatatggtatagcctattgcccctaggatacaaaaccaaacagcatgttactgtactgaatactataggcagttgtaacacaatgtgtatctaatagaaaagttaatgtgctgcactgcaacgctaaggcagctaagacatcactagcgataggaaattgtatatgtggtccaacattaattgaaacattgttatacagcacatgactttacttaagaataaatgtaaccaaggaaggaaaagttctatacactaaaaactacaagacattgagaaagaaattgaagacataaacaaatagatgtctcatgttcatggattggaagaattaatattgttaaaatgcccatgctaaccaaattgatctacagattcaatccaattcctatcaaaattccaatggcattattcacagaaataaaacaaacaattctaaaattcatagggctccataaaagaccacaaatatccaaagcaatctggagaaaaaagaataaagctagaggcatcacacttcctgacttcaaactatattaaaagtaaataattaaagctatagtgatcaaaacagcatgggactggcataaacacagacacatagaccaatgaaactgaatagaaaaaccagaaataaacccatgcatctacagccaatctttggcaaggatggtaagagttcacaatagggaaagcttaggctcttcaataaatggtgttgagaaaactgcacatcctcatgcaaaagaatgaaattggacacttatcttataccatatatgaaacttgaagtggattaaagacaaatgtaagatctgaaactgtaaatctcccaaaagaaaacacagagggaaagctccttggcattggccttggcaataatgttacggatatgatcgataccaaaagcacagacaacaaaaacaaaaataaaaaggtgggactacatcaaactgaaaagcttctgcacaaaaaaggaaacaatcaacaaaattaaaaggcaaccgacagagaagaagatatttgtaaatcatgtatctgataaggagttgatattgcaagatacatatacaagaaactcataaatctcaatagaaacaacaacaacaaaataacgtgattgaaaaatgggcaaagaacctgaataaatattttccaaagagcacatacaaatggccaatatgtattttaaaaagtgctcaacatcattaatcttcaagaaaattcaaatcaaaactgcagtgagatattacctcacacctgttaaaatggcttaaaaaataagaagtgttgatgaggatgtggagaaaagggaactcttgtacacggttgctgggaatgtaaatttatacagccattattgaaaacggtatgaagattcctcaaaaaattagagatagaactaccatacaatccaggcaatccactttggggtacatattcaaaggaaacaaaattagtatctcaaatatctgcaccctcatgttcattgcagcattattcacaatagcaagatatggaaacaagctaagtgtctgttgatgaatgatacatacacacacacacacacacacacacacacacacacacaaatggaatattattcagcctttacaaagaagaaaattctgtcatttgtgacaacataaatgaacgcaaagggcactgtgttaagtgaaataagctgggcacagaaagacaaataccatgtaatcgcactaacattctactctcaaattctatgagttcaacttacttaaaaagtaaggggctggtaggtgggagtggggatgcacaggtactggttaaaggatgcaaaattttagttagataagaggagtaagttcaagagctgtattgtacaacatggtgacaatagttaataacaatgttttggatttttgaaaattgctgagagtaaattttaagggtttttaccacagaaaaagtatgtgaggtaatagtatacatgggctaattagcttgatttagccattctacaatgtatacatatttcaaaatatcatgttgtacaccatagacatatacaattttcatcaattacaaagtaattaatttaaaaaataaattaaattaaatgtttacacataaaaaaaaaaatgccttatgattagccagcttccctgagatggttttttgtgaataagtatttttatttttaaaatcctgcttttaaaaaaactattgtcattcagatttgctgtgttgtggtagctgcagtgtttaaatttgccctgtggtttggccagagaagccaatggaccacccggcccctgtgctccatacccatgaccctcaggcaagacgggctccggctgaggacccagaaggtctttccagctcttttctgagtggccttatctgacatttttcctgagcctagggaggggcatgagaatcaggagacccgggtacttgggtattgttagctccctggcttaccctccggtctctcacccactccttcccatcccccatactactatcaaacggtgaattattattattattattattattattattattattattattattatttgagacagagtctcgctctgtcgcccaagctggagtgcaatggtgtgatctcgctcactgcaatctccgcctcccaggttcaggcaattctcctgcctcagcctagcgagtagctgggactacaaatgcccatgcccggctaattttttgtatttttagtagagacggggtttcaccgtgttagccaggatagtctcgatgtcctgacctcgtgatctgcctgcctcgtcccccacaaagtgctgggattacaggcgtgagccaccgctctcggccaaacagccaagccaaatcacttctggccatatcattttctgttttaaaaagactttgtgtagccccattgcctaaaaatgttgcagtcctcggccctggcccactgtcaagattctggattggttggtctgggggatgtggcagaagtttgagttcttaaagttccccacgtgactctgatgtccaaccagggttgagacacactaacccatgccataaattttcaacactggtctggcaggggaggctgtttacattctgacccctgcttgacgcccactccccttgtcttccccatctcggtaaatggagccaattcttatgcagaaattctgatacttatctttgctttctacctctcccttatcactcactctcattttatggccagattcaggcttttcttcttacaaaacatctcttgtctttgcctttgtttacttgattccacgtccactgtccccactctgctctatccaagtcatacccagggcctctttatgacctccatgggcctcctcatccatcaaaaaacattaaaaagtatatatttaatgctatgttggtataaaagcagatataatccaagctggatttatttttttttattctgatttttaaagaaatcaaaattaaaacattttcatgggcccctaatggtgctgtggccccaggctctgcgctcactgtgcctgttagtataagtggcctggatcctggccactgccacagcctcccagctggtttccctgtctccccatcctccaagtccattctcctcataatacagacagagacattttataactgtgaattacattgttccacactcctgcttataatgcatcagtgatttcctgttgtactaagaatacaaccaaaaccctgaccatggcttacaaggccaggcatcaaaagtttggtgtattataaataagaataaagcctcttactattgtaccctccacataagtaacttttagtgtttgaatgtttaaattgaagtgtgagtagtcatttgatttgtgggtggggaattgagcagggacatttagactaaagaaatagtttgtctgtgatcagtagctaacaatttttaagtctatagtggtagagtgtatgcaacatattcaggaatgatggttgaagctgagcttcagagcttcaggcctcaggagagccatcggcctcttgaaattatatgccaagttttgagaatatgtgttgtatttaagtttttcttggaagaagctacattccacaaataagtattaatttcctactatgtacaaaacaaaaacaaaggcactatccttggtactaagactacaacagtaaatagggaatataaaaatgctttccacttggagattttattattctagtggggtaaaaagcaagcaataaaccaataagtaatcaaaataaatagcctcttagctagttgtcagtgccatgaaggaaaataaactagcttatggagatagtgagtggggataggaatagaggctgcatccttaaacaaagtagtcacaaaggactttgctgaaaagttgacatgtttagaaagaactgaaggaggtgaaggagtgaactatgagactttatttgggagtgtcccagacagagggaatctaactatctttagatcctcaataatttaccagaagatgaagtaccgcttctttgaagtaagaagagagtcaagaaacaggcagaaaaagagtcatctaaggagtgctggtgactggttgtggaattcaaggaagatgtaaggccaagagattctgatagactggtataaaatgaagtagtggcaaaaaaactagatgaggtggaaatctagacagaggttcactgaaggagtgcaagacctagaaagatagaagactgtaattagagagtggggtgtaagaatttcagatttcagaggtagacatggctatgggtataatagatggctaaggtgaagtggaggaagtcatctttgaaggtgaagaggtcaaggaactgagagcccagtgtgcccagggcaccaggagcaattgtgaaggagaggtaagcaatggtgacacatccccaagcaaaaggaatgaaggattggacaaagaggttgaaaggtgacagtagcagagatgagtaaatatggaatagccagagtggaagaagagcagaagaatttggagaaagagtggaaaagtaatggtcatgaaacatcagtaaggagttagggaagtgagaaccctgattctcccatgatcagagtcatgctccccagatgttgggaccatgctgtatggtccatttgcttcatacggcctactttctcatatcctatggttgagtatgcttggtccatgtggctgtagcatcggaaaaacctctgggaaaggggagacaacatgaatggatagaactataattgggctgggtgcagtgggatgtgcctgaagtcctaggagttggagtccagcctagacaacataatgagaccccattactaaaaagaaaggaaagagagagagagacggagggcgggggagagagagagagagaaggaaagaaggaaggaaggaaggaaggaagggaggaagggaggcagaaaaaaagaaagagaaagaaagaaagaaagaaagaaagaaagaaagaaagaaagaaagagaaagaaagaaagaaaaagaaagaaagagaaagaggaggagaggagggagggagaaaaggaaggaagggagggagggaggaaggaaggaaggaaggaaggaaaaagaaaaggagagaaaagaaaagaaagagagaaaaggagggagggagagaaagagagagaaagaaggaaagaaaagaaaagaactataattaatataaaataaacttaggtgaacaaaggtaaagaaggtatggatgagtatattaatttgctaggttgacataacaagacaccacagactaggtggcttaaacaacagaaatctatgaagtctattttcttacaattctgtagtctagaagactaagatcaatgagttggcaagtttggttttttctgaggcttctgaggcttctctctgtggcttgcagatgtgtcttctccctgtgtcttcacatggtcttccctctgtgtctgtgccctgatctccttttataaggacacctgtcatattggattagagcccacacaaactatctcactttaacgtattcacctttttaaagattctgtcttcacattcagtcatagtctgaggtagtggtgggcgaggacttcaacatatgaacttggggaagagacaattcaattgataacagatggtatatgtatcaagtacttaagaactcggggagcccaaagctggtggatcacctgaggtcaggaattcaagaccagcctggccaacatggtgaaaccccatctctacaaaaattggccaggcatgatggtgggtgtctgtaatcccggctacccaggaggttgaggcaggagaatcgcttgaacccgggaggtggaggttacagtgagccgagatcatgtcattgcactccaggctgggtgacagagtgagactctatcaaaaaaagcaaaaaacaaaaaaacaaaacaaaacaaaacaaacctccagaattcttcctaatacctcacccatgctcctgcaagattaccatggggaaaataaccaaaaaggaaaccagatatcctgtgttaccagctaggctattacctgatttcatagcattggactcttcagtaattctgggttaaatgacagggcttcctttgatttaagtggggcatccctagctcctgccagagcttaaatcctaatcttggtctcctatcaccctttgtccaagtgcatggagaaagaaagacaaagccagaatgatttaaaggaggctggtctcaagctgttttttcactgtatgaaatagggcagaaagcaggagaataatgtataatatggccagttgatgacactttcactgccccctaataaacagactttggtctggataagaatgaagaagagggtgggaagcaggttgggctgagaggctggaaaaaggggagagatgtcctttcttacatagtgactgaagtaggttctagaagtgatcatcctaatggcagccgagaaagtgtgaggattttgttcttcaggagaaaaaacatctcagtgtacctttatttgacaataccatgttctagaaagccaggctgtgttgaccaagcaaaggtcactttgtaccttcaaaaaacaattaagtttctttttagggtacttactctcaaatagaatggtcaaaaacctaatataaaagaatatgagcatggctaagatatggaatgaatctaagggtccatcaatggatgaatggataaagaaagtgtggtgtggtatatatacacagtggaatgctactcagccttcaaaaagaaggaaatcctgttcatttgtgacagcatggataaacatggaagacactatgttaagtgaaataagctaggcacagaaagacaaatctcacatgatgtcacttacatgcatgtcttagtccatgtagtgttgctgtaaagaaatattggagactgggtaatttataaatacaaagggtttatttggctcgcaattctgatatttggaaaagttcaagattaggcatctggtgaggtcctcaggctgcttccactcatggcagaaagtgaagaggagctagcatgtgctgagatcaatcacatgaagagagaggaagtgggggtggaagggcatgacaggctctttttttttttttttttttgtgatggagtctcgctgttgtcacccaagctagagtgcaatggctgcaacctccgcctcccaggttgcaacaattctcctgcctcagactcctgagtagctgagattacaggtgcccaccatgaccagctaatttttgtatttttagtaaagacgggtttcaccatgttggccaggctggtctcaaactcctgacctcaggtgatccaccctcctcggcctcccaaagtgctggggttacaggtgtgagccaccaggcacagccaccagggtctttttaaggcccactctcatgagaaccaatagagttagaacccactcattcctgagggagggcattgatctattcatgagggatccacccccaggacccaaacacctcccagtaggctccacctccaacactgaggatcaaacttcaacatcaggtttggaggggacaaacatccaaactatagcaacgtgtaatctaaaaaagttgaactcagaagtaaagagtagaatggtggctgttagggtgttgggggaggtaatgtggtagggagatattggtgaaaggatacaacatttcagttagataggaatgtattcaagaggtttattgtacaactatagtaaataacagtatattgtattcttgaaaattgcagagattagtttttttaatgttctcagtgcaaaaaaaagtatgtgaagtaatgcatatattaattagcttgatttatcctttctacaacgtatatatagttcaaaacatcatgttgtacacaatcaatatttacaatttttatttgtcaatttaaataaacaaatgttaaaaagaaaaaaaagagcatgagtacagggtaatcggtgttcatgatcccagcctcacctaccttctgtgtgaccctgggcaaggtatttctctcctctcggactcaattacctcctcttaatattgctaatttggtaagtaaagtaaagatgataatgtttgacttttttgttgttttcaggatgaaatgagtattaaaggagaaacattcattttgggaataacatcttgtttcataccagagtgcaccccctttttaaaactgctttgagagcctctaaaactatgatccagtcttaataataacgtaataggtatagttccacacactgaaatagagatgtcataaactgagtagaaatgtgctttaaacacacacacacacacaagcacacacacacaacaccaaatccagctcaacattgtgaattagaaatccaaagcccaaggaagaccaaaagttcaaggttgcacattgggttaggacagaaattggcctctgtctcaggcatcgcaactcacactacagtcctctcccaccttgctgggatgctttcactaagtctactctccagagcaatgtttctgtattagtaaggatctccagagacatagaaccagtaggaaatatatagatttataagaggggatttattatagaaattggctcacatgagtatggaagacaagaagttccaggatatgtcatctgcaagctgtaaaaccaagacagccggagctgcattcagttagagtgcaaaggcctaagacccaaggcaaccagtgatgtctaagtccaaggctgaaggcctgagagcttgggagggtgggataggcatgtaaccactggtgtaagacccagagtccaaaagtccaagaaccaggagctctgatgtctgacggcaggaaagaacgcatgtcccagctccagaagagacagcaaacacaccctgcctctgctttcttgttccaccaaagccctcaatggatcgaatgatgcccaccacattgatgacagcagatcttccatactcagcccgctggttcaaatgatgatttcttccagaaaggtcctcacagacacacctagaaataatattttaccagctatccgggcatcttttaacctagtcaggttgacacatgaaagtaaccattgccatttttaacacttaataatttatcttacattttttcatatgtcttaataccacctatattattatttatttctatatttttgattaaatctattctggaatttttaactgaaagccacatatttaaaagtgtgtcagccaggtgcaatggctcacacctgtaatcccagcactttgagaggccgagacaggcagatcacttgaggccaggagttcaagaccagagtggccaacatggcaaaaccctgtctctattaaaaatacaaaaattagctgggcatggtggcagcacctgtaaacccagccagctactcaggaggctgaggctcaagacttccttgaacccgggaggtggaggttgcagcgagccaaggtttcgccactgcactccagcctgggcaacacagcgagactccgtctcaaaagaaaaaaaaaagtatgtcactaccactgataataccttttttttttgaaatggagtctcattctgttgcccaggctggggtgcagtggttcaatcttggctcactgcaatctccgcctcccaggttcaagcaagtcttgagcctcagcctcccgagtaactgggattacaggcgcccgccaccatgccaggcaaatttttgtacttttaatagaaacagggttttgccatgttggccaatctggtcttgaactcctggcctagaatgatctgcccgtctcgacctcccaaagtgctgggattacaggcgtgagccaccacacccagcaatactactttttttaaattgtcaaattctagaatactaatgcctccataagctctgaatctgagacccatcattcctttttaagaggcaaattagtgttaatggcataatggccccttgaagctttcttcttaactttcttcttaataatatcaggaatgaaagacaaatgaaaaaggcaggaacttcttggcacgtatggtaacgactcatgcaacacccatttccaacctcggtcttccttgctgcctgccttgccatataagctgcaaaataagaatttgacttcccagcctcccttgctgctagtgcaggttgcacaaccccgctctggcctgtgagacacaagcagaaatctcccagtgctacctcatccttgtcctccttttctcccctcccactttgaatgtgaacatgacatctggagttacagcagcctttctgtgaccaagaggtgacaagcatgaggagaaaagccccatcctaaggttggcagattggaaacaatcttgatcagttgccccagccccacctgcttccttacttcttactctgtgagaaaaataagtcctatctgcttcaacgttagtcaagatttctcttacttcctaccaaacagagccttaactgacccagtgtttgttaattctgtgaatgtgatgtgtgaaatcaatgtgacacccctggtgatgtgggtttcatgctttgggaggcccttctgtaagccagctgtattcatttgccaaagatgccatcacaaaacaccacagagtcggggggcttaaatcacagatatttattttctcacaattctagaggccagaagtccaagatgggagctgaccataatcccaaatgccatcatccccaatgttaaaatcctgaaaaacaaaattccaaaaatattttagaaaaaactttttcagccgggtgtggtggctcacgcctgtaatcccagcactttgggaggccgaggtgggcggatcaccagaggccaggagttcaaaaccagcctggccaacatggcgaaaccccatctctactaaaaatacaaaaattagccaggcatggtggcggatgcctgtaatcccagctactcaggaggctgaggcaggagaatcgcttgaacccaggaggtggatgttgcagtgagccgagattgtgccactgcactccagcctgggcaacaacaaaaaaagcgagactccgtcttaaaaaaaaaaaaaagttttcaaaacgttgtaaaatatttacttacatttttaaaggggatttatttaagaaacatgcaaaaacatgacagaactcttcataggctactttacacaataaaatggacaataataccatatttttgcaagcagaaacactcagatatactaacaacagtcacatgggtataacagttatgagcagatgaaccatattcataaataaataaatcaaaaagcaaaatataaaaatgtatatcacactgtggttggtaattgtgtgcccccagctttatacagcagtcatctgaaatgctgtgattcttagactcttctaagtcttttgataagattgatcaaaaaccgtgatgagtcactaccatatcaccaccacatcagttgcccaaagagccaaggcattgagaaattttatctttcataaaagcagatgtacaaagaagatacattttcatttgtcgaggaagttttaatgtctttatgcacacacatactgcttacacacaagttcaacattttgaaaatgcactttcatggagttacatttgcaaaaatgcacaaagcaaattaggactctctaaaactctttatacgatgcatgcagtattggaaatgatgcaaagatgaaataggtagcatggcgaattataaaaaaataatgctgacaatttcaaatagtgaaaaaaactaaaaataaaaactaaaaactaaaaagaaaattcaacaaataaaaaagttatggagctagattatgggcaattgcatggagatagtccataagagctggccaactttcacagtcattaactatatttttaagtctcacatcacaaaaaatagctgctttttttcttttacgacatggctgtccttggagaatatgttcacatttattttccatgtgacactgctcttttcaaaattcttctatggtttagtatacaactacatgagtattccccattttttcccatcttctgtgccatgcttccgtgttgtgggtctgtggaaatctattccatatgcacacatatatagaccacaaatctggtggaagcaatactggtgattgaactgcaacaatactgcccatcatgcacataatcgtttttgaaccagttagtaacttcgctggcttcttcaggcaaatgtggctttaattcattaaaagctcctggaatgccatcagctggaatgaatgccaatactgaagtttttgtcattgctgtatcacgtgaccagtccactcatctgaagtttctgccaaacacattggacagaatggaaaaaaacaaactttattggtaataccttgaagttcacctttagaaacctcaatcacacctaattccaaatctgtctttatggtttgaggattcaattgaaatccattttcctctgcataaagacagtgacaaagtaaagagttccacctaatatgatgcaactatcttgtgattttgattttggggattttagatgttagggatttagactttagaggttttgactttttggaatttccatatttgggattatagatttcaggcttgtgtctttcgggactataaacaaaaactgtccgagatggaggtgttggcagatttggtttcttttgtggcttttatccttggcctgcaggtggccatcttcaccctacgtcttcacatggtcttccctctgtgtgtgtctgtgtcttaatgtcctcttataaagacaccaattgtattggattagggcccattctaaggatcccattttaacttaaacacctcattaaaagccctttttccaaacacagtcaccttctgaagtactgagggttagaaattcaacatatgcatttgaggggaatgtaattcagcccataacagagcctaatcatttatttttttaaatagaagctattttttgtcttctgtaaaatcttgtaatcacatgacagcatggcacatgaatgttcagagtccacaagaagcacgagaaatttgcagacgacagggaagagctttgcacttgagatcagggggccctgggctctagacatacatcattcacttacaggcacgggcaggcttagtttctctgaacctcaatgtctttacttgtaaaaaaagatgtgaatactatatgcaataatatatataaaagtatctggcatatacaaatgacatcttatcaaatcaaaggtgccatcaattataaaatgtatcattatgttatttgtaccaaaagtggcaaaatcatgccaggggagattttcaaattacagattcaggagacttacccacagattcattgggtttgaatctcctgggatgaagctcaaagattgtcattttttaaaaatattttccccattattctgttgatagactcagaagccaggactttcggcatgctgtcagtcaatgtgctgaagaacccagattttcattctaagctgccatctttggagctatttatcagtttctcaaatattctgtaggaagcctggatttcagcccttaccaacaaaaagtcattgcccaaattctttacgttttctaacccattcattgaattccagaagctctagctcaaaagttgcataaaataaatactttggtagaacatgtaaaccaaaacctcttccagtggtaggaatattgccgcatttacccttagtaggcagctctctgatccctttcccggactacaggactatagtgcgcgggtgctgagcccacctcagtcattctacgctttcatgattctaaatgatgtcagttccttgtatgcattttttaatcgcttttgccaaactcaaaaaactagttgaacctttttaaatattactttttctgaatatctgtgattaaattcttagtatcagtaatattatgagcacagaaaaagccaatgtcaagattattagagctattttggactccttgacaatcttttaggtctagcaaactacctaaccccctcccaacgacatcatttcatagtcttcatatccacatgttgatatctatgatctcaactgagtcccaccccctgatttcataattgaacacactgatgccccacccctccacccctcaacccccacccctgagaaagtaagtgacttacccaaggtcacatgcaagctggcctatagtcactgagcccagttctgtttccagcctaatgtcccttccattcctcccacccctgatgacccatgatctcttagtgacacttcagggagattcatcaaaagcatcagacaatatgtagtgtaaccaagtagaaaactgtcctgaatcacatgcagatcattcctgggccacgtagttcctgtttttatgcagatttcctctgagccttggctaactcccagggaagcgcacatatcagatctgctatatattggcagaactttggcttagaacacatctcgaatgctttccattgaacattggcagccttgaagaaacatggctagaaaattattccaggaggcctaattgctctgtgacactttccaaggagaagctgatggctttctcgcccaagctcttccctctgtacccagaacaaatgactgcagttcccagtatatgccctaaattaggagagggcaaactccgtggcagcatgaattgagggaatgtctttactgggcaggggccctcttcccagcacagtgtgcattttgccaagctctttctccttcagttttaaaacccttgtgtattccaagagaaatgtcgtccatgtgtttctgattcatttacacgtaaatcattaaaatgttgttttgtgagagttatttaatgtgtgcggagcctgtgagtcttcttaacgggaatgttaaaagctttttttcctgtgctgactgagacagaacacattttgctaaaacagtgcctgagttcaaacatatcctcccatctcatatacttgtacctgctttatcaaccacagcctcttgataatgccaagcttggcaaggctggcattcaaaagtgtgaaaattagagaaactggagagaaaatggagtaagaagtacagtgagagtcaagccactgttccccagaacgtgccaaaggaacgttatctgagggtagacagtgcatgtgtctgccgctttggtgagtgtggctggcagccctctctctggtactcccctggacacttctacaagcacagtcttatttaagcctcatagtaactcccattttccaaatgaagacacagaatcagataccttaagtattgtgcccaaagtacacagctgtcttgggtagaaaggaaagattacagctaaactctgagtctaatcttcttttcaaaatgactcagattgagtttctctatgaatgccgtctgtgtgtgtgcatttgaaattccatatgcattataaaatgttaatgagtagcagtgtaatacagtggctaacacttcaaattctgcctctattactttctagctgtgtgaacttgggaaagttacttaacctctctgggcaatttcctctgaaaaatgagaatattgccagccatgtatacaacatataaagatgactgaaaagaattcatatattaagtgcttagagcagtgcctgacacgtagcactcaatagctgttagcttctagtgctagtggcagtggggagtcataaataactggatgatcttggcaagtggcatattctctctgagccttagtgtcctcacttgtaaaatgagtataacagcagcactttcaccagtttgcaaaagtaacttgagatgatgttaatgactagtactgtgtctaacacagaaaaggtgcacagtcaaacttaacttttacacccagatacacctctccctattcagtgttggttgttgttgttgtggagggggtaattttcttattattcagctcatcttagatctagtgttgatttctccggaagccatgggtatagacatatatacaggcccaggtctttctacacccctggggaggtgagatttcttgctgcgatgggccctttctgggctggagtagagccgcacacactccgagcaagtaaacagtgccacaggtattgctcatggggaggaacaaccagccaacttcaggacttggtgcttccccagttccgggcccgtggctctgttcacaggaaaacctgtcgttgtgtgtgactctgatcacgagaaaacctgtagttatttggggctctgctcacaaggaaacctgtagttatttgcagacagacgctctgggatttagaccttttttttttcttctagtgtaggtgctagaattgccttcttagttggttgtttctatttaattgcttttctttcatgggtgtcctgaagaaaagcagaaaattatagtcatctggcaaaaaagactaaagagaaattagactttgtcccctttcactctctctctctctctctctctacacacacacacacacacacacacacacacacagagtgatacaaatacctgcttgagcccctcagttattttctctcaagggctgaagtcagccacacaggataaaggagggaagggaaggagcagatcttttcggtaggaagacagattttgttgtcaggttcctgggagtgcaagagcaagtcaaaggagagagagaggagagaggaaaagccagagggagagagggggagaggggatctgttgcaggcaggggaaggcgtgacctgaatggagaatgccagccaattccagagacacacagggacctcagaacaaagataaggcatcacggacaccacaccgggcacgagctcacaggcaagtcaagctgggaggaccaaggccgggcagccgggagcacccaaggcaggaaaatgaggtacgtgccaggggaggagagggcacggttcccttttggggaccagtgtcaaatagcagggaaggtctgaccttgtcactgacagactcacctgcgtgtcctgcatgtggtagtgaggggctttctcatcaattcttagggctctgagaagggagctgtgggtgggctgggtgccttccccaggactccaggagacataaaacttgaaacgggagacttcgtgcaaatcctgctccggacgctgctgaagctcagatttctcccactgcctgcacagggtgctgcctgctggcgaatgtgactctcctcctgttcacccacaaggctgatttttccgtgttcctcctctggaaagagcattgctttctctcttccagcactttgtgagttagatatgtgtttgtgtgttcattccttctgaccagaaaagaaaccagcttcccatagcttggctctgtggtttcttcaacctttacaagtttgccagttaaacctcaatttagaaaactaaaaatctgtccccattttacagttccctataaattttctgcatttctcattgaaatcagaggcagctggtggcatgaatcaggctatgaagtacaccaaatggctcttaaagagatatcatacttaaaaaaaaaaaaaggattttagagttctgaaatcaagaacttcaaattctaattggttttaaactctttaacctttcttattcctcattatacttgacactccttaccagacctttcatacaagttctatcctgcaagtctgaaaacccaaccaccctagttatttttattagttaagtgttaatgctgttacacacacacacacacacacacacacacacaatgctctgcagatgtgtaagtccctaaacacatcttttactattaattttcttttcacttgggaaagtgtttttatttgtttctcttctgcaaagtaacctagcaacttttctggacctgagaccaatgagaggcttcagactatgttaactctttgaactccgattacctgtggttcagagagataaccaggtccttaaaaagtgagtgcaataattctgttcttcttaaagccatagtaattttaaacctgccattaaacatcatttttctttctccaaaaaaaagtgatttatgtcaatctacattgaatgataatctcatttatctgtcaatgatctggtctgaatcccaccctaccattcagtgccccagcccatatcaaactacttggctgagtaacaattctgtatctttgcatatgctcatccctcaacctggagcaaccttcttctttattttccacctagaagacctgattgttcaagctggcacaaatatctctttctctctcctgaccaccatattccagagtgagcatcccctcctttgtcctttgttctgtttctgtcccttgaagctgcatctcttattgtccttgtagtatccccttgtttaaatgtccacctccccttacaagtctcagcactccttaagttacatgatctatgtcttcatctttgtatggccagcacctagcataatgtctatttcctaccagccattcaatacctatttgttgaattgaattcaatttttgaatagccaagcaactacgagaaaggtgctctgctagaaaagtctccagcaggtcttgtctcacatggatacagtatttcagtgtttgcagagcactttcaagagcactgtctcatgggggtttcagattctggatgaagtaaggatttatggataagtagtgggtataaaagcagttaagcaacttgcccaaaccacactgatgatcatgaaaaggtccagattcaaatttgggtcttcgggctccaagttcaggattttttctactatattccactagactttcagccaagtgtattattctaaactgacggctcataattctgactgtacgtcggaatgatctgtgctgccttgaaacatgccagtgctcaggcctcaccccagagcaattaaaccagaacctcctgaggagggactttggcattaatatttttaaattttttacgtaaagccatgggtttttcaattatttttcacaggattaattgctttggccagatgcctgggcatgatatgggcatggacccagcttcttctgtgagctctttttattcccttcttctgttgaagttaattcaccatatggtattgagcatgatgtgacatctcttggggtatccttttcatcgtctgtcaaattagggtgctctgtaaaggatccatgcagtcccttccaactcttcaattcaaaaatggagtcttggtgtggagtgggttgaaacaaggggcgtgtacggacagtgtatggaaaagatagcaagtgccgttcatgccgcaatcatagatatatgcaggcatttttacagagtcctgctagcctgttcctacggggggcctctgaaatctcagctctatatattacttttgacatttctgcaatgtagctaaactttttgattagccggaggatagatagcaggtgttgggaactatacagccggtgcctcgtatacaagaagccaaaaacattcagagagtgtgacgaggaatgaaagctgccacttatattcttcaatttacagcccctaacgcaagcaggcaagcatatgctcaagcccattacatgaagggagatatttgtttcatatgtttgaaaccgttttgagatgcaaacaaagtagaagggaaagcttcctgggccttcctcccacgctgaccagttgcctaccacacatggcaccgggcttctgggctacacagggctgtctgctgccagtccttgacagaaccggcctcaggaggctcagtgtctcctcgatgtggtctggaaaaagcagtcatggaggaagttgacctttcggccttgcataatttgggtgtcgctattatagggaagtccggtttaggagccaaagctcattcctgactcttgctttttgggaactggcaggatggaataattataactaatgtttggctagggctggacagttaacaaaatacttccccatcctcctttacgctgatagcagtgctgtgggaagtcgttattattactacttaatggatgaggaaacaagacctcccatgacctcctaaaatggaaaggataaataaagtcaaagctggagctgaatctagctcttttgacccagggccagtgccctcccctcctcagcagggctgaacctgaactcccagccctgttaacactggttcatttcctcacttgaaaatgggatgcctgggccctgccacctggttttttgactcagctttccaactaattcacaggttaacttggacatatgccttcccttccttctgcctctgaggccctccttccacagattggtttaagaaaatattgacattggctatgggattaagacattttgttttcttaatagaatctcacatattgctattgtagggaccttgaaaaaaattaaataaatgtattttctttttattgaaaaaatagtacatggtccttcttgacaaatgtaaacattttatatgcacaaaaatggaaatacttatattcccatttcagagataactactgtcaataccttggtgtatatcctttcagacattttgtacttacctatttacactttatgtaaatattaacatgacatagctacataatctatgtatgtagttaacttgctctgtttacatacccaaaaactcaaatgtatgcattacacagatatatgcatctgaatacatgggcagactgggtattggagagaaacaacgtcctgattagcaaatatatcattgttaatctgaagatgctggtatggtttcccagcattgactttttaggctatctaagactcaggccccactttcatggattcattcatttataatctgttatatatcagactctgtactgggacctttatatacatcacctttagtgctcataggagccttatgaattagatattataatctccattttacttctgaggaaactggggctcagggagactagttgcccaagttttcacagtcagtaagtgaaagaattgggacttaaatccaagtacatttcactccaaagggtgtgtctaacgtagtgcaatgtgatacccacaataatagagaaatgtgcagggagcagtggcttgtggaggagtgaaaggatactccatagctgggaagctctgagctggatggtggaggataagcaagacagtggaggataagtaggtgaggagtgagcagggcacatgcaatgaggctggaatggaagggcatggtgtgctcccagaataacagggggctcacagggctggctactgagatgaggtgggaaggacagatcagccagatcaaaagggcctcaacagccatcccaggagcagacgctttaccctgcagacacagtagaacagtgtggtcctatctgtgtttgagaaaatcagctttggcagaagactgctggtgggtgggttggggatatcagttaggatgctatagcaataagccatataggagaatgtaaactatgtaattaactggagaggaggagagatggatttccaaaacacaggaagcagaataagtaggatgtggtgactcttgactctggggtaaatgaaaagatgaatggttaaagttcaggccagggaactggttgatggtagtaccatgaacagaaatcagaaatgagagcaggaaaagattaggagaggagtgatgaggcaagtttgggcccattaagttcaaggttactggacctcacaggggaatcggtctgttagacagaagcctggtgtggtgagtacagactgaccagaagggctttgaccagccttagtcattctgcctcgttattgcgtcagccatggtgacgtgctctgtaagttttattgaattttccttgtctcttttgcaactctttattagtctattatttctgattcctacaggaataagttgtaggtttttgatccttttaccaagaggaagaaaacttgctttgcttattctttctttattaaagattttgcatactttgactgagtttgtggtgaaataccattttcaacgttaaatctgtttaaggtactacagattccatcaatgcatttaagcctcacccagtatgataacatttactttttcaaaaagagaatcaagagttaaatgaagctgagctaaagaaatatcaacttttacttaattatgaaaattacattttcaacagtaaaatggaaatgtcagactcccaaatgtgatactttctaggagtttaagttaacactattatcagagctttgaatgagcaaaaccagaagaaatcttagaaattatctagttactatattcccataatacagactgaggaggcaaggtcagaaggggaaagctaattacggcaggccagagacagagacatgctgagatcttgttctcctggctgtgattgagatgaatggcaggggcctgtgtttataaatgtaagtagacctacattcatgtctttcaggtggctgcttctctattatgctctgtgcttctccctgtcaaaggcttcagcccacaccgtggagctaaacaatatgtttggccagatccagtcgcctggttatccagactcctatcccagtgattcagaggtgacttggaatatcactgtcccagatgggtttcggatcaagctttacttcatgcacttcaacttggaatcctcctacctttgtgaatatgactatgtgaaggtgagactcctgatgtcccctaactgggccaggctctcttctgggatttagacaaggcaatatgaaattagacccttccagggtggcatatagtaagagagacacacaacatcacaatggtatgaattcaggtcaaggtggaaagctaagtgcaagctgatgggtagaactagaaaggtccatgaaggaaactgaagctgattgatagagtatgactcagcccaacacaacatcccttctttcttcctgttctcaaagcctttagtgtttctaccagcctctgttccaagatcacctttaattcaacaagcagaaaagggcagagacctcagagtaagcagtaatcatggaaagagaaccataattatgtccaaagttgaggcattagaaagcattgtccaatttcccaaataaagatcaagtatttgggaagtgcaggatatacagtagtaaagagtcagagatgaagtaggaaggtgagtggaggcgagattcttaagggccttgaatgtcatgccaagtagtttgcattttatcagcaaaaagtgtgggtaggaaggggacggtcaccatcagaagtagatgtaaaaagtaaatatgggggaagagcaggaccacatcaaaacaatataccctggaatttagagaaccccccacaaaaaaaaaaattccatgggtgggaagctgttcttcttttaaagtgaggctgaaaaaggtcagaatatttctaagggatcaagtttattgcagttatatctagttaaaaaagacgtggagacctaagaacctaccttctaagctctctccagcttcctgaaagaggttctcatcaaacaactctagagcatttagatatttttagtattattgtagactcattattccatagccagtaattcaacatgaattaaccttgtattaaccagaatatttggtcaacagcagagaagtgagtttacaaggtgcttttacaattataatctcaatcaaactttaaaacaattttgagacaggagccatgaccccatttcacaggtaaagaagtaacccaggaaggttaagcaactcacccaaggttgtacatctggtaagtgatggattaaggtctcaaacccatgccttgtgtttttgaatcacatgctcttttgtctacaccaaacaactcccaagctattctccactgagcctaagatacagcagaggcatacaaaggcactgtgcttccgcttattttatatgtagagtattgtcattgtatatgttgggtctgcctgcaatgtcccatttacaataggtctctgcgtctaaaaattttccaaaattggtgttccatggtagggatttttaacctcagcactactgatattttgaaccagatcatttgctgagaaaagctgtcttgagcattgtgggatttttagcaacatccctagcttctaccctaactaggtgccagtagcagccccggccccaccagttatggcaatcataaatgtgtccagatgttgttcaatgtcccagaaccactgctatatgggatgatgccctcttagaatgccctgtgctagggacggtggaaattttaggacacaaaagatctggtcccttaaaaagaaagatgagtcttgaaaatagccattgcacaagatagaaaacagtgatggcaataaagactaactgataaagaatgagaaaatgtggaactggttgctctaagagacaacgcggattggtaatctagatgcgatttctacaaattcattaaaaatagaacaaatttctcagggtcacaaggatcaaccaggggggtcttcactgaggccatgagtatgtatcatcctaaactgaactttctgacaaaaaggccagttacgcttttcaggataaaagggttatccagagttaaactccaggataagatggattgtaggtatgggtcctcaggctaagtggaatctcccggcccattcccccaaataatgttggtcacaaaatcatggcattctttagtattttggttggagagttgtcttaaccggaagaaaaattaccaaacactggtttaatatgacaataagttccatggatttagacaaggctagatatgaactttctaaccacatttttctctactttcaaacatgctaaccatctagaaattttgtcagtgccaatagcttttattggtacctgaggctcaagatcacagaaattatagaatttttttgctcagttgtagggatgacttcttctcataatttgccccctctcctccttaagatttgactcttaacttcatagtcattgagaaactctttctcttaagtttgattctttttcagacagaagacaaatttaaccttgttaggtctccttcatcaagatgataaacacacaagagaggatttagctcatttctttgctccaaataagtggagtatccaaggaaggcagatgaagcagctgacataaagcagcattttgttaatgggaaaaaatgatgatacttttcaagagcaataatataatctgaagacctcttctaacactgaattaaagacactggaatagatttctatccaaagcttgactttcttggctagagaatattttggaaattggttgatggtttctatctagagtggtgagactccttcctgaaaccacaagtagatggacatgggccctctggaaggggcagcatggtcctgggcccttacatggaattcaggaaatgccttttctggtctcagatctgtcactaactccccaaatgacatggagtggagaagaatattattttacagcaccctctctgctccaaaattagacagatgacctctgggcataacagagaagtagtctacttgaggcaacttagggactgagctgcctacctgaagtgccctacagtccttgcatctgtgagttgggacaattttccagttcctttcaaagaagagattaacatggtggcggcgggaggtgagatagacttctccacttgtgcttgcacagctgactctcttccagaaggccaccctaatgtcagcattagccttctgcagaggttccaacagccgtggggcaccagcaggcctcccctctgcaggatgctgcatgctagttggctgactactggtgctcatgtggaaaccaccctgtgcccctgcctacacacacccagtgagttgccctcctagagctgagaactcacagaatgtcaggctgcaggggccctctggggacgcatctcatcttaagttgtggttttcaaatatattctccccagtacacgttttcttcttcttctttttttttttttttttgaaacggaatcttgctctgttgccaggctggagtgcagtggcgggatctcggctcagtgcaaactccacctcccgggttcaagtgattcccctgcctcagcctcctgagcagctgggacgacaggcacatgccaccatgcctgactaattttttgtattttagcagagacggggtttcaccatgttggccaggatggtcttgacctcctgacctcgtgatcctcccacctcggcctcccaaagtgggttacagacgtgagccactgcacccggcccacattttcttcttgaaaatcttcagttaggcccaacgtagagaagagacagaagtgagctgctctagctgaaggtggttttgcttgctcatccttcttggttaccctgaagcaccttgagggattatggcttgaatcttgctgctctggccacattcctattggacagaagaggaggtcagagttcagagagtgggtgagcagtctgcctctgaaatcccaaacccagaagtcttacacactgagttgaaacccactgactttttctaatcgcctggccaatgctagcccctagcatatatgctttttctggctataaatggaagagaagcttttccctttccatctgaataaaagcgcaaatatgccatgtggcccccaggtaaatccacatccctctccaaaattctgttttttcctctgttcagtgagaggatggaacaagatgatccccatggtcctttcaattctggaattgtaatcccaatcctcctcaccagaacttccaagatgaccccaccaaacactccttatcatagtcaggataacaccagaaaacagaaatcgtatgtttacagcagctgcttctcaatgttgcataactgcaagcactccagtaggagcctgcagcctgctggggatgccttggtggtatgtcatcacagaacttgtaaacatatcatgccaacactgttctttaccaagaaacttaaaatatcactgacttgcctttgacaggataaaattccctgttttgaggcatttttcctctatgactaaattctcctcacaggcctacataggagtaggtttaagaaaccttccaactcacaggaacattttccagcccagcccaaccccgcaagctgcccttcccacccaggcccataggggcgatgatgatggaactgctcatactgctcatcagtagcctgaagaagagcaggactcccaagtctgtggtccggatgctcacatttatgaaaattcctctcctgcctgatttcccacagttcttggtcttcaagactcatgcacatctgcacagcagcatctgcttccttggcatgtggctgcaatgtttagattcctgtagtgtacggatgaggcatacgaatcaaggctggttaatgctgcaggcaagaggcaaagcacagatactagtcagggagtcaggcagcctgggtcctgggtgtcattctatactcattaaccttgggcagatgactgcacctaaaatggactctgtttcctcctctttcaaatacaaacggttaaaccagatggtctctaaggtctactttgccttgatgttctgtgcatctaagaccttagaaatcatgatccaaccccatgatcaacatgtccaaagtccagggaagggcagttgattggccaacatcatgcttgtattagaatttacatcttaagattctcagtcttttcttctatttatttaacagaattatttaacagattaaaaaacagcaaagtcccatcttgtgaatgactagtttttatgttgtaacataagacaaatattgtctctagtcaaacttaccattaaaaaatcccttaaatattgcaaagcattatcttttagatgcccagaaaagaatttttttccaaaaatgcaagaaattaaagttcctttggttgagcaccagatgaagtggtccatttatacttacaaagaaactatgaagctatagttatggagagagtctagatagttagaaaccagaaccaacaagagaacagcagattacacgttccaatttcaagttcatttcatggcatctattcactgtaaaaggaagcataaatcatctgcatttggattgcactctctttctttctttctctttatgtcaccatgtgtaatattttaatagcatctgtgacatgtttatgtaatgcaatgccactgttctccttttaaccctatatccttgatgtattcgacatttcttccatcctctccactgctaattccttagttccaattcttattcctctcaactagtctattgtaatagccttctatatgtctaccagatgtcagcctctccccatctagcctaccttctatgagtatccagaaggatcttcttggaacatagctttgattatgctactctaaaaatctttcaatgcctccccattgtctatggaatgaagcacagtaatcctattgaaaatctaccataagctggacactatgccaaagactgggtctgcaaagatcagtaaaaagaattcttcgaagtaaaatgaactataaagtcctcaaggaattcacggttccatagaatataatgaaataagtgcataataaagccagacaaagtaacacaagggttatcagtcagtatataagtttgggagtggtcatttttagatggccagggagggctttggaaatagttgatgtttgagattagtctttagaggtaaataataatttggcagtgcagttctctaagtaggatttcttagcagagctaccatcaaagcagggaggttgaagaggatgggaatgatgcaaaactgagaataatcagagttggcatgttttggggagacgtaaagcccagaaaggttatctgagggtcaactgagaaatgtttggtaaatttgggtttaagcatgtgctccccaaatcacatacgtgtggtcaaaggttgaattaatttcacagatggattttgttggccagcctaatattaacttatactatgatttgggggtgtaaaaaaaagaaagaattatgacaacataaaatttccgatctcacacaacaatctgcatttccaagttctcttagaatattagaaaatctggcaactcttgcagcttcctgccttcaacaatcagccaacaccaggaagaggtggccttgtgggtagggtccccaccattctctatagctcccccatgctaatgctttctggcctcttaatggcaccattgctgattttacagtaaagaaagtgaatcatttttccccagtgtctctatcaaaagtagaaaagttgaaagttcttgagaaagacacgtatttcaggaaaaatttctttgcagagtgaagaatatccctctgtatttaacacgcaaagtgtatatttctgtctaaagaattcatagcagcttgtttcactcatttatgttttctgcctggcatcttttagcattttagtctaggacgtccaattagaagctgtgatgtggcggaggggtggggcagtggggttcggggatgtgacacagtcgagggtatgcttgaggaaggttaatctggagctacatgagggatgtcaaggactagtaaagtcaaaataaactggagctgctgaatgaggccatttaggtggctgtgctaaatagattggatatgactatgtggagcgtagtatacttcaagaaagcccacaggcctcctggacagctatggaagagcaggtaggatgtgcagaggtaaactccacaggaactggctgcgtatgggagaggaaaaaggaggaatcagaggctttaagccccagttatgacaacttattggctacttacccagaaattgagatcaggaacgtgaagatgtgtagatttagaaagatatagagtgcactgaagtgcattgagttttgaatacagctggaaatgctggtctaaattttgagacagagcttaaagagtcgtaagagtgggtgtagaaagagcacagagacagtgatggagagaggattaacacagtgaggattaaattctgtctctgccaccatctgagtgaggaaccttggtgaagctccttgatctccctcagcaatggttttgtcatcagttgaaaggaagagttcctaatgaatacaacgtcttcctcacaggttgtgggaggatttgaatgacatgagggtctaagtggaatcagtactgcaaaacgcagttgtgctcagtggttgggagctcaaactttggagtcattcagacccagcgtcaagtcttgcctccacttcttactggagcagttgcttaaccttgctaagattttcttctccatctgtaaaatggagataataatgatgcttatttcatagacttactgtgaatgccaaatgaagtaaatgctttaatgtcatatgtccaacacatctctaattagctcaaaagtactattatagtggtaatgaaggcaatggtatgagtaataaagtgtctgcctggtatcaccagatgttcaatgaatgtcagttttcttatcaactctgaccctaccactgactgcctatgtatgaccttgctaatgttactgagttttttctagcaatttatggaaaagtgcttccaaagcactattcgaaagcaggaggttatttatttctcctttgtatttaccttgtagaaacacacattttacagcagtttctaatctattaactcatttgattcccatggaataggaagagcacggattattgcacctaatttacaaaaaaggaaacaggtacaagtgaatttgttcaagtctctgcaggaaagccaggcttgaatccctgctcttctaactccccaagtcatggttctgtgtctccatgcagccttcctcagaacaggctttactgtggaaggggtcctgttgtgtttcctggccatgcattattcctgaaacaatactctatttgtcaagatgatttcataaaatttagtaaaacagaaggtccttgagggtccctatattgtctagattattttaaataacgttctcttttatcctttgagagaaaaaaatgttttttaaaaataatagaaaatggagtctgaactacagtgaatctgcaagtgcttgtatcatctgcttgtagtacatcctttctgatgagctcaagctcattcccactagattgccagccccatgagttcagggcctatgtctgtgttttctccagtagaaagcacagtcctgggcagaacaggaaaaggcacatgtctcctggcagtggaaagggctctggcctagaaaacagctgctgactcctgctgagagcttgggcaagtcacgtcttcattcaaggcctcagtttccccatctgcctgatgagggaactggaccagctggcctctccaaacccttccagttctgatggtctgtgactcccagtccaatgccccttccctcaggccacattgggtcagtctgcatcctgctgtgtaattgagaggtaagtcgctcccaagtgggactcttctgacccctaagctcctaatttctgtgcaatgctctgtgtttacttagaacatgccctcgaccttccggctgaactcatttcacctactgcataactctgctcattctctgggagtggacaggaggccttggccccagaaggaaatgagaaatgggtaaacatttctcatgaatttcaattgtagtctccggtggaattctcccactccagagacaccaggacccaaacaccaattctagcttattcagaagaattagaaaatgaaaatgagcttgcttcaggaaagtgtaatgaaagctcattttatgccaaaagtgcaaacagcacaggcttcagggtgatggaaaacaaaaggaagctcgcagtgctgaggaagagcatgtgggtgagtgtgagctgggaaggtcccaggtgtgggtgcacatggggtgcatatctctgtgcttgagtatattacaggttgctgttgaaaacaccttggtgaagagcagtgcctgactttacttcgatgtgcttataaagggaaaagttaagggacgaagaggtattcatttattcaacaaatattcatccagtgcctacaatttattagagcttagggtacagcagtaattagaacagatagaaatctctgaagtgaggcttacattgcactgggataaacagacaataaacactaaacataatacataactaaattatgtactaagtaataagtttatggacaaaaataaaatagagcagggctctgcatgagttgagatgggggctctgatttaaatatggtgctcattgagagagtgacatttgagcaaacacttgaagcaggtaaggttagccatgtggctttcttgttgggggggctaccctggggggcactttaaccagagggaacattcagtgccctcaggtggaaagtgcctggtgtgtttgaagaatagcaaggatggcagtgtggctggagggcaggaacatgaatgaagactgagaggtacagatggggggcgggatgggagactggaaaacagggttcctgttaaatgctgccagccaatggcaggctttacaagctgctttcatgccccgaatctcatttgacctgatgctcagagtattaatgtccactttttacgtttgtgaaaactgtgccctggagacaggggcatgggtgctaacaaccagattggggggtgggggcagggaatgggggcaaagagatgcgcagtggcttatcattcgacattcagatagcacagacacagagagcccgcagagcatagagcatagaacaatcacataattaggaagtaatgagttttcacagaactggttttcatagaactggtttctaatagaatgtacttaattttaagtttatgaaacttgatgatggctggatttaacaacagggtagcaaaatctctgaaaagctgacagttggctcttataaactggtgtgagctgccggctccagcacacctaccgcctggggaggtttaagtgacccctgaggtatgagtggcagagctatgacagttggtccttattccagcactcttgtaggatttctgtgcaaagatttgaggatataagtttagcctgagtcagggcaaggtcctgggcagtgtcacaggaacacagcagctcacaatccttgaaactctgctggaagacactggcccaaggcggccccttctgtccactcagcacaagcctcatcactgccttcacccacgtcctggctatgacacacctggagccacgcagcttctgccgcagaagaacacagcaaccctttgtgtttcccatcctcaggctattttcccgtcctgaactgtttggggcccagcctccaagttgctgaagggatttgcatatgaatgagctcagctctggagtcccagaaggggtgaggtgggggagtctgagccattctcaggccaaacagtgccaatcctccctggctctccctcccagacacaattccagactcttccctcccaccccaccccccaagcccagctccctctgagacggtgggcactgctggtttcccacctgcgggatgcccgcttcccaggctcttggcaggacccctcccctgccagctctttcttctccctctgctcatgctgcccttttctgtccagagccctcccgagaatgggcaatccttcctggcagcagtgggattcttggactcttaggacctgccagctgtttctctggcccccaccagctgtttctcaggcccccacattctttatggcgccaagcatttgcatgtacacaatacctgcttaggggctcactcagctctgttaggaggttttcaccctaattaacaaataagaacaccatcctggaaagagcagtgcacctaggccccagtactggctctgccattgactgactttgaacaagtctgttcctccgccaggtatagacttgaggtcttttcatgttcttttcagctctgacctttgctctggcaggtggcttatcagctgtgtgattccaattattgagccaaacctggatgtcagaacatcctgatgttgtctcaggtctgctacttgtaggctatgtggacttgggggagtcatgtcacctccatggactcagaactgtctccctgaagtgcactcactacatgactgccattaggagcaaataaaatagagaaggtaaacgtgccctgtcaactggaaagttccacatagaacaaggaattattatcatcatcattatttttattactttttttttttttatggagtctcgctctgtcacccaggctggagtgcaatggcacaatctctgctcactggaacctctacctcccgggttcaagcgattcttgagcctcagcctcctgagtagctgggattacaggtgcccgccaggacgcccggctaatttttgtgtttttagtggagacaaggtttcacaatgttggccaggctggtcttgaactcctgacttcatgatttacccacctcggcctcccaaaatgcagggattacaggcatgggccaaggtgcctggctgattattattactctttttttatggccgaaagacttgagccaggactggagcatcaacctccagaacctctcatttgaagtcaacttgagcttagatctgccagctgtgttatttttactttacatggctttcaagagtttctgaagtgcagcacacacatgcaaacacataccagatgcctccttcgtttctagacccaagtttctatctggtatcaggtgcctttaacttgcttctactcagatcactgactgaaattaaagctacctggtgaagtagcaggactgggccattaaccactggcccagcagctgggagtgatggactttccgtgaaggtgagctcaggagtaccgagctcgcacaatgagcaggagtcagcccggggctgtcggtgaatcattggcctacggctcacgcatctaggaaaatcttttgaagcacagcaaagtaaagagagaaattcctagacttaatgccatcttcttgtggacagaagcctttagagatccctcactttgctctgatcgtctttcataacttaagagtacccttttgatgtctctcagccccaggactgttagaaggctttgtaaagtgcaaagagccaaacagctaatatgccacctgccagaggaggaggctgggctgggaggtctctctaggtgcccttccagctctatcagcctgggttgtgaatcctcacaaaaggggaaaccactgctgatggcttcagcgagattaggaaaggagtgaaatggagaaatagtatccagggacaatctcagcttcttaatgttctccaaatgcatgaagtgacccttgccccactagctgggagccagaacgtgtcatctcagttggtggatggatctcagcagtcctgtttttctcattgatgtactgagtgctcaacgtatcccgggcacttttctgagtgttttatgtatatcacctcccatcctatttacaacagttctgtaatataaataggattattttcactattttacatatgagaaaaactatatacagagaatattagtttcctaggacttctgtaataaatgtccacaaactaggtggctgtttaagttgttaaatttcttaacaacagaaatttgttctcacgcagttctggaggtgaaaagtctgaaatcaaggtgtctgcaggaccatgctccttctgagggctccagagggggatccttccttgcctattctagctttctagaataggcagttgtaggcgggccgtctttggcactccttggctagtggcagcataactctaatctctgcctctgtcttcacatggctgtcatccctctgtgtgtgtctctgtgtccaaacttccctcttcttataaggatatcagtcattgggttagggtccactctaaccctttgtagtgtcatcttaacttgattacatctgcaaagacctgtttccatataaggtcacatgcagagaaacaggggttaggacttgaacatgtattctagggggacacaattcaccctacagtacagagagtttaagtaatttttccaacatctaatcattggagaagatcatataaaaatgagatgccccaataagtaaggcgttgcatcctaaagaaacagaaaacctaacaaattgaaaacaattcacaatttgactcactcttgagaagtcaacaaagggcacagatgttcttattgcaacctttcttgaacatctaagatctgtctttcttctctttttctgtctctctccctttcctgtcctttaggtcttcatgaactctggactaagaaactcttctctctccccttagccatccacttacacccacctactcactccttggacttcacagtcacaaaaactgtcccctgacatgagaccctccctgccatacgctgccatctgtgagttttaggtattctgagtttcttgatattttctcagaattttacttttcaccttattgtttatgaagcaaagatctctttttcaactctgttgcgacccaagggctagagaaatgagaggaggtgacagagtgctgaggagttcccacgccatgttctgtgatgaagggaagacaaggggggaggagggtgatagcagatgaatgaccctgcacttccaggctagttaagttgcccttcctgtgtgctccccttgtttgttgactggaattaaccaattttataccatggggtggaagctagagggaagcagctttgagctcaagtttctttttaaatgtaaaaagagaagaaaaagaaaaattacctatagttccactaaccattgctaacagttactctaattccttctactttttattttcaatgcgtactttcaacataggtataattataccatatatactattttttctgctttttcacttaatattgcctcctaagaatatttccatattgctataaaccctcgattaatgtgataattaatggctgccttgtatttagaagttaatgctaacttatttctctagaaaaggatatttacagttatttctaatattctaatatcatatgactgctataaatatctttgtttataaaagtttttttccacatttggaatatttttccctaggttatattcccagatatggaaccaacagataactttcaaagtcaaggataatccaaaacagcctgatctatcttggaagatactgagtttctcatccctgcagctgatagtgaaaaggtggtatgatatttgctaagggtgtggtaaaaagataataagttagactaggtgacttttgaggccccagaaacccatgagattgtggttctccaaatttcaatttacaaacgtgagcctattctttgtcccaaatcactttcttacttgctataaaagttatctattgctgtgtgataaaccactccaacacttagcagctaaaacaatatccattttgtttgcttatgattctgtggtcaggcgtttgagctgggcccaatgagatggtccttttgctggattagcctgaggtccttcatgcagctacagttgttcagaggcatgtctgaaggtcatctttggccttagtttctcatctggtagctgatagtgaatgccagtgaattggtctagacattttaatcagatggttcatctctgccctatgtggccgctgagccctatggcctcacagggcttcttcacacagttgcctcagggcagtattccacatgtgaaagtgttaaagaaaaaattattcaatgacacttgttaaagtgtggtaaggcagactttattcaggacagggatgaaaaggatagggaccacggcatgggatttttgcagtgagggagagagattgggctctattttgagtatagcatgggcaagtggggatttatagccagggagcatggtggtggtcagtggatgttaaattactaatgggaaacatcaggggtaagaggggttctagctaaaatgacctaacaggattcttgctggtgacaggccaagatgatcagacagcacccgtggggatggtggaggatgaagatcccaattggaactctagggtgaaaagatttcagggatggggcgttcttgctgcactgattcagcaaagattttgctaaaactgagttttacaaggaagtgcacagatgagttgaggagacgtttcagaagcctgactaaaatttggctaagcaaagaatctttgttaatagctgcaaggtcccttgaggcctaaatttggaaatagtatactgcttttaacgcatcgtatacttgttgtcagaccaagttaggccaatcaatgagcagtgaagttacattgcagaattatctgtgtgcagaaatggaagaaagtattgtgaataatttttgcaaacaatgtattattatctatcttagggacaaaataattcttgtcctttgcatatgtgaaatgtgcttttgccccttctctcaaagttttatcccattagccgttcaggcttgaactccaggacctcatgatctaaatcatgtctagaattagatgacacacaaaggtatagctcttgaagtatatctcttcttgatctagagatctctgaacccaaaagaaaagttatttgctctccacatgctcaatatctccttgtcttggtgagagaagaataagataaccacaatagaatttccattgaaaaatggaaaaaatgagaggcatatagcaattactgctccatagtaattctgaaatttagccaggcacatgttgccaactccagataccaagaatgttccttgattagagcccagttctgcttccttggaggggtgagagtggatccccagtccattgctctctgggagtggtgagagtggctcttgcctctgatcttgactctgcctctggcttcttagctttgtcttctgagacattctttcctttctgtaagaaatggcccatgtttgtagctgagtagtctattcagttcgctttctgtacatagaaacctgaggctcaggagcctcttttcattttgaattgccacagtcatttctagtccaagcggatatagctcccttaaaatctttttgggtctccaatgtagcagaatatagttcactccactagatgaaaaacatatccacaattcttttcaaaataggtcttcctactttgaagggcatgtcagggtgctacagaataatgctcttaagattcttaggtgccttgtggtctggctgatagggagtactgggtactgccttaaatcttctaggtcttaacaaatgattcttacagtcacaccattgatttgacatttaccctgaagccatttttggttttaaaatctttttttttttttttttgagacagtgtcttgctctgttgcccaggctggaatgcaatggcatgatctcagctcactgcaacctccgcctcccaggttcaagcaattcctctgcctcagcctcctgagtagctgggactacaggcacacaccaccacgcccagctaatttttgtatttttggtagagatggggcttcactatgttggccagcctggtctcgaactcctgaccttgttatccacccaccttggcctcccaaagtactgggattacaggcgtaagccaccacacccggccttaaaatcttttactagtggataaactgttttccaacccagctagttctgggccctctatatttcctctaagttctgctcacatattgaagacttacttcttcctgaagtacattgccatacacaaccagaagtacacactgacactttcaacattctgtctagagatctccttagccagatatgcaagttcactacatacagtccttcctttcttttcttttcttttcttttctattttcttttcttttcttttctttctttcttcctctctttctttctttctttttcatagacagagtctcgctctgtcctctgttgcccaggctggagtgtagtggcatgatcgtggctcactgcagcttcaacctcccaagctcaagtgatcctcccaccccagcctccagggtagctgggactacaggcacatgccgcaccaccacacctggctaatttttgtattttttgtagagacagggtcttgctatgatgcccaggctggtgttgaactcctgggctcaagtgatcctctcaccttggcctcccaaatttctgagattacaggtatgaggcatcacaccttgcccattacatacatttttctaccttctaagttgccgcagacaagttttgccaattgattcaccattgcattattcaagtggtctgttttagactcctatagcagtctcttcactgtttttctagaatttacttgctagccaatcctaaaactgaagccacatattctagttttttgttactgcagcattctacttctggtatcaataactatttcagtcagacttcaatcaggaaagcaaagtctttatgagtaatgtgagataatgaatatttatgggtattagaactcgtaattatagaaggagctgggcaagtaaaagttggaaatggggatttaaaggattagagaaaaggtcaccaagcagttctcttaaagccctggcatgggtggaaatattggcatctgcaagggaatctgataagtcaattctacctaaggggccaaagtgcaacaatgaaggggaggctcatggaaaagggtctctgagaagctgttggctgtaagcagctaccacctctgtggtttcacctgaaagtatctgatgataggcatgggccactgttggtcatcagagccagtagttataaagagccgggtgcagagtagaggaacgtgagagcaagtgaggatgtgttggacacatctacacatttctttctctgtatgtgattacaaaacagccttcagtgagtaatgactattgcctttcaaacttgcacaaattcctcttttggccaactctaatctagaactatacagggaaagaaagtctggggaacgtagctcccagattaactaaactggcaacagggtaatccagcatactccctaaatgtctgcctaaattaagtctgcaatgctcctcaagggccctgagcagatttcagaaaggctccaggagatagctcgggaacattgacaaacaaagtcatgaggcatttgggttataagacagcctttgtttatttgcctaatgtcttgaggagcactggctagggaatcaggatgctgcaattgtggacctggatccaccactcactagattcatttatcatgagattcattcaccactcactagattcaccagtcaccttgcccaatttgttcaaattatctgggcttcaatttcctcatctataaaaggagagcaatcccccctgggctgctttctctatacattgctttgaggagccagttggtagctgtcaatgcatttgtttagctgatgtaatgaatttatggacatgcagagagcagccatacatagcgagagtagctgtccttccctagagtagctgttcttccatagagtagctgtcttcccatagagtagctgttcttccatagagtagctgtccttccacagaaatttggccaatcccagctgccctgccatagttttgcctagcaggtttgtgctgtttctgctgaggtagaaaactcatagaaaccaaagcctcttggcttctccttatcagatgtgccttcccagctctctgtccttaacagagcccctttctgacgccaggtaatgggtagtggggaggagcagctgagatttgaataccccaggccttcactatttcctctccctacatactctacccaccccctaccctccatctatgatttctacctgcctacattctattcacgtttcagtctccagctcaaagattattctcttcttcctaaatgttttctgatttccctcagctggattcaatcttttccattccttaaacccccagggcagcccatctttgattgcatttacgataccctgagaataccccaacacatatacctttgagtacttatcttattcttctaccaagtgtcacattcctagaggcagggaacttgcttattgagctcgtataacaaataaataatttttggcacccttcacattaaagtgtagacagaacttagtacacacatatttggtgaattgagttgaaagaaaacaaattgaggacatacagccacatgttggtgtcctaaataacaatagtctctaaggacatagtcgcccacaagaagaaatagaaaaatgaagagtttattattcgcagccacatgggtctccattattatgaatgttttgtcttcacttgataaggtccctccatcatgttgatatgatgacctctgagaggggacagtccaaatagaagctaggtctcaatctgcctatactcagaggtaaatgatctttatagaactccatattccacagcacaggatgcaaatattaaccgggaccagtgacccctctgtttaggttatgactggagctgtcactgagccacatcctctctaagagacagtccatgcacccaagataaggtttcaagaggcctttgagccaggaaaattgtttggccaagtgtctgtgtctttagtcatgtactctctgggttggtgggttcttttctctcatctcagaatagttcccaaagcaaaactgatatcagaaaatgttcatgttatctctccagccttgagcaagtcacttcccctctcttgacctctgtttcctatagaaggaggcagatagaaatagctcttaaaggtcccgcccagctctgatattccaggactctattctgagctgcaggctgaattcccagggccccaggctactggccttctcttctctgcttctaaaaggatgtatggctcaaattttcccatgggcctcagctggggcatgcttcctgttctctggaatactgtggctctgcaggtgataaccatttatctgatttatctgccattatgaaaaggtccttcagcccagacgttacaaggagggaggtcatttatcacagaccctcagtagtatctccctaatccaaatgaccagtgtgttcacttgaaaatgttcatgtcccagtcactgcagaacccaagaggcactggggataccaagttccagaaagaagcctgtgtagctggaactattaatgcccaaggcatgactattcattattaacaaattcaagttcatccgcaagcagtaatcctgcatatgttaaaactcctgcttaccatcttctggttggtttatataatatatgactatgatgatttgttagaactgtgttagactatgatgactgctatgtctggaattggaaaggaatctagagctcagctagtccaaacccctgtttttacaagtggataactgagagctagaaaggagatggcccaaaatgcagaatacggcagtgtcaggaacaggacccaggacctccaactgccaggttcctgtatatcgtattactccaaagcagaggtcaccaagatggtgtactctagttcatgcagttactcacagaagaatccctttcccaggccctcattctaaatctatttagcttttttttattaagttctagcaaaagcagttaactggtttctaattcacaacatattaaaaataagcagacagaaaagtacagtgaataggctgataaaaagacaggaaataaaacatgacataaagaagacttcagaagttcaaggctttatagtccggcaatgtttaacgccaggtcaagcgacattacacaactcaatatccccaagattatcactttaatatagtatcacaatggttgacattcataacaatgtccctggatcaccaagaaagggttagcatgtttcacttgagaaagtgggtacttctttaaagtacttttttttttttaagtgttacaccaaaaagaaaatttttagttatagttaggtaaagctttggctatctggaaaactgagtcagataaaataaaacagcagctgggaggttcaaggaagtgacatttcagctgtgtgcagataggcacattctatagtaacaagactggtgtgagttcggctggtatctgcagagaagaggaataaatagcaaagccatgatctcatcttctgtttacacttcaattcccaaagttagtgattaattgtacttgcgttttgttgccagggcaaattgtttttctttgaaactcccacttattttaaataaataaaccattagtttcaaaacaggagtgtcaaatgtcaagatatttctgacatgctaagctaacgaacaaaacaatgaattcattagaagctactagagatagccgcctttgagaacttttctctaatgactttgaaaggcagcaggaatcattcttggtaagagatttttttcatgcatcttggctaaaatttggtccagaggttgcaaacacaaatacaacttaaaagaattggattaggtataagataatcgaatagatacgtcaagaatttatactcaaataaatataccaactagctatcatacgaagcttcccaaactcctgtctcacataaaatcagctttaagccaccagtttaggatctctgcttggatctctgaattcgcacagggcctctggctcttccaaagaagggaattcttttagcaaacaggcatgttttttgcatctaagtcttaacacaaacatgtacacacagagatacacactcaaactatttttgggtgattccaataaatagtttctgtattaagactgcctattaaacattagttttcattacatgactttcctgcttaaaagttttcagtgtcttccacttactcacagaattaatggcattcaaggtcaaccataattttctttccatgtatccttccaagtacatctcctcctacaatccccacagactccctggctactcactgttcacagaatggggcttgtactttcagttcttgtaaacaaatgtttattggataactattatgtgccaggtcctgttccatgcactgaagacacatctataaagaaaataaagtccttctctcctgtagcttatattctaatgtggattgtttgcctgctttgagtgcatatgcagtgcttctgcttgtgtgaaagcatttgtcacactgtgtaatacctgcctgtgtctgtgttcctcaatctcaacactgctattgtgtgcacagcactgtgtctatctctcatcacctccatctcatgctttgctcggcagtaggcacacactggatactcaatgaatgacttatattgtgtatacagtttccattctttggaaatgtggtaagttcctgttgtgcagagaatctgtctgcgaggttatctaactttttaaaactttcatattgagttatttttaataaataagctgcttggttattgacagcaacaacaaatatcaagctacttctaatggaactaaataagacgaatgaaactgatcagatgtccacattgaattaacttgtaatgcgtcttttctcaagaatccttaacctcctttctttgggtttctcaggctgactagcctactcttgggtggccccttcctttttctttctaaagataaggaaagaagcctagctgggaaactgctcatcttgttccctttctctttgacctcaaaggtagaaactgaggaccaggtgctggcaaccttctgtggcagggagaccacagacacagagcagactcccggccaggaggtggtcctctcccctggctccttcatgtccatcactttccggtcagatttctccaatgaggagcgtttcacaggctttgatgcccactacatggctgtgggtaagttggagaagtgactcatcctcaggtctctctctctctctccgaagatgaaaactgccttgtgacctctcctttacgatggaaatctgtgtgtgcaccacatagattttaccattaatgtcttaatgcatttgctctatcacgtatctatccatctatctaccctctatccatccagcaattcatcttttacaaagtgttttaacgtaaattgcagacatcagtatacttcttcctaaataattcagcatgcatattattttgctagagtttcatatttgttcacagcattttttctttttgtgtaaaattgacataaaatggaatatacatatctcatgtatacatttgttgaattttgaaaaatctgtatttgtgtgtaacccaaacctctaacaagacactgaactttaccaccagcccagggggttcctttgtgtccctgccagtcaatctctgctcccacttcccttagaggaaacaactgttttgattttttttctgctgtagattagttcttgcctcttctaaaacttcatttaaatgaaaacatacagaatacattttgggggtgaggattcttttactcagcataatgtttttgaagttaattcatgtgtcgcatgcatcagtaatttgctccttttcctggcagagtaattttccattgtatgaatatactaaagtatgtttactcattctcttattgacggctacttggaatctccccattttttagctctcactaacaaagtttttatgaaccttcttgtgcaagtcttcttgcaaacatatgttttcaattctattgagtaaatatgtaagagaagaattgctgagtcataggataggtatacgtttagctttatgagacattgccagaccttttccaaagcaaatgtaacattttttatctgtccaccaatgtatgagagttctggctgctccacatctaaaccaacattagatgttgtcaatttttaaaaattttaatcactctggtgagtatgtagtggtacctcattgtggtttaaactgcattcccttaatgactagcaatgttgaacatcttttcatgtgcttgttggccattggtttatcccttttggggaaatgtacattcaaatgcctaggacagggcttgacccacattaggggcagaaagaaagaaagaggtagcatgaggtagaagttaagagcacaagctctgtacccagcttgtctgtatttaaatcctgggtctgccacttattatctgtgtgattctaagtttgttaatgcctctatgtcgccatttcatcctccatagaatgtgactagtaacagaatgcatagtaacaaatgtgtaattcttcctgaggttgttgtcccacacacagttattattataactgttagaggatagtggtcccaccagaagtcaagttacctgggtttgaacttggctttttgtgaccttgggtaagttgcctaacctctctgagttccagtttcctagtctgtaaagtgaagataatggctacctctgggctgtatgagaggattaaatgagagaacgcatgaatctcctaacatagtgagtggcccatatcaagtgctctataaatgttggctgtagtcttcatcatcatgcatgtattgatggagaggctttacctgccctacagatgtggacgagtgcaaggagagggaggacgaggagctgtcctgtgaccactactgccacaactacattggcggctactactgctcctgccgcttcggctacatcctccacacagacaacaggacctgccgaggtagagcctaccaatgattgtatgcattgcccttataggccacatcctcaataacattagatgaggctcagagaaagacagatatgcaataggaacaagtaaaaatgaagtcaatgatgcacctcagacaccacatggatgaagatgcagaaatgcccacccagcctggaaacctgatcttgggttcccaaaggagagaagctctagactatttggccatctttctttctggggcagcatttttcactatacaggttgctgtctcctatcctattgtaggcaattggtctggtcaagttaggggaaaacttgggtttcccagttccttctctttgagccacgaattatgctttacccagcaactccttttctcttcttttccatggcccctaagttcctctacaatagagagacctcagtccaaagcaaagaagtgagagaggaaagaggcaaacagaaacagccagaaaacttcccattccttctatctatctttgttttcatctatcatcaacgtacctactatgctatagtctcgtgcttagggagggatggagaaatggaagggtttagccactttctaggaggagctcttgggctagtggggtaatgggcatgtaagcaaatggtgaagtgtcttatggtctccattttaacattaatgtttccattacatttatgtaatggaagtatggacatagcacaatcagacctgtgcaggcaaacacttcccagagttgtgacccttgacagagatgaaagaataaagagaagaagggccttccaggcagagagaagagcttctgcaaacagtcagaagtgtggtagaacttggaatgtttcagggaacagtcaatagattagtgtggtccaggataagcatctgtgcttgaaatctcacttggaagctgagtgagggatcactgggggagcacaagtctggagacaaaagtttttttcttcctccttcaaaacctgctatttgcttctgaataaaaccctatataacacatcagtataaagcaatccaaaaccaaaagaacaggcacgtgcaggatttttcttaaagagtgtatattttctatttttttattcggttaagttcttcttgagtatctactatgtgttcagtacagtcagggccaagaatgcttagggcagagcaaggtttctcactcattttcttcattttcacccttcaccaggagcttttttaaatataattttcctaaggcccccaccatgaaattttaatatcacagatagactatatatctgtttatgtactgtatgtccatctgtgtattgtgcatttaaaaagcaagaccttccccaccaagaaggaattttagctttcttgagggcaagatcgcccccatgagaatgcttggggtaaaaaatgaaaacagtcaggaactcaggagacttccatcttcaccttgtcctgcagctcatagctgtgaaactttaagatagtcaagacccctttttcagaactacagttttctcatttgcaaataagcagaatgaacaagggcgtagaaacattgacatcccagatctaggatgaactggcccaagggtaaagacttagtgacacataaatgttccttagcagggctaaagtcacgtctgggttcccaggacagtggattctcgcgtgcagtaaatgcagtggggaacgaagcagaattcctgcactcacagaacttacagtctactgggagcaagaaaatcaatatagggagctgttaaaagaaaaacttcagacaaattaaatttaacagagtttaactgagcaaagaacaatttgagaatcctcccctgcacccaccctaccaccaccagaatatgttcagagcaactccagggttgctcatgctggataatatttatgggaagtagaaggaaagtgatggacagaaaatggaagtcaggtacagaaacagccaaattacttacagcttggtatttgccttgtttgaaggcagtttgaacagatggccacccgtgactggccaaaactctgtgattggtactgttaacttaaaaatcaagattacaaatctgtaagtttagaaaaagagaggagattttattccttatgaagggttacagcaggtggccgtcctcatagtctgggaagcaccacctccagccaagaccagagacaggcacttaaaaggaggaggggttgagataggagctttatgctgaacaggttggctaaacatacatattcaacaggttataggaggagctgtgaatattcataagagtggtcctgacacatgcatattaaacaaatatgtatgcaacacatgacccatgttcactttgggatggagacttcacattaaatgtattacagttagggtctaaacgtcctttcaggatgggagacattcaggtgtgcagcctctgtaaactggcgagaaccaggccatggtcagaagtctcttatcaaaagaaagtgactgaaatcaatgtcttgtccattcaaagctacagttatggctggtggaacagggtggggatcagacagtcagcatctggtagagctgaaaattgttttcatatcacttaccacaaggccagtacttgttcagctgctggagaaaaagaaaaactttgtagcatcgttagaacatagtttatgctttcagtgtagggatgcgtgacttaacccttgcctggcatggccttagttccttcatcatttataatttggtattttatttccacaaggagtctgttttctcactctcatgatctctatttaacattaatgttggtcagttgttgtgtccaaactgcagagaaaaggggatatagaaggagtgtctaacctaccactccatcatggccaggaattccgttttaaggtttttctggagatcctttgccacagggggcccattaggtcagtggagggcttaggattttatttttagtttacagtaagacagtagattacagtctacttaaaaatccagttaggttgcagttcaccatgtacgcagaacccttcaggctgaatttaaaatatgtaaggaggccgggcgaggtggctcacacctgtaatctcagcactttgggaggccaaggcaggaagatggcttgagtctaggaatttgagatcagcctaggcaacatagcaagaccccatctctacaaaaacttcaaaaatcagccaggtgttatagcacgtgcctgtcgtcccagctattcaggaggctgaggtgggaggatcactgggagaaggtggaggtggaggtggaggcgaaggttgcagtgggctgagatggcaccactgcactccaacctaggtgacatagtaaagttctgtctcaataaaataaaataaaataaaataagtaagaaggaagcttaaggctacatttagttgaacagagtgaatagcactataaagaaaaacaaaacaaagacaggggttagacagtgaggagtgagggtgtgtgtcaagggcctgtaggagatgagggatctcctgaagttctgggtacagggaggacatgatcacagaggtccaggcatccccctgaccactccatctcaaaacccttccctctcagatccctctccctgacccccataccagaggatctgatgagaaggatcttcacacagggtaaacagccctggacagacaattagaaaatctgtgcttgaatctcagctcggtaaattactagacatgcgaccttgagcttcatttttcccatctgtaaaatggagatgccgataccttccctgtctactgcttgggaccattgggaaaatcatatagtaacagataagccaggcttgctatggctgtggttgcgatgcgccattttctctattatgtttccaacagtggagtgcagtgacaacctcttcactcaaaggactggggtgatcaccagccctgacttcccaaacccttaccccaagagctctgaatgcctgtataccatcgagctggaggagggtttcatggtcaacctgcagtttgaggacatatttgacattgaggaccatcctgaggtgccctgcccctatgactacatcaaggtgagcctgcaatgaacacttgtcctggagatgctggaaaatcttggctgagttgggaaaattgatattgcggaaccttcaccttcttctcccaggatagagagcctagcagctagttcctcaaaaaggcattatttaaaataatatctaccatcttagttagatctattccaggaatctctgatccgaaatgaccccactggccactagggtggcttgaggaggagagtcgtgaatctgcattttagaaaggtctctggcgggcacgcccagcctcatgagcacgcctcccatgccgtcacacagggccctgtgcacagaagggcctcatgcttggtttaataaacatatgaaactatttttcttctgtttatttttttaacctactaccaaggcaaagaagaatgtatgaaaattttaatttgttttaaataagggtccccgtattttcattttgccccagacctcacaaattatgctgctgggcccacttgcgggaagaggctatgtcaaaggcaaataaagacggaacaaataccacaggcaaataactactcaacttgtggttatttcaatattataattaagaaggaatggcagcctgaatttgagccatggctgggataatgggggagatattttcgagatatgtggaaagtaaaaccagcaattcttatagagtgatcagccaagacatccaagtagagctgaatattagggtctagctcagaagagaccctgagctggggataaagatgggtgccatgaaatgtttaaagaggtgctgatttaaactgtggaaatggcgggatgtcctagaaaaaaaaaaaggaagctagaacataatagattatgagacctagatggaggaagaggaacccacagaagaggtcagaaagagccagaaaatgagactgcccaggagaaagctgtcaacagtgagagaggcagaaaagcctgagaggacacagaagaaaactctagaacttagagcctgggctgtcccctacttgtgtacagaggctaagaggcagcttgactggagggggttagcaggaagcataggccaccggttttctattttgctgtgttagcaaactaccacaaacataacagcttaaaacaatgccaatttcttatcccagcattgtgtcagtcagaaatcccagtgagcacaatggggttctttgttcagggtctcatgaaactgaaatcaaggtgtcagctgatggagctcttatctagaggctctggagaagaatcaacttccaagatcatttaagttgttggcagaattcagttccttgcagatgtaagactaaaatccccttcttcttcctggctgtcagccagtggtggctctcagctctagaagttgcgctcagatacttttacattggcccctgccatcagagacagtcccttccatcaaattcctattacacttcaaatctccctgacttctgctgctgctaccagcaggaggaaactgtgttgaatgggctcgtgtgattgggttaggcccacccagataatctccctcactttaggtcaactaatgaataactttaatacatctgcaaaatcccttttgccatttaacataacatcatcacaaagtaacactaggggtgaaggtcaggaggaccaccctagaattctgcctgccatggtgtcccagaagctacacatgggagcctcacccaagcacacaacctcttggggcttcatttgtttcccctctcctcaataaggacaggacaaagatatcacttgggattgcagaagtcaccaaatgatagataaggagtcatggccctcaaagatggggaaaaaacaggttaaagacatggaaaagaaccaggactgagaggtggggaatccggatcagataatagagcctattgccttctctcccccactgcccccaacctcctgcaaactcatcacctccctcctgctcagctgcaaaacttcccaactgttttttgttttgttttgtttttttgcttccactcttgccctacacaatctattctcccatagcattgagggtgatctttataaaagctagattcgatcgagtttgcacttgaaattaaacctaaatctctcaacacaaagtggcgtttgtctgttttccaacctcatgccacagcactcccactgcccagccagcctggattcctgcctgttcctaacactaggcaagctctttcccacccttggctttgacctttacatatgcagttttctctccctataaagtgttcttcccttctcttcaaataggctcatactcatcctacatatctcagatccccaatgctacctcagagaaaggccttccttgattacctaaagttattatctattatattaccattataggaatgattacttctataggttacatagattttacatcaattataaacatacagcatatatttcttttgtatatgcatatcatcttgattatttttataacccttatgacagcctacaattattttgtttattatttcttattagtccccccaactagactgcaggttctttgacagcagagatcatctctgctttatgcaccagacagcactctgcccttctctgagccacaatacgttcatctttaagcagaggatttttttttaattttactttaagtactgggatacatgtgcagaacatgcaggtttgttacataggtatacatgtgccacggtggtttgctgcacccatcaacccgtcacctaggttttaagccccacatgcattaggtacttgtcctaatgcactccctccccttgccccgccaccccctgacaggccctggtgtgtgatcttcccctccctgtgtccatgtgttctcatttttcaactcccacttatgagtgagaacatgcagtgtttggttttctgctcctgtgttagtttgctgagaatgatgacttccgtcttcatccatgtccctgcaaaggacatgaactcatccttttgtatggatgcatagtattccacagtgtatatgtgccacatcaatgccagtctatcattgatgggcatttgagttggttctacaccttcgctattgtaaatagttaagtagaggattattaacctgccttgtccacgtcaagagccattgtaaattataaaagagagaatgaagatgaaaccatttggtgaatggtaaggctcactaaaaacctaagtgaataccaagggttcatatggaagcttccagaaaacccagagtgcagtggagaggtgttacctgcagtggccattttggctgctcagatggaacactctatttctctctctctctctcatattttgcagatcaaagttggtccaaaagttttggggcctttctgtggagagaaagccccagaacccatcagcacccagagccacagtgtcctgatcctgttccatagtgacaactcgggagagaaccggggctggaggctctcatacagggctgcaggtaacctcttccctcccaggtcacaccgagctgctgtgcttagcccttgcagaggcagtggctgagggaggaggtgtgcaggcttggatctcctctggagacctgatgggactcccagttgagcagctggggaccaaggcacgtgctttctcctgactcagttttccatctataaaatgggggcaagggcaacaataatgttgggtggactagactgatggttttcaaaacatgtacttcagtatcgcatagagagattaaagaaaaagaaatcttgtttcctgaactctacccctcacacagtgattcagtagacttgaggagggccttttcagctccagccttctccaagtctagggctagaatttggatgtgggtttctagcccagaatgtttcattatggtgctttgcctccttgtgggccccccatcagcaaagcccatgggtctcatgcccccatcccccaagtcagccagtcctggcccaaaccttgatcgagccattcaacctgcagtaactggtctgtaggaacccaaggaaggagagggtgaacatcagtgacaaaagatcgcagctgggcatgactaatctagttcataaactaaaactctggccctgcctgcattatcacatacactgctcagatgcgggagagtagagaagatcttaacaaaggagagtttgtctcagaaaaagtgtcagggataggcccaggcctgaagagcctgtcagatttagcctttcaaggagaggactcagaggcatatgatcacagtctttctaatgctttgaagaagggcctcgggaagaaagagcaatttgggtcatccttggtggcccaagaggacaaatgagtgaaaattacaggggcgcaaatttcagttaagtaggaatgcagtgttcatgtaatcagcagagtccgtgcctgaaaggttagggaggcattgagctccctgtcactgtgtccctgagctgccatgcttagccctcccaggggtggtggctgagggaggaaagatgcaggtagtggctgagggaggagggatgcaggtttggacctggtggggctcctagctgagcagtctgtttggcatctactgcggaggatattttaagagaagcatcagacaaggattggatttaatgacatttaacattcctcccaaccctgtgttttaatgaaatcatctggtcaaccatttcattctacaagtaaggacatggtggtccaagttggaaactgccctattcacggttccagaattagtctcttgcagggcttggaagatccatgcctccaatacccagttccatgttttattcaccttcatcaggccttgctttctagggactggccctttaaggtcagaattctcttttctcacctgctgttctttcatttgctcctcaccaggaaatgagtgcccagagctacagcctcctgtccatgggaaaatcgagccctcccaagccaagtatttcttcaaagaccaagtgctcgtcagctgtgacacaggctacaaagtgctgaaggtgcagagccttgcctgggaaaggggagtgaccaggccacagaaactctcgaaacctgcccctccccagggcagatgggctgccagaacttgtcatagttccagcacagaatttcctagctgcccatcaacttctcaaatgctccagaaattccaaagcatgcgtcccaggcggtctcacactctgaaagtggcacaaaagtttgttttttttttttttttaatcagagcatgagctggtttgaatttttaaaatatggatccatacagctctataatcaaggctgagaactgtaacaaagttcatcgggcttatagaggggagtggagtgggataccaggaaaggaagtaaacagtttaaaagtagcaaatggggctgagcatggtggctcatgcctgtaatcccagcactttgggaggcccaggcgggtggatcacctgatctcaggagtttgagaccagcctggcaaatatggcaaaaccctatctctactaaataatacaaaaaatagccaggtgtggtggcgggcgcctgtaatcccagctacttgggaggctgaggcaggagaatcacttgaatccaggaggcagaggttgcagtgagctgagatcacgcctttgcactccagcctgggtgacaagagcaaaactccatctcaaaaaataaaaaaaggaacagatgggttcccctcactctcccacccccagaagcagtagttctaggaatcacatggttcgctttaaaaaaatcacctcccagctctcacttgagatcagttaaagcagactttttggggctgggaccagtgattggtgcagccaagctagaggaccatcgctttcaaggaatggttctcaaagaggggtgttcagtttcagcatcaccgggaacttgttagaaatgcaaatgcttgggtaggccagcctcactgaatcagaaactctgggggagaagcccagcagcctatgttttaacaagctctctaggagatgctgaccgcttgccctggtttgagaagcactgctctgaaaaaggagtcaatgcttaccgttttcccttcagagatagttgcccaaaccccttcttgcacacagcccttgcccctctccagagtatgaaaaggaggtatgaattcagcatgtatctttcccctaccttcaagctcacccttggaagcccatgggtggaaaatctcagtcgagatcaagacacgtgtggagcttgagttggttttgctaggaaaaaacccctgacaccacccccacctccttcttcccactcccttcttcctgtctcttcccaggataatgtggagatggacacattccagattgagtgtctgaaggatgggacgtggagtaacaagattcccacctgtaaaagtaagaaagcctaatgggttgttataaagatactgagctccccagcactggcgggatccgagcagagcatgcaagggtgaaagcttggcaggagcactctaagggggatgggagcaggaatttaacagacacacaagggttgggaaaaaaaagagtatcagtgccccttttggcaataagatgtttgaatcccaaaagaaacttcttgtgggcccagtactttgttaaataccaattttacttcagcccacggatgggttgccagacttactaaaggaatagcacgtgtccaggttcaaaaccagctttggcaattgctaattcaggaaactagtttggtgctggtgcccagagctgagtgaccttgctagtcttcacatggccatcagccatatccccttcatcttctgagacagctcatgatttagggctgtgcaggaagggctgtgggatcagcacagtgggcctgcatgaagcagaggatacagctcttcactggctcctgggacccagagttcttgccttggctctgcccctaaccaactctgtgactgtgaataagacccttcgcctcaactataaaataaggagtttggactagctttatattttagaatatgtgccagtggttttaaaatgatatagtctatataaatcatctactgagctttgtaaaaatacaggcttccaaccccttcacctcaccaccaccccctgcaaccacccctcaacacccaggtgatttcaatgaaagacttataaggaccacagttttagaaacttattatggccaacattgatgagaggaggcacagtgacagaaatagtcagggaaggaagggagagagaagggagaatttgctttacaatggcttggtgaggtcaagaattagagcctggcatggtggctcacgctggtaatgccagcactttgggaggcagaagcaggtggatcacttgagttccggagtccgagaccagcctggccaacatggtgaaactcagtctctactaaaaatacaaaaattagccaggcatggtggcgcacgcctgtaatcccagctactcgggaggctgaggcgggagaattgctggaacccaggaggcggagattgcagtgagccgagatcgtgccactgcactccagcctgggtgacagagcaagactccatctcaaaaaagaaaaaacaaacaaacaaacaaaaacgaattagagttggtcccacccatcttcctttcatgaattttcatgcaaactggagcgctatcctcttccctttctcctacatggccttgattcagcaggcagacaaatctcctgccattgtcccaagggggacattcccttaacgcaaatcccaggaagaactttgaagtaaaatacgattgttcttttccttttcatatgatgaaatttttccttttcatatgatgtagctggagtcagagcctagcatggggaaggagggggcattttatgactttaacaaaatgtttcaaaaaatgttgactggatgcctgcacagagttccatagggaagtcggacggaaaagacaaggtccgggcatggcggaactcaagtggtggtggccacagccaccacctcctccaatctgaggctcgaggtgcagtgctgtgactgggttctaagcaaagcactctgcagaacaaagcaagggccatgttgaaggagaaggtaaaggaggatatggggtgtcctggatagaatcaggctttggaattaggaagttctagatacaaatgcagactctacaagctgacagtccctctcagctgtaatcagtgtattcagactctttggcctcagtttcctgccctcaagattgctgtggggattaactgggttaatatacataccatacccatggagggccagaaacatgcaaaagataaacggactcctcctgccccaacccaatcccctcactaggaagtggtttcatttctctcattcacatttttggaaagtaggaaacattaataatttttccctgacttacattagcatacaacagaacaccctgtcattttgtagtaaagagaaactgtttccctgatatgaccctattctcccaaaataggctggattaagactattagaattcccattcagtcatacccagcatctttgctcactctgtaggtatttattgagcatctctctgtacgaggcactgtgctaggtcctaggggagaggcaaggacaggactgaggagtcgagagtccccaggcttctggggcttacaagttctatgtttcttaaaattcgctgattaaaaattttaaaaagatagatatcacacctgaaagcagtggccccagctctgtgccatgggatatcacaggtcctaaacagtgatagagaaagggctggggagtggcagctggaatctctgcttccagacaagaggggtgcactctgtggtaaagaaacgtgcactagaaaagaagctgggaattatgggtcattgttctggccctgcctccaccttgctgtggtgaccccgggacaagccctgttctactctaaatgctgtcaagtgagggtttggaccagatgcaggcaaagctccctccaggggcagaattttataatcctcatgagccaggatgtatgactctgcaaattctcagaacgatacaaattccacaatcccaaactgttcttcacactggctgtacctaaactatgcattcttaatcaattctggtggagtaatttctgtatttcctgcataaactgtttctgctttgcttgctaatctctctctctttctcttcctctctctgcttccttcctctgtatctcttgatccctctttgatcttcaccatggtggcagaaaatgaaatcgatctggagagcgaactcaagtcagagcaagtgacagagtgaatgacgggaccccacacaatgcagacatccagaaatggatcactcccaagacccctggggcccagagctgcaccacccctccccacccacaacacccccgtgcccctttccatgtggattagaatgggtgctgaacaacatgatctcagcagttgaagctgctacgtgtgtgaaagcaaattctccacttgagggtttgcccatcattcaaacactattccagaaaataatgaaaaaaaaatgtgggatttattttagcacctctgagtggactgtacttttctcaacggaaaaaaaaaatgcccttggtccttgagacaaaagatttaatatacaaccatgtggcctcaggctgaccagatcaaagtggtttctaatccattctacatgtcaagtttaaatgaaccagactgcctgtgactttatgaatctgaaggtattacctgttgctgctttcttaaccaccatgagtaggtaaagcaaataataactcacagagtgtggatttttgagaatctgaatgttttctcattcacaaaagtatcccttctacccctatctggcgcagggctgaaatgtcatcattagaggttctgtcttctggggcttacaagttctatgtttcttaaaattcgctgattaaaaattttaaaaagataggatcacacctgaaagcagtggtcccagctctgtgctgtgggacatcacaggtcctaaacagtgatagagaaagggctggggagtggcagctggaatctctgcttccgtctgaacatctggacacacatgtcagagaatctttgcattaaatggactgcccgatctatttggtgattaaatggctgtgcggtgaggggagaaccctgggcagtctggagactgaggtgccattctcggctagagacaccacccaaagaagagatgggctggctactaaagacaagtgtcagttgaataaatgtctttaaacctacaacgtattaacagcattcatactcagtgacatacagggcatcagaatttaagaggaagatttgatatgtacccaaataattgtaatagctttgatgcagacaacattagatatattccatcaaagaaacatgagtgaagagttccagaacaaggaagcagccctgcccagttagaattagaaaggctttcaagaagaaggagtgtttcatcaggacttcagggtggccagagcatggacacagggtgccccgtgcagcagggatggcaccagagaggcctgggagcaggaggcagcaggggagcacactgaaggagctggtgttcggagggtgggtgcaccaaggggaggaaagaagatgaggccagggagggggctagagcccaaacccccaggcctgagtgccagggttagctgattgcacatcgttctctagaaagccccccagtacagcaaagcacacttggaactgtaggtcaagaaatgtgtgtctggagaaaaataagtggcaacaagaaattaccatggagatagggtgttgggcggtacctccaaggcaaggggaaagagaagggtgttttgattccagagtgcggaactggccagacaggactttagagaaaaggataaaacccttcctaaagcaaagagcataagtcaacggaggaagcagggtctagtgtgtgctgattgtgccagacagagctgctcaaggcctcttgtgaggggttaagtcacttccatgtcccagagaaacatggctttttccctgccactgtggacttgggaagaaagtacgcccctccacactgccaagaccctctaccttccactatttatcaccccctctacctagttgtagggccagctgtatcagtgggcaaagttacttctctgaagtgatgtgaaagtaggtcctccacccagaaaatatctatccgccagcatcagccacataacaggctcccaggggcccgtccatctagccacactaaagccaaccctggaattcctgaactgggcggtcaggtggaccaaagttaagggagatgagtgataccaatacctaggcaccaagtcaatggcattttctgaaaaaggaggaaaaatcggctttaacagaaaataaatttaaaactgttcatagtatttaaataataaatattattgcctcattatcctagtgttgagctgcacacatttacctcacaaagtagaagagcatctgtacttttggatcatcaaaacaaatggagatgatttgtccagggtgattggactagaggccaggacaaaaccagttgtcttgattggccttcttagtggataagaagtacctatatttactcccctccttcatcttttcctccaacccggagggacttgaaattatttgcattttgagtggactctctagctaatcaaaaagatgaatttggagtcctaaagttaaaatcacaatgtctaaatggcactcagggataaattatatctcactgtttcccaaaatgaccaggtaaaattcaggaggacatggaactttggaaattttaccagggctctggaaattctgacagttgatgtccaccattggccagctagtacctagaataggccatttaactggaaaacagatccttaagaaccactagttccatttactaaaacagccctgggtttgaggtcaaatcttgctctcattctgatagtaacttgctgtatgtccttagacgagtcaagtctcctctctgggctcatagataaaataaagaggacattctagattgcctacttcaggtttctttccagctgtgacattctatgattcatctatgattcttcgactctggcataggctgttatacctaagattaggatttccttaagaatgaaaagattgacaaatttgggtccagagcctctgatatggccatgaaaagatgccctgactctcagctgactcacactgggctccatcagtgctgacaactcccctaagactgagctggactggaaagctccccaaagaccacctctgaggagcaggcatctttattcatgtcctgtactgggaattatggctcaaacatgcggccatcaacaattatagaaaatgaacaggggaagactgaaagctgatccacctccaaccctgcctcctggcttctatggccaagcaagctgcctgtagagaggcagcagggtggggctgtgtactcatacaggagctgggtttttttattttttgtgccaaactccaatgtgagcacattagctgctgttactcagcctaggattgggactagaagaacaaaagattatttagtttatgtcagctagagttttctcactaagccaagggcttcattcttgggcagaagaggcagagaggattgcacaataaaactagaagtaaaagaaagaggccctggtgggtaaaagactggagtctgcttaaacctcagtagaccttcccctacccaaaattgacactgggcaggtgagttgaccacacagtagtaccataatgaatggaagagacctcaaaagcaggaccatgggtagcttcacaggctgtacactgcacaccccaggggtgcccttcagaggcattataacattgctttctggaattgtgtgcagtgcacaacctgtacatctgcatgagatagatccatcagatagccaaaggaggatgagcaaaaggcagttgaggggtctcacttcttctctctcagttgtagactgtagagccccaggagagctggaacacgggctgatcaccttctctacaaggaacaacctcaccacatacaagtctgagatcaaatactcctgtcaggagccctattacaagatgctcaacaataacacaggtaagccatccatgctaagccatcccactcccgtttcacactctcggggcctcagggttggactgggggccgagacagctgtgaaaggaagaactgctcataagtgtgtagagcctgataatgcaaaacgtgtcactcacacatctcaggttctcacttttcatgagcttgtgttactgtgtccatgtggagatgcagaaacagtctcaaaaccaaaaagcaggcttttttgtttttaactttaaagctagcactgatttactaatgagttgttggtgggagcgtgaaggagtcacacactgacacaactaagagaagaaacgagaccctaaaggaagcctggaatcccccaagttaaactccttcatgtggtctgaggctgagttggggtttccaaaaaaaggccagtattactgcttcacccagactctgccttggcttctgggtgagggcaacatctcaccaggccagacccattcagcaggtaagggaccttccttcaaagacctcttcccctggtacggacaggggtccaggcagggttggggagcgaggagtggatcctctgtctccccaggtagcccagcatatcccctgaccacagctcaagcacagccacagcagtccctgtccaggccccatccatgccacctggcagagacccctggctgccccaggggctgggcagcagcacactggccagagggtgaaggaccagcaataacctgaccattggccacactgggggtttgggaggaactgggaggagaaatgcttagagacataacccgcctctccctgccttgtggcagcccaacacccgctcacatgcactcatagtccctagcagaaaaggaactctcagggagaaaggagggcccatcggctctgcctctctggcatgcaagcactgagaacattctcctgactcatctaagcctccaactcctctttgtttttgtttttgtttttgagacagggtctcactctgtcacccaggctggagtgcagtggtgtgatgtcggctcactgcaacctccacgtcctgggttcaagcaattctctcgcctcagcctcccaagcagctgtgattacagaagcttgccaccatgcccagctaatttttgtatttttagtagagacccgcttttgccatgttggtcaggctggtctcaaactcctgacctcaagtgatccgcccgcctcggcctcccaaagtgctgggattacaagcgtgagccactgcacctggccccaagtcctcatttttaaaagagggaagagttacaaagctcttagagctatttcaaaatgccagtgagatggtggccacaaatgtatgcttattaaagagtctgtcaaatggagaagaaaggaaagggcatctgtgcaacagggagccatgtgagcccaggtctttgtgacaagtgaggcggaggtgccttccaggacctgggcagcgtggggtggggaggggagcagccctcagccaggcaggagtgggattccccagagctttggacagacaccatgctgaagagtgtggtgtttatttttgggggtgacagcaagccattcgtgattctgagctgagaaaggacatggtcacattcccattttagaaagatccttcatgttgcaaagggagtttgatagaaggactaggatggtagccctgtgggtatttgaagatatttggaggttaattggtccctttggaggattgtatcccagagagtacctgccacattcttcctcattcttcttagtacatctaggctcagagacaatcgtatctgagcctagatgaccatttggaggactttgtaataactcactttagagaaattaaatacccagatctattttccatgtgttacaaatcaaccattttctccctcctctcctaacctctttcactaatccaggtatatatacctgttctgcccaaggagtctggatgaataaagtattggggagaagcctacccacctgccttccaggtacctcaccctccaaatcctttgcctcacagttttccatccaaggccctaggaccccaggttttctggctgttaacagggtgatgggggacaggggaggtgatgctttggttgctttttaagagatgtcttcaaaaggttaaaggtcagagaagacttgcttcacaccttctcaaaccagcctgtattttctgcctgctccatcactctgagagccctcctgtcccgtctctgtgcccttgccacaagatttttcatataacacagtttgcatgtgcatctgctgttgtgccggggaaatttaaaaagtgggcaccctgtcctcaagcactcaccatgctatcaaggagatgataacacaaacaacatcatgataagacagagtgacaaattctttcttccaaacagcaacgtagtcaagcctttccgattcccatggtttacttactgactccactttaaaatggaaagaaaattttgtggtaacaggaagtgttactgtgcatacagattttgaggatatttgctttagcattaaaagtataggccaagcgtggtggctcatgcctgtaatctcaacactttgggaggccaaggcgggtggatcatctgaagtcaggagttcaagaccagcctggtcaacacagtggaaccccatctatactaaaaatagaaaaaaaaattagccagtcgtggtggtgtgcatctgtaatcccagctactcaggaggctgagagaggagaattgcttgaacccagggggcagaggctacagtgagctgagattgcaccattgcactccagcctgggtgccagagctagactctgtcttgaaaaataaataaataaatagtatgggtgatttgcattgcaatcacatgtatagctattcaagtcaacttagaaaagtgtagccccaaaatgcacactctacggttaaacaaataatccacaaaaagttaaatttaatattcacaacatagtaatttacattttttttaaaaaaaagcaagaatggcagtagtttaatgatacaatcactcaagacagcattgaggaatactgaaaattaaatgccttgtctaattccatctgcatgtttgcacaaacagcaggaaatttgcaatatggttaagcattgggtgatatttgtattttgctgaatgagagtgttgggtaaactgacatagtgtattatattaatggtacatttcagtaaccctacagtatacagtataaagaaggtatactagtacacggttggtatattagtctgttctcacactgctgataaagacataacccaagactgggtaatttacacagaaaaagaggttataggattcacagttccacatggctggaggggcctcacaatcatggcggaaggtgaaaggcacatcttacacggtggcaggcaagagagaaatgagacatagccagtttgggacatagccaaaccatatcaggaggtttctagatatcagattagacactaaaatggaaaggctatggagttgtctaccattcatccttaagaagcgaagaacatgttagcatttgggagtcaggttttgaccatcacaggtgctatgggatcccagagaagaaggaagtaacaatgcctggttgtctatgaatgaaggggtaagaactgactaggaagggttcacataagaggtctttatttctgagaaaaacttatgaggatgtggaataagggaatgttcatcccacccattccgctgattccatttacctcaattaggcttgcccagaagtacaaccaaggactccaggcagtgaagcctcagagaagagaggaatggcggagctgtagaggaatggtggggctgtagcaaaccagaggatctaatccccatttggctaaaagaccatgtgagcaaaaaaaagctagggatagattccatgctagaaagccatgtggccacctctggaaggggaagaagccctgggcaaggagtcaaggccctaggtactaatactgatgctgccatttcctaactgtgatctttggtaagtattttcatatctctgggtctgggatcccatacctcagaagtaaagcatcagaaccaagagacctatgatattctgaccttttttttgagacagagtttcgctcttgttgcccaggctgcgtgcaatggtgcgatctcagctcactgcaatctctgcctcctgggttcaagcaattctcttgcctcagcctctcgagtagttgggattataggcatgcaccaccatgcctgactttttttttttttttttttaatttttagtagagacggggtttctctatgttggtcaggctggtctcgaactccccacctcaggtgatccgcccacctcagcttcccaaagtgctgggattacaggcatgagccatgcacccagctattctatgacttttaatggtcatcatcctctatgtttgtacaaagcatcttggatacaatgagtcatgacattcttttaacacccagtgttgggcagaaccatggtgtatcattggactaggccagaaatttgtaaattctctcttcgcaaaacactgtgattgaaccaggatgcaggccaggatggagaaggccatctcatctattgtcaaaaggcccaccatttcaggggtcctgctaagcaaatattacttgcccttttattttataaatgagaaaactatcagaatagtgtagtgatttgcacaaggctacttgtagaaagtcaggggcagaactgaaaggtgaactcaatacttttgatggcaacataagcaatgccgagccatttttttaccatgatcatgttttatgccatcctcaggaaccttgaatcctagagtatcacatttttttaaagaccctccctcagtaaccactgtcctctagaacccaaatctggcttcagcatagccaaagctataacatttcaagaagatccctttctcccaggaaagactgggtggggaatggcagcagccaataagaatgaccccatttcaatgagctctcccaagagcttgttgaatcattcagcctcttaaaaggacaagaacacatcaaggagaaaaacagatttcagtggagatatgaagctagactcaggataaataggttcgagttctggctttcccattaacaaccttgagtaagtcacttgccttctctgaacttccatgtttccatctgtaaattagctgttctccaaggtctctccagatctgatctgtgacctgcagtgtgccactggcaccttggttggagaaaggtagcgtttaatgctggctttgttgtgaccatggaccaagccatagacgtgtcccttaccagattagggccttgaagcactaaatatatgtaggaccagtcacagagctgcattgagatgttgccttgcagcttgctacttgtaattggaaggctgaccctcaactttgaaaggccaggccacagagagttacaaagaccagttcacatctggcctggggtgaatggcagggtgccccaggatcaagcaagaagcatctggcctcaggaagaagagcatctgaaaagcattaggttgctaaaagcctgctctcccaaagttgccaagaaaactcaaatgttccatgatgtctaaaggattgtcaaaagcacccaggccaaggagtgtagcctggccatttggaaccaggaggaggcccacactcatagtaggtctacctccaagacccaagcaccctgcctgggaagggccatgcaagcatgttcttagccagcgggggcctggtgccgaagaccttctgctcattggccagaggcatttggctacaggaggctggtggtgcatgtgcatgctcagggtgcaactcagtggaacgaagtttgctcagatctttctccttcccctaaaggtactacacagctcctgggtgcaatgatgggtggcccagagtagggtccatgcatcattgcttatagattatgccacctttccccaaccctggatgccctggggcttaatccatgggcatcaatttatagcaagattctgttaggacagagaagaaaaggtttgagggcctatgcccatggtcttaatatctgttaagtccgtgtgggatacaagacttagaatctagttaagcttctgctatctgacttaagagtcatatccttttgggctagtcacttaaactcaggaggtttactcacctagaaaatggtgatggccaaggcaaataaaatgaaaattaaaggatctctggaatttgaaggatccctggagatcattgtgaccaaatgcctcatttggcagatcaaaaattgaaatccagagagggatatttgctgactcagagttacatgggaaatggaagagaaaagccaggccaaggcttccagcatctttgttcccagtctagcgtttgctgtgacctgctagatggttttttaggttccttccatctctctgtccccatggacagaaaactttcagaagtattctaggttcccatagcatggaccacttctgaaataagacctgcctttctagagaaggaaggggagaagtgaccactactggaaatagatggctgtaaatggtctgggtcacaagtggtcttagccagaggtggttcagggtagagaaagcccaagcacagagtggtccagtccagagacagtcccagctacagaaaagccagactagagatgggccagcctagagagacttagacccaaaatgaccctgagtagagctctcccaggctagcatgacccaggcaggttagggtcccatggtggcataatctatagtgggtgaaatgtgaatttatctttgtggctcctgtcacatggctgacctgaccagtctctgtctcttgtccctgctccctctttctccttacagagtgtggtcagccctcccgctccctgccaagcctggtcaagaggatcattgggggccgaaatgctgagcctggcctcttcccgtggcaggccctgatagtggtggaggacacttcgagagtgccaaatgacaagtggtttgggagtggggccctgctctctgcgtcctggatcctcacagcagctcatgtgctgcgctcccagcgtagagacaccacggtgataccagtctccaaggagcatgtcaccgtctacctgggcttgcatgatgtgcgagacaaatcgggggcagtcaacagctcagctgcccgagtggtgctccacccagacttcaacatccaaaactacaaccacgatatagctctggtgcagctgcaggagcctgtgcccctgggaccccacgttatgcctgtctgcctgccaaggcttgagcctgaaggcccggccccccacatgctgggcctggtggccggctggggcatctccaatcccaatgtgacagtggatgagatcatcagcagtggcacacggaccttgtcagatgtcctgcagtatgtcaagttacccgtggtgcctcacgctgagtgcaaaactagctatgagtcccgctcgggcaattacagcgtcacggagaacatgttctgtgctggctactacgagggcggcaaagacacgtgccttggagatagcggtggggcctttgtcatctttgatgacttgagccagcgctgggtggtgcaaggcctggtgtcctgggggggacctgaagaatgcggcagcaagcaggtctatggagtctacacaaaggtctccaattacgtggactgggtgtgggagcagatgggcttaccacaaagtgttgtggagccccaggtggaacggtgagctgacttacttcctcggggcctgcctcccctgagcgaagctacaccgcacttccgacagcacactccacattacttatcagaccatatggaatggaacacactgacctagcggtggcttctcctaccgagacagcccccaggaccctgagaggcagagtgtggtatagggaaaaggctccaggcaggagacctgtgttcctgagcttgtccaagtctctttccctgtctgggcctcactctaccgagtaatacaatgcaggagctcaaccaaggcctctgtgccaatcccagcactcctttccaggccatgcttcttaccccagtggcctttattcactcctgaccacttatcaaacccatcggtcctactgttggtataactgagcttggacctgactattagaaaatggtttctaacattgaactgaatgccgcatctgtatattttcctgctctgccttctgggactagccttggcctaatccttcctctaggagaagagcattcaggttttgggagatggctcatagccaagcccctctctcttagtgtgatcccttggagcaccttcatgcctggggtttctctcccaaaagcttcttgcagtctaagccttatcccttatgttccccattaaaggaatttcaaaagacatggagaaagttgggaaggtttgtgctgactgctgggagcagaatagccgtgggaggcccaccaagcccttaaattcccattgtcaactcagaacacatttgggcccatatgccaccctggaacaccagctgacaccatgggcgtccacacctgctgctccagacaagcacaaagcaatctttcagccttgaaatgtattatctgaaaggctacctgaagcccaggcccgaatatggggacttagtcgattacctggaaaaagaaaagacccacactgtgtcctgctgtgcttttgggcaggaaaatggaagaaagagtggggtgggcacattagaagtcacccaaatcctgccaggctgcctggcatccctggggcatgagctgggcggagaatccaccccgcaggatgttcagagggacccactccttcatttttcagagtcaaaggaatcagaggctcacccatggcaggcagtgaaaagagccaggagtcctgggttctagtccctgctctgcccccaactggctgtataacctttgaaaaatcattttctttgtctgagtctctggttctccgtcagcaacaggctggcataaggtcccctgcaggttccttctagctggagcactcagagcttccctgactgctagcagcctctctggccctcacagggctgattgttctccttctccctggagctctctctcctgaaaatctccatcagagcaaggcagccagagaagcccctgagagggaatgattgggaagtgtccactttctcaaccggctcatcaaacacactcctttgtctatgaatggcacatgtaaatgatgttatattttgtatcttttatatcatatgcttcaccattctgtaaagggcctctgcattgttgctcccatcaggggtctcaagtggaaataaaccctcgtggataaccaacagccttggcttatgggttttgttattgttggggaagtgtgttcatttgttttaacttttttgaaaagaaattggtctcctcattaaaccaaaatctcccttgttgcagaaaaagtacaacttttggtatctggacattatccaagaggtaatgaggaaaggatttggttattgatctgtctccttctcagaggctacttgttccttcatttaagtgcctgccatttaagtccttgtcttcaaaggacttgagcctgaaggcccaaccccccacacgctgggcctggtgactggctagggcatctctagtcccaatgtgacattggacgagatcatcagcagtggcacatggaccttgtcagatgccctgcagtatgtcaagttacccgtggtgccacacgctgagagcaaaaccagctatgaatcctgctaaggcaactacagcatcatggagaacatgttctgtgccagctagtttctagtaccagtttcaaagtgttgaaactggcatgcaagacaagcttatgtgcatgtaggtcttatataggcaaaaggagttaaatgtaaaaggaacagagatttaagtactataggaacttaaagaaggggctatatcatacagctggaggggcttggaatagctttgcagaggcttcaaaggatgtgtgggagataggagggaaggggcagagtggaaaaaagcatgaaagctggccatggttaaagtgagagcagtgggcattgagtgggaagagttttaaagggcatgctctatttgaactgtcctgaaacgagtgattctctaagtttggggtatatgagaatcacttggggtgctggtgaaaaatgcagatggctgggtctcacccactggaaaatttgaattcagtatgtctgagggtgggcagcatggtgtggaaagtggacaggaaggggctgagctaggaaagcagttatgcaacttctgcaactgtcctgatgagggatggtgcagacccaccacccatagggctgtgacagtgcagacaggaggaggggcagtttaaatcgatttaagtggtacatacagcagggcttggcctataggcatctcttgataagttcaagcatgagtggcacgtgatagtgaagtctcaccatgggacgcactcatggttcgcctttgtttttggtttgtaccataatgaaaatgccatcctttttacactattgagaatgaaaataagagcttatttacgctttgcactttatggtttgaaggactatcgtgtctcatgttctattacatttccaatttttgtttttcttttgatacttggactttatgttgtgacatattgaggtactgaggtattgaggtactgaggtactgaggttgtgacatattgaggtacatagagagcactttgtgacatggagtcggggagacacatcactctccttctcctagggatttaccagcagctcagcgactgattgaacatggggttgaagaaaagggaggcaacaaggatgtgattgattcagacattagcagacatctggaaaaacaaaggggagaaggttagtgaagggtggatacttgggcttggattcactgagctggaagagtttatgagcaatccagctggaaatgtaagtaggcagtaaagaatggtgagttttagaggacagggcagatttaaagacactgatttgaagttcatcagcacatgggtagtatgatggcatagaggtagagggcatcatctacgggaaatttacagataagaaaaggataccaaggcctgaaacaccagcatcatggaaggcatgaagaaaagagaggccccaaggaaaaaaaaaggggggggggggaagggatcagaaacacagggagaaaagtgcttcagaagccaagaggaggagttgtaaagagggatgaagtagtcaacagcacccaatgctgctaagagtcccaataaaggactccaggatggaagttccctaagagaggaatcaagtctctatcatcatccctgaggggtatgcaggcaggaggctccatgtgtgagtttcaagtctctaggacttctctcttcctttgtcctctctctctcggtcctctctctgtactccctccttcctctctctccagccttctcagtctcccaggatgggcttttagctcttttctcagaggtaggaaactgcccatgcatcttccctaagccttatggtaaaaattacatgttcagttctccatgttttggttccttgaaacctacaaattttttattcttactatgaagcctgactcttcaaaatgaaagtccgtcttaccagactttggtttctgctttgctctttcaagtcaaagctttatccagcctttgcttaaaaccgtggatgctccagcttcaatggcttgggagccacagtgcacagcgaattcctagggatgcaaaatgtatctgataagattcaaaaaatagtatcctactctgtatgtagatatcatggttggagttccatttatggtctcagagacattttatttccatctatttgtagacctgttaaatattcaaatggctgcctatttccaagtttgtgcagtacatggcactttcttcttctgaatccggctccaaagggggaggaagaatgtgggaaaggagtgtcaactcgtcttttcagaagctttactatagaagggaggagaaggagagactgtggaatgaatggcaaacggggaaatggaagctgatttttaggatgaaaagtcttgactgtgttttggaggcatagaataaggagagatgaaaaatacaagagaggggtgacagtctccaaggccaggtctccaagagttcaaaagttaagagatccagagtgaaaaattagttctgaagacaataaagtttataggaagaagagatggtgaggaggatggttcccattcagtggggttcccactcagggagttcccactcattgggctctgagcgtctgttgggaatggaggcagggcattagcttggggaagctggctgtgggcatgtggaatgatgctgggagatgctgaggctgcatcaaggttgtggatgcagagcatttatctgtgatattctccagcctggtgacagctacaaaggtagcaggtgactgcctggatccaggggcttgggttatgagtgttctgggaagccacataattaaaagtttatggggctggccagagtaagaaaagcccagaattgggagtcaggagacctagaactatagtcttgctactaactcatggaataccttttggaagtcaatttccttctccaggccttggtttctttagctgaatgatgaaaagtatagaccagatggtctccgagggctattcagttgtaaagtgtgtatgtgggagcgtgtctgtcaatccaagccagtggaaaatgggatggagcaggcagacactgtggtggaggggatcttcaactccacaaggccctgaggaagggcttctctgaggagacaagattcatgtggctggagcataatgattctttattagctgtgactctttcatttgtaagtgacataaaccaaacataagcagcttaaggggaaaaaagggaatttataggcacacataactgaaaaggctgtaccaaaaggcttcacatataattagatcaaagggctcaactattagggtgcaatctctctgtctctttgtccctcaactttcagctccacttttcttcatcattctcagcagactcttaatgaagtgattgttggcagatctgggcttatggctaatagcttggcaattccagtagggaatgactttctcttctgtaatatgtttagcgaaattctcaagtaatgctttcattggtccagccaaggtcacattcccatctctgagcaattgctgtgaccagaaagtgcatggctttgatcagtcacattcctatccctgaaaccagaggtgaggtcaatccaactctagctgcatagactaagaataaggaaagtgcagcctccaaagaaagactgggatgctattatcaggaaggtcaattaatggtggaggagcaaaaataatagatgttcctaacagggtgaggagctgggagctctggcagtgggcaagatggagcccagagtctgatctgtctctccctccctcccttggatgcagtgtgtgggctccccaagttctcccggaagctgatggccaggatcttcaatggacgcccagcccagaaaggcaccactccctggattgccatgctgtcacacctgaatgggcagcccttctgcggaggctcccttctaggtagggagaaggtggaaggggtggaagctaaggaactgaaccccctccttggagactgaccaaggtttcttcattgagaatcattgtgcacactagcatcagggcacagaagcacagtgcggtagaaagagttctcggctagactggatcctggtctgtctctggcaccgggaaggacaaagtcagggagtctctcaaccatgaatttaacagtacatggaggtcaaagacagggcatgccagggctgtgagttcagggagagccaggaaactcacccttgggaatcagggaaggtcgatttacaaagaccttgaatgctatgcttaggaatttttatcttgtcttgaacgctgctttaggttgataagtatgctctggaaagttctctccagaggcagcaatgataaaaaggagggtgaaactggaggccaggagatcagtgagacatccattgcagtggtggggagagaaggcatagcctcagagtaagaacagggtatgatggatggaaataaggaggcagattcgataacactgggaaataggactgtcacctttgtaatggaatgtgggtgggagtgggagcaagaatgagaacagccgatggctctccctgacacagtttggtccaggcaatctaagatctattccagttctgatgtcaaaagaaaactgaatagcaatctaggctatctagaccacttctgcatcggatcccacccccaaggaagaaggcccggcttggcccatctctgcatgagcaactcccaggctgatgggcatgcctctcactctgccccaccctcctccagatccaaccaggggtggacagctctggggcagggatccctttggcaaggcatcaggtctgggctagagctgcagccaaagcaccagggctacataaatccctactctgcaaggaatttatccttacattctctcagacccaaagatgaatggtctcactcaaagaagtcccccagagaggtaaagagagtgagggaaggtattatagggccagacagggctgagggcagttcagtgggagcagagtcggggagaggaccaagggagagaagggaagggagacagaggaccagaattagaaagacaacaatggagaggacagagagagacagagaacactgagagatacctggaaaataagatagaggattgaagagagtaaagagaaaaatgaaagggaacaatacaacaagaggaggaggtactggcgggcacaagatacccaggagagaagaagccagggaaggagggacctgaagggaagttggagagaagcagagtggtgtggaggaagagctgccagcgagggcagagggagggaagactctgcttcaccagacagctccgattttgttagagggcaagtaagagagatggattgtgtgcacctaattttaagaatgaattcattttcttaaaccttgattttttttttttttttttgagacggagtctcattctgtcaccaggatggagtacagtggtgcaatctcggctcactgcaacctccgcctctcgggttcaagccattctcctgcctcagcctcccgagtagctaggacaaaccttgaatttttgagtccactaatgtccaccatgtattgtgattcattgtatgtttattccctatgacttatgtttgaaaaatgtttgacgttcacttctctaccctcggccaagctggaatgccctcatacttcgcactccctgcagcaaccctgatctatcatttctgtctccctcctgtcattcagtcttaaagagcaggggaaggataggagagggcagaagaaacaggaaagcagccaagggacagaggaaggggaaagcacctcattaatgcccacactgacacctgggtagagggatctgcagagctgggaggccaagccatgtctctgaactggccagtgtacacccctgggttcatctaaacagcccagagccccagaccaaggcaggctgtcctaacctgggtacctcagcccacctgatccacctggaaaatctggtcctggacatgggcagggatcaaaaaatgccccagggcagagaagagtggcctaagtagagccctggccaggacccaggagcacatagctgcttctcagagggccaagtggagcctggaacctgctctgagactaagcacttctgccctcgaccctgaactttgacctgatactcagcctcccccacccctgtgttctagagcttttctttctgcttggctcatcttggatatgtctctgggctcagccacttatgggcttgtcatctgctccacataagaggtgaatggaagcctgaccctgcattaaacgaagggcagatgcctgtccatccagagaaagatgacagctgagacacaggaaatgcattaagctgactatcaggagccctggggtctggccctggccctgaccctgaaaccaacctgctgggtgaccctggacatctctgctttctccacgcctcagggttcctgcctatataatgaaaggtctagatcagagcagtgattctccaccctggcagcagtagaattaactaaggaaatgtttaaaacattatctgtgcttgggctccacccccatgacataaatggtctagatataggtccagacactgatttactcttttttcattcaccaggtaattctaacgtgcagccagtgtaggtagcttcggattcatcaattttaaactttaatatgcatacaaattactggagagtcttgttaaaatgaaaattctgattcagtggatcagaggtggggccggcctaagagtcttcatttctaagaagcctccaagtgatgctaatgttgctggtccaggcaccacactttgagaagcaaggcctgagaaggcagccagttgaccacaggctttctgtgcacccaccttgggctctctggctctcaccaatgccatgggcttaaaggatccctgaaatcctgtttacaatgttcagtcctggccttggttggaataggcaggtaaaaatcacagatttaaatcctcatcttcagattaggatcatatgagcatttgagttgggggccataaaatacaatggagagaagcatggccattttcaaggtcttgaggggtcctctggagtagcctgaagatcctcagctcaagacagagggaggcaagacccagtagtgcaggacgatgagacgtgtgttctgttccccaggctccagctggatcgtgaccgccgcacactgcctccaccagtcactcgatccggaagatccgaccctacgtgattcagacttgctcagcccttctgacttcaaaatcatcctgggtgagtgagtgaggggcaagctgactcccaaagccagctgtggttctgggaatgacctactggccctttccaaggcgtgtctgctcactcactcgctcactcatttgtcagggcaggacacctgggatggaggtccaggaacctgagtccaagtgcaagatatgattctccagacacgtgaccatgagaaggcattgaagtctatgcttcagtttcacaacgataaaatgaggaggcctctagataatttccaaagacctgttagatttccatgaacctgtggtttcaaatagatcatacatatacgatccagatttcccctcttgtttataaaatcagatgaccagctgattcaattcaggtccacacatatttacctactgacattatgccaggatctaaggacacagtatgattaagacctagtttctgcccacagggagcttacagtctaataaaggaataagatgtgagcacagagacctctaacggaaagtagccagcagtaagttttgtagaagaagaacagataaaatgccatgggagttcagaggggaaagacttctaacccaagagtctgagaggctacctggaggaggtcatgtttgacacaggcactgaaggtgatgatagggattgaacatgtggcagcaggcatcagaacaagcattacaaggcaacagcatcagttcctgaagaaagacagaggtggggacccatgagattatgtagagaatgaccaatagggtgggatgtctgggaaaggtggatgaaggcagtgaaagggctaaggctggaagcaagggctggatggggctggggcgggggctgacagggaacaaggtgtgaccttatcctccattgcacccatgcctcacatgtcttcttcttgcccaggcaagcattggaggctccggtcagatgaaaatgaacagcatctcggcgtcaaacacaccactctccacccccagtatgatcccaacacattcgagaatgacgtggctctggtggagctgttggagagcccagtgctgaatgccttcgtgatgcccatctgtctgcctgagggaccccagcaggaaggtactttcccctacctccacctctgcagggcagctggtgcctccacaaggagtccgtcttcacgttggtgaagctctggtgccaattaagtcagctgacagtgtctgcttgactcaccaactgcttcccctcaaacagccaagtcagaactgggtccaaggcagcaaaagttgtgggaagcacatagtaaacagtcagacctaagggtccagatagaaaaacaaaaactagactagttatcgtaacagagagaatttaatatagggcactggaggattggagaagtaagagggaagagctgagatcatagagatggtacctgcaggaagaaaccaccaaccctagggctggggaaacaaaggtaagaacctggagttagaaattagaagcttggaaaaggggccctatggggccagaacctgaaccgctgcagaagagtctaacgtgctaaggaaaacagctggaaacaatggccactactggggtgaaaaaccactgccagggatgatgccaacagccaaagcaagtcttcctgcctttctgaaagtgccccctgttttcaggaaaccagctagcaaagtagaactgcccacttcagagtctcatccctagtaccacaaagcagaatgtagaagggtaagtctcaagctgggggacaatggcttaatactcagcacaggccgggcgcggtggctcacgcctgtaatcccagcactttgggaggccgaggcgggcggatcacgaggtcaggagatcgagaccatcccggctaaaacggtgaaaccccgtctctactaaaaatacaaaaaattagccgggcatagtggcgggcgcctgtagtcccagctacttgggaggctgaggcaggagaatggcgtgaacccgggaggcggagcttgcagtgagccgagatcccgccactgcactccagcctgggcgacagagcgagactccgtctcaaaaaaaaaaaaaaaaaaaaaaaatactcagcacaggctcaaacaccactgtgaccatttcccagctgggtgatcttcaggaagttatttaacctcagtaagcctcaatccccttacctctaaactggagatgctatcccatgtggtggctgtggcatttccgtgtttgagataatacttaaacataggtgacccatgtcagctggcttccttttcattctaatttcagtggtgccacatcaagttcacttcctttagctcaaaagaaaaatggctgagatgtaatctgaggagtatttaggggaactgagccaacaggaaaggcacaggtgtagctggctttgactcattgggtgccatgtgcccaccaggtgctttatgttcattaacttatttacgaaccatgcaagccttgcaaggtggcactgtagcctcatttacaaacgagaaaactaaggatcagcagggtgaggtgactcacccgagatgcagcttgtatgaagcagatctagggatatagtacaggttttctgactttaagcccaacactgttttcagtatccaggctctttttcaaatgagaaaataattgctctgtcagtgctcaacccacttccacattgccccacagatttaccaacttcatagacttctagaatgtcaactctgaaaggggttttagagaataccaagtccagcctcctcattttatggataggaaaacagaggcttagaaggggagcagagaggagggctggctaaaggcaccatagcacatagtggactaggctgggctttttatttattcgctgttcttgattgagcacctactatgtgacagcattgctataggcactgtgatatagcagtgaccaagaatgagattctgctctcatggaccctaggtttcagactagttgagggtgggacagaatagaaaactaaacaagtaagccagtaacacatcatagaaaccagtgcccctagctctgctgcaggtaatctgtagcccagctgcctttcacgtcttcctccccaccacaccacctttctctgagaagaacaatccagtctttcctccacagaagaggatgatggagctgcaagctgcacccctccaaacaccccacagatagcttctctgttctcacagtatcttctctcctccaggagccatggtcatcgtcagcggctgggggaagcagttcttgcaaaggttcccagagaccctgatggaggtgaagttcactttataacctacagacagtgacacctcagctctgcactgggccttcctgctccgtattgttcccttagggattttgaggcttgggtgggggttggtgagtgggaaactaggagcccagacccacctccaaagttcaatgggactttgaaccccagaaagcttgatttgtttgttctacatgtcatggactctagcctctaaacacggttaagtttttctggtagcttattaaaggcttagcttatgaaaattctcccagaaaacagcaagtttagacacccccatggtgacaatccagctgtgcaccatgagaactgtacaccaaattggccagaatgagccaggctcttgagaaccacagtccttgcagtaatgaacttggcagttacacttagaagttcatattcctatcagttcaaggaaaaaaaaaaaaaacacttaactaaaagtaaggagccatagtttcaagtcttggctcccactaacttgctgggtcatctgaagcaagttattttgcctctctagaccataagatactatttccaactgcagagttatggggcaacacgagctgccatcaaagagttgcttggctctgatatcaccggggcctatgactgacacagctagtttctaaattcttccacatatattattttgacatattttaaaatttgggatttgcaacaaccattcatcccttcattcactaactcccgggggtctatttggtgtttccttggtaccagacactgtactagctactagctgtgctggggtaaaaggatagatctggtccctggcccccttgggctcatggtcaagtggaatggacagaaagtagttatggatgtgataaaggtggagagagagaaatgcaggatgctccagaacatatgaaagagaatctgatcttgtctcaggggttcaggaggcattcccaaaggaagtgatgctgaaatgatacctgaacgatgaatcaggtgctcagcagttgctgaggatctgtcctcaggaccaccctgccctggcttcctctccccttatccagggaaggccatgacccaagagggatctgaatggcctctggtttcctcccagcaagggcaacaggagttgtccatttagagaatatggcccattcagttcttgatttgactgaaagagaatcatatgtttcctctttttattccagacatctactccaacagttacccccacactggatcaagggcaataatagtcacaatgccttatttttatgtatcgattttgctgcattgcaaaaaatatatatattttctgggtatctactaagctccaagcaatgtaagatagaaatgcataaaatacagatccagcatcgagacagatgctcatactgtagagagggaggacaacataacaaagtgcttgctgcaaagccagcagtgataactccacagtagctaatatttatacagtgtgtgtagtttacaaagcacttgttcctgcctctcctctttgtacaatgattagtatatcaaatactgcaacctccatttttcagatgaggaaaaagggtctcagagtctgaaaaacaatgagtaagccacatgttctaggtcctacagtaggggtgagacaaaagaaaaccaaacttcatttttgtatacattgtcctattgactaatacatctcctaggcaagtattattacctctatcttactgaagagagatctgaggcccagagagggcatgtgacttgcccaagttcacacagccaaggtcttcacagccaagactgccctagaacacgggcctcctgattctccattcaactgttccttcacctgtagcatggggcagtctcttagatcaagtctaaggtagacacaggtccgtccaggtatggagtggagaggagccgtcttcaggggtgtcagaatagcagaggcttctcagccggggatgaggaccaataacagctttgtgttctagattgaaatcccgattgttgaccacagcacctgccagaaggcttatgccccgctgaagaagaaagtgaccagggacatgatctgtgctggggagaaggaaggtgggttaagaggctggcatacaacaggggcgctgccagccagggagtggtgcagagccagcaagggagcacagaggcctcccaacctggtgggctggcagtgtgggggcgcgggggactggaggaaggccgtgggaggagggattccacaggagaagatgcatcggagaaaagatatttacaggatgctcatcattcccttcccaagttcagtgtttcccttaagaaagaggccttggccgggcacggtggttcatgcctgtaatcccagcactttgggaggccgaggcgggtggatcacctgaggtcgggagttcgagaccagtcttgctaacatggcgaaatcccatctttactaaaaatacaaaaattagccgggcatggtggcaggtgcctgtagtcccagctactcgggaggctgaggagggagaatcacttgaacccaggaggtagaggttgctgtgagccgagatcgtgccactgcactctagcctgggtgtgacagagcgagactccatctcaaaaaaaaaaaaaaaaagaaagaaaaaagaaaaagaaaagaaaagaaagaaagaggtctgaatcagggctttttagaatcatttgagctctgatgcggcctgacctagaactgcccagagctgaggtttgggtccaacggtctgctatgccctctagtgcccaattctctgaactacaacccatacatgggagaaggagacttgggctgggaaggggcattttatcttcatctatgtctctttttcacctagggggaaaggacgcctgtgcgggtgactctggaggccccatggtgaccctgaatagagaaagaggccagtggtacctggtgggcactgtgtcctggggtgatgactgtgggaagaaggaccgctacggagtatactcttacatccaccacaacaaggactggatccagagggtcaccggagtgaggaactgaatttggctcctcagccccagcaccaccagctgtgggcagtcagtagcagaggacgatcctccgatgaaagcagccatttctcctttccttcctcccatcccccctccttcggcctatccattactgggcaatagagcaggtatcttcacccccttttcactctctttaaagagatggagcaagagagtggtcagaacacaggccgaatccaggctctatcacttactagtttgcagtgctgggcaggtgacttcatctcttcgaacttcagtttcttcataagatggaaatgctataccttacctacctcgtaaaagtctgatgaggaaaagattaactaatagatgcatagcacttaacagagtgcatagcatacactgttttcaataaatgcaccttagcagaaggtcgatgtgtctaccaggcagacgaagctctcttacaaacccctgcctgggtcttagcattgatcagtgacacacctctcccctcaaccttgaccatctccatctgcccttaaatgctgtatgcttttttgccaccgtgcaacttgcccaacatcaatcttcaccctcatccctaaaaaagtaaaacagacaaggttctgagtcctgtggtatgtcccctagcaaatgtaactaggaacatgcactagatgacagattgcgggagggcctgagagaagcagggacaggagggagcctggggattgtggtttgggaaggcagacacctggttctagaactagctctgcccttagccccctgtatgaccctatgcaagtcctcctccctcatctcaaagggtcctcaaagctctgacgatctaagatacaatgaagccattttccccctgataagatgaggtaaagccaatgtaaccaaaaggcaaaaattacaatcggttcaaaggaactttgatgcagacaaaatgctgctgctgctgctcctgaaatacccacccctttccactacgggtgggttcccaaggacatgggacaggcaaagtgtgagccaaaggatccttccttattcctaagcagagcatctgctctgggccctggcctccttcccttcttgggaaactgggctgcatgaggtgggccctggtagtttgtaccccaggcccctatactcttccttcctatgtccacagctgaccccaagcagccgttccccgactcctcacccctgagcctcaccctgaactccctcatcttgcaaggccataagtgttttccaagcaaaatgcctctcccatcctctctcaggaagcttctagagactttatgccctccagagctccaagatataagccctccaagggatcagaagctccaagttcctgtcttctgttttatagaaattgatcttccctgggggactttaactcttgacctgtatgcagctgttggagtaattccaggtctcttgaaaaaaaagaggaagataatggagaatgagaacatatatatatatatattaagccccaggctgaatactcagggacagcaattcacagcctgcctctggttctataaacaagtcattctacctctttgtgccctgctgtttattctgtaaggggaaggtggcaatgggacccagctccatcagacacttgtcaagctagcagaaactccattttcaatgccaaagaagaactgtaatgctgttttggaatcatcccaaggcatcccaagacaccatatcttcccatttcaagcactgcctgggcacaccccaacatcccaggctgtggtggctcctgtgggaactacctagatgaagagagtatcatttataccttctaggagctcctattgggagacatgaaacatatgtaattgactaccatgtaatagaacaaaccctgccaagtgctgctttggaaagtcatggaggtaaaagaaagaccattctggtatgaaggttttgggggaggagatatcaatcaagaaggcttcccagaagaggtgactggaccagagccttgtccacaggtaagacggaggaggccttccacatggagggagaacaatagtaaatgtccactcaagatgtcctttattataccagctcctcccacaaaaacacatgtccagtggactctttttctgggatcagaaccaacaccaaaaagagcttttctccttaaagttagaattctaaacaggacttgaaatggcctcaaggtttgtgcacaaatactgacttctggctggacccagcttattctgtttatttctccaattgcaatttcatccttatcctgagaaaatgtctaaataggccatggaacccaggcttccccgtgacctacaagcacttattagctgtgccagctcctgcactgctgctaaggtccaagaaacccagatctctcacagagccatagaagcagagggctggagtatctgtgaggacaacaaccttgtctaacttcgcgacctcattcttgagcatttctactgatgagaaactcactacccccaattgcagctcattcaactttaaaattgctgctttttgaatcactgattgtgaatattaatttaaaaaaataagtaagaaaatgttttaaatgtgctgcctctttaaaaggtctcctctttgtgcaaccaaaacccacctctctagaatacagtttgtataactgaagctataatttcataccatgagtgctgctgttagcaataataatcatgcccggattttattaacaacagaagctgttgctcgtatgaaaaaacaaacattagttctaataaacatctgcattgagtcaaagctccctgtttgtttgtatgtcttttatgcactgatgattatagtgagttgctttcatttaccaacattttgttgtattcgtgtaggatcactgtaccatgaagggagagagactatgatgggaagattgttgtagatacaaaagcatgtcttaggtttttgggtcagttctgtttaaatacctgtcctattattcctgtaaattatcaaaatatcccagaatgtcaatgtttctgcatccacattacaattattaaatgccactcatttattaaatttactattatcagtggcatttaataaatttgaatcatatgttcagtgtttggtttagaaaatatggtgccatgtctatgagtggcctgttctggattggagtacatgccttctttctgccttgagttaatcttactcaatggagaacaagaatcaaagaaacaccaccaccaagaagcccttcaagctagagttgggcaagagtcagggaggggaatgtagaccactcatatgacagaggtggaaaccaatcttggtctagaataagtctcaaaatcaaaagacttgaattctagtgcagcgtaggttgactcccttatttatttaattttcccatctctacaccgctagaataacctctctcctgaggctgttgaatctgatgaattagcagataggaaagaacttagaaaattataagttcactcaaatgtaaaaggttatatgggaaataatcaccactaacatttttgagtacttactatctgcttgttatacacattctctaatttaattttcacaagaaaattcatgaaaggactatacttatcccccttttacaggtgagcaacctggagtgcagtgaagtgtaaaatgtgggccgacttaggagcacaaataccccagcaacaatgagcactcttagtacacaggtcttggtttctaaaatatcatcatccgataaaaggaacacaggctctttgaagaaatgactgattccgggattggggcaagaaacacacaagctgagactggagcatcttgcagtcccagaaagtgaagaaacgctgaggatatgtcaaagggacacaggagccaaatgaaagagcttccactggccaaagctggaatgttgagcaacaaagcaacatagcattggataataacccaaagtataaaataaatattcatgagtacatacttatgtgactaaattattgaacaaataaatcaactggaagaatagaccaatctccccttgaaaaaatgcaaaatcgtgcatccctccagagatgcagcatgagtccccatcccttaagtgttggcagcacatagtgatttctttccaaagaatatagtataaaaggtggggcaggacacaatcattctgctgtgcagaagcctgataaacactacctcagccgggtaatcaaggttaatacaaaagtgttaagtcacatggatgctatgtgactttgtgtgccatgatgaaaatggctttgtacctctgtgttcttccctccaaatcccataaccccaggctaatcatgagaaacacatcaggtaaatcccaactgagggacattctaccaagtacctgaccaaccctcatcaaaactgttaaggtcatcaaaaacggggacattctaagaaactatcacagccaagaggagccaaaatgggaaagatatgttaaagtcccaccccccggtaccttcgaatgtgaacttatttggaaatgggataattgcagctgtaattagttaagaaaaggtcatactagagtacagcgggcccttaattaatcctataggacgggcatccttataagaagagtaggccaggcacggtggctcatgcctataatcccagcactttgggagaccaaggcaggcagatcacttgaggtcaggagttcaagaccagcctggccaacctgtgaaaccccatgcatactaaaaatacaaaaattagccaggcatggtcgtgggtgcctgtaatcccagctacctgggaggctgaggcagaagaatcacttgaacccgggaggcggaggttgcagtgagctgagatcacgccactgcactccagcctgagcaacagagtgagactccttctccacaaaaagaaaaaaaaagaaaagtaaagacacagagacacagacacgtgagggagaatatcatgtcttgatgaaggcagagattgaagttttgtagctacaagccaagaaatgctaaggattgccagcaaaccagcagaagctaggaacaggtgaggaaggattctcttctacaagtttcagagggaacaccctgactgcagacttctagcctccaaactgtgtaataataaatgtctgttgttttaagctacccaggttgggcagccccaggacactaatacagaacctaaggagatatgacaaataaatgtaatgtgatatcctggatgggatcctggaaaagacaaaaacatcaggtgaaaactaaggaaatctgaataaaatttggactttatttaataataacgtatcaatcttggttcattaattgtgagaaatgtactaaacaaatataagatggtaataatagaggaaactggtgtagtattcatcagaacttcctgtaccatcttcacaaccttccaatacttctcaaaacaaaaatgtcatttaaaaaaatgtgacccaagatctctcagctaggagatggagaaaccaggatttgaaaccagttctgatggactctggagcctaatcccttaactctaacaccaatggctctcaatcaaggctacacacaggcattacctggggagtttaaagaaatgccaatgtctgtgtctcaaccacagagatccaaatatgatcaatctagagtaaggcctgagcactgggattttctaaagatccacaggtgattctaatggacatgcaatttgaaagtcattattataggctctcccaccagtgtgcaacctctgacttaggtcactcaaccagcaagagacagagatgagatagattccctgatattgtagcccgtggtccagaactattttgtgactctcagtagcaacaccattgctaagacctttctgcactagtgttttctggaaagaatggtactgttttaccttgcagtagtaaaccaagaggaggaggagcatcccaggcaatggggagtagcatatgagaaagcggagatatgaaaggacaccaggcatttgtggaaaactgaatgatatagtccctagagagacagacagtttgggagaaagaacatcacaccatttgggaagatctctatgtgcaggattataaaaagccttgaatacacagcttgcttttgggaatagggagccatctaaggattttaaaccaaagagagatgtgatcagctttccctttcaaatgaggcattaaatgcagtgaactgagggagactcaagatggctacagtacattaggcaagagacctaatggtcctgaacgaggcaggccagcttacagggaggagaggaatctccttctgggggctctgagaacctagggctgggcttagagaagtcacttttaacagattctcaacctctgttaacacttcacagtgaattagtagagaagtagagagaaaagagggcagaaaccaaaacccaaaagcagaaatcgtttcccaggtccctggtctttctgtgacccactggtaccagcacttgtccatagaaaggaagccatgggttctctgaacttgagggaaggagacaaacagtgcctttgcaacaatttcctgtgttggcattttttttttcaagaagaaaagaaaaatgtcatttgaatgcagaaacacaagctcaattcctagcaatgagcttctgataataaggaaaaagaaccaggaccatttcaacacctaggcagatcacaaagccaccaagggagtcttctctgaggaatggggtattaggataaagcagtgtgatgacaatgggaaggtgtgtggggcctggacggtacccagggtgagtgtctgaatgacaaacagatcagcatgggcaaaaacatgtcttccctgccagcatctttcagtcccaaaggagacctctacaaagtcagaggttatgataccccaatggataccaacaggccagcaccaaccagagcaagcctggggatccgaaggtcacagtgtagatgtagaccaggcctgtggtctcagaagatgctgacctagtttgaaagtgaggactctcttctccccttgggctatttgtcctgtgacgttatcccatcttgcccatcgcctgggaccatctggtttatttaatccctgccagttaaatgctcatgtgtggcccaggcctgccagtgggatccaagacaacagaatccttcttttaacaactctgacaacatctccctttggtctgagtttgcatgtctgacgcccaaatccatgatagcagtctgggcctcccaccaagtcttttcatttgagtgcattttaaagttatgaagtacttcaagtgcactgaaaaaaaaatagagacaaaaatccacctcctgctcagattcgatgaaacaatgtgtcccatgcaagggacatcagcaagattccaatacgagaagtagctggtgccatgagagagaaggagccttgggccagtagacagagctctgaacctggttgtgaaggcctggattccagtcctcactctgctcccaaagctctgaaagccccagggaatcctgctctctgtgcctcagtccccacagtctccctgttagtttctccttatttttccaacctctctacatggggattccctgggctcagctctttggcctcttttctttcctctctaccctcactccctaaataatctcatctaggcttatgacatttaaaaccacctaaatgctgatggctctccaatttcatctctagcttgggcacctcctctaaaccacaggcgtgatatttcaactgccaccttcgcatttctcatgtttaatgtctaacagaatgcccatgtccaaaactgaggtcctcatattgccccaaaatttgttcctcacggccttcctcatctcagaaagtagacactccattcttccagttgcacaggccaaaaatcttggggcgtctttgactcctctctctctcatactgcacatctgagtcaccagcaaatcctctcagctccacctttaaagtacatccagactcaaccacagctgctaccaccctggaacgggtcactacagcctcttgcaaggagtactgcaggagcctcctggctaatatttcctctttcattcttgtatctctatggtctgttatcaactgggtgacagtaaattgggtaacatcaccctgccactcaacttctccagtggcttcctatctaattcagattaaaaaccagtgttctgacagtgacctgatccccgttaccactctggtcctactgcacacattagcctcctcatgtatgaacatttcaggatgctcctgcctcagggccttggcacctgccattcctcttatttgtttccttcatcttttttttcccccagtgtcatcctcttagtaaggccttccctcactacccaatttagattgtaacttcattccctacctttcctatctcccttgcctactttgttcttcttcttagtatgtaaccctatctaatataccacacatctcaacttacattgtgtattgtctagctcctctatccacaataacagcaatttagtagctcttctctgccatatccccaagtgcctagaaaaatatctgacacataatatgcactcaataaacatccattaaatgaatgaatcttgaaaatagggaatattttacgacattctgtaaatatcattatgaccctattaagatggtgatgtaggattattgagcttgttttaaaagaagtgaaaggataagaaaaagacggaaatttcatcactatcacccaagttcttgtataaaacaacacctctcaaggtaactgcctttaaaaacttgaattcctttagagaaaagtcagagagtaagacatatgtttgtttccagataagaaagggaaagaaagatgttatgaaggtttcagataagagggtcaaacaccaaatcaacctaggcagactgaaatcctggggtaacaatcagatgacctgttggaagggtcagggttaggacaccattccaaattcccctccttccccaaaatagggctaagtagcagtttgtgattaaggtcaaagctggcagagacccttcgggcactttatctgattgctttacaaataaggaaactgatatctaggggagaggaaagactacgtcgcccaaggccagcagcctagataatggttaaaccaggtctgaaaccaaggttttctgactccaaggccaatgagctcttctataccacaaccactaatgcaaccacctctacaggactctgtaacagcatagtcatataacaggcggatttcatttccctggtgcatgtggcagtacccaagcaatgccaaaaatgactccaaaggaaattccttagctaggagtcccacagagaaccagaatgggacttggaaaagaactaaattcctctggagtattccagccaatgggaagggagcccagaaaattactggtgttttctgtttaaagagatgtttttaaacagctatctttgaagaatgaagagtgaccatcgtgcttctggaaaaatgaaatcattgctttgaaataaatatgagggaagaaaataaataactctacagttaataaataaaccatttcaaagctgcaaaattaacccttgcctttttttttttttttttaagtatttaccaaccaagcttaactgaaatcatagagaaggaagagcctttcaggactcaaagaggaagctgcaaattagaagggaaagaggatgaaagaagagcatgagcattcagtgagcatgtgccctatagcaggcattatcgtagacagagtattctttattcctggcaatagccctccaaggcagataggattatttccattttgatgaggaggaaaatgaggcttgcttgaggttacagagctggtaagtagcagaaccagcactcaagtgttttctgaccccaaatttcatgatcttctcttaccccatgatatacaatgctagtcaagtttcctaatttctctgggcttcaatttctcatctgcaaaataagggccctagctcaaagcatctctaatttgtcttatagctctgatagtctatggacttactatgtcggacatattccttccttggcagtcctctcagttctcagggctcctgaaccccagaaggaatcctcccattgagctggtcctctgtcaagatgggcatgaggaaagcaatagagataacaatttttctcaaccctacaccaagaatttcagcctctggaactataattcagtgcttgtagttctcttcctggcttgaacatcaagacaagcaaacaaaagctccagtgggagaggcccaggatccaggaatttccctgaggagtttatttataacacataagatacatctaacaagttcattatgtggcatgtggcaatgtgtgcaaagaaagaactatcacagagaaatctttgccaagacagaagcaaagcccatgagcaaacccagaattccccatctgcagcaagtataagaggcagtaagagaggcaggtgaggcctccttagattgaaacatcttcctagcagatcaggaagagtcttgggaaacagttctggactaaaactaggtgagacttggatgctttgctctaccatcacctgacagtaggccccggggttagttactcccacactctcaccacattttgtcatttttgaaatgaagtgattgagcctctaatggttcttccaactctaacatcccatgactctgtaaatacttgcttccctaagtagactttgagaatcataaagtcttgcagttggaaggagaccctatgaaatggaaagcagagggaaatatacttgttcttagcaggagcatctattctattcttgaatggataaaatgaagaggaaagagtgtaggctggaaacggaatgagttggaattagcctggcaaagagaaaagaggaacagatggaacagcatgtgtgaggtatcattatggccctgcgtggaggccgggttgtaggaagacaagaacagggagaacagttgagtgtgttgcagtgaaatggcagacgaggcagatccaaacccatgttcccctcatagaaacattaaaacaaccagaaactcaatgaaattaactttataggagtgttggaaaatggtaaaaggtccacagcaaagaagtgaaggctcagtcaagaaaaagccacattcaaaacatcaggaaattcatggtgtttttactcacccttgacccacactttccctggtgtggcacagggagatgcagcagcccatgcccaatatcctcctttagaacagaaggagcagatcagaccttatttgcaatgttttaacatctttgtggggctgcctggagggctaatctccctctttaacctagggtcgcaggcatgggagtctgctttaaaaagctccacagacacctgtggcgagacattacaggtggagctacacaatagatcatctaagacccagaggagaagctggagtgagactctgggaaatgaagacattcaaaagcaggcctgtatactgggaaattgaaaaagccataggcccagtcaagatgcatgctcataaaagaactgaaaagactttaagctttcacctctggctgatccctaggtacagggcacgcccagctaattagtgaagggcttctctggcacaaagccagtctgcaaagactggaagaggtggctatactccaaatgccccatcttgaacaactacaaaattacctaaagaattgaaagcaagaattcaaacagatgaatcattgcccactaatgtttgtggaagcattattcacaataggcaaaaggtggaaacaattcaaatgtttttcaatggatgaatggagttttaggtatcctgttagaagcaacagaaaacagactaagagagaaaattgctaccaaggagtggggtgctgcttgtaatgaatacctgaaaatgtggaattggctttagaatcaggtaatgggcagaggctgaaagaatttggaggagcagtctaggaaatgcctagattctgatgaaggcttagaagacaaaaagactagggaaagtttgaaactctttagagactggttaagtggtcatgaccagagtgctgatggaaatatgaacagtaaaggccattctgatgaggtttcaaatagaactgaggaacaaagtatttgaaactggaataaaagccatctttgttataaatttgcaaagaacttggctgaactgtgtccacactcaagaactctgtggaaggccaaacttggaagtgatgagctaaggtatctggcagaataaatttctaagcaaaacaagcagctgcatggttacttttggcagcttacactgaggctgaggaacaaaaaaaataattggaagaatttataattaaaagggaagcagagtggaaagatttgaaaatttatcagcctggccatgtaaaaagtgaaaaagcaaggatgtagcccagaggccatttgctaaagagattagcatggctagaagggatccaggtgctattcctcaagacaatggaagaaagacctcaaaggcatttcagagattttcaaggctgcccctcttatcacagacccagaggcctaggagggcagaatggtttcagggagcaagcccaggcactttctgtgggcttactgcccaagaccacctccagactctgtgccccagcacagtactctgaggacaccccagcaagaactcaagcaggccaaggtgtggctcatgctgcagatctggaaggtaagtcataaaccttggcagcatccacatggtgctaattctgctgacttgcaagaagcaagagctgtggaggcttattaagccttcgtctaagtttcagaaaatgtcattgataacgtgacagcacagacaaagacttgtcatgacagtagagccaccacagagagcctctactagagcaatgccaagcagaaatgtagggtcagagctgctgtagaatgtcttcagtagggcaatgcctcatggagctctgggaatggaattccaccaagaccccagcctggaagagctgggtggacggaccccaatcaagcttcagaggcagagctgcccaaggcttgtggggcccaacccccatactagtgtgtagaagatgccagaaatggagtcaaaggagatcattctggagtcttaagacccaatgtctactttcttgggtttctgagttgcttaaagcctgttaccccttctttcttttctatttctcccttttggaataagaatgtgtacgatatgcttgtcccaccattgtatattagaagtagatattttgttttgatttcacaggctcatatataagacttaggactttgaacctttaagttgctgctggaccaagttaagactttggagctatgcagatggaatatatgtctttgtatgtgggaaggacatgagtttttgggggctaggacagaatgctatggtttgagtgtcctctcaaaaactcatattgaaacttcatccccaatgtggcagtattgaaaggtggggcttataaaaggtgatcaggtcatgaaggctttgcctcacaaatggagtaatccattcatggattaataggttaatggattaatgagttatcatgggaggagaactggcggctttataagaaaaagaagaaagacctgagtgagcacattagcatgctaagtccccttgccatgtgatgccaccttgtgatgccataaatagtccccaccagcaagaaggccctcactagatgcagcacctcatccttagactcctgagcctgcataactgtaagaaatatatttctttgctttataaattacacagtttcgggtattctgttgtaagaacagaaaatgggctaagacaaaataaataaacaaaatgtggtatatacattcaaggaaatacaattcaaccttaaaaaggaaggaagttgcgatacatgctttaatattacataccttgaaaatattatgctaagtgaaataagccagatgcagaaggacaaatattgtggctactatgccactggaaacatgaagtcattgcttgaaataaatatgaggggaagaaaataaatgactccctatatattaaagtaaactaggtaaaatagtcaaactcatagacagaaacttgaatggtggttgtcgtggggctgtgaaatgatttgatagtttcagtttgggttgatgaaacggttctggagataaacagcagtgatggttacacagcaatgtgaatgtacttaatgtcactgaattgtgcaattaaaaatagttaaaataaaaaatcttatggaacaccagagggaaaacatactttagaatcagttaggacatgttgactttgaaatgcctgtgaaacagtcaaacagagatgtcaaggagaacataaatgtaagaagtcaagaagaaaattcatgccttgagatgtatatttgagtcattagcatacagatattaaagaacactcagaatagattcaatcagccagaggacatggacaaatatgagaagatcaaagagactaagacttggaattggagcctaaagaataccaacattcaggaggcaggcagaggcagagaaacctgtaaagaaaagaggaaggagacagaaaagctgaaggtaaatcaggagggtgcatgtccctgaaaccaagtaaagcaagtgtttggagatggtcaatagtgttgaactcctgtgagaggccaagaaaaataaggttgaaatgtgttcattgtatgtagccataagatgcctgattgtgagctggatgaggacaatttctgcaacattgtggggtgaacgttagcctgtagaattaactggaagtgtaaatgtggaggcagcctatgaacagtccttgaaacatctcattgtaaatggaaggagaaaaggcaggatttggctgggcgtggtggctcatgcctgtactcccagcactttgagcagctgaggcaggtgaatcacccgaagtcaggagtttgagaccagcctggccaacatgggaaaaccccgtctctactaaaaacacaaaaattagctaggcatggtggcgggcacctataatcccagctatttgggaggctgaggcaggagaatcgcttgaaccagggaggcggaggttacagtgagccaagatcatgccacttcactccagcctgggtgaaagagcgaaactccatctcaaaaaaaaaaaaaaatagaagaagaaaaggcaagatttgtaggggaatgtgtggggttgacgcaggtgcttcagcacagagaacagagaagttgaaggtccagggagagggcagatggagctctggtctgagctttcatcgtcagagttgacccagtggagaagtcctggtgtatcagccagagtcctttggttgaaacacacagagatggcagctgatttaagcataaaagggaaagtattgaaaagctatggggaaagttcgcagaatcagaaagagtggagaacaagtatcagcaaacgacaaaatttggccatgctgtagagaccatcctggctaacacggtgaaaccccgtctctactaaaaatacaaaaaaattagccacgcttggtggtgggagcctgtagtcccagctactcaggaggctgaggcaagagaatggtgtgaacccgggaggtggagcttgcagtgagccgagatcgcaccactgcactccagcctgggcgacagtgctagactccatctcaaaaaaaaaaaaaaaaaaaaaaaaagaaaaaattggccatgcaggagatatgaataggaaaaacaatagaaacaattttacaattatgtcgggggccaccactggaattgataggctccatccgtttttagtgtttttatcactttgcttatcattgaaattccaatcaacttctcttagggcatgtgctccttgcttgggagttgaggggaggtgcagagttctttgatatgccaccacgttatattgcatggggtacaggtaattcccggaaaaggaagtcagagtgctatttttaaaggatgtggagtggatgctgggcccccagaaagaaacccaaccagaacaggactgcaaaagtcagaaactggaaattgtaccttgagaaagtcagagcaaggacactaaccttgtcttctgatactctttcagtacttattcattcatgttttcattcaattagtgtaccacaacccagagtggagggaagttaacatcctatggggcaaccttcagctattggaagacaggagccaggggatagatagccctttactcccaagtgatctggagatgcatttcatccggcttctcagatggttttctgggactgaacaacccttcaccagcggagatggccaacttgacaagacctccttccattggatttccctcctgctttgctgtgctccctctgccttactccagctttctgaggtcatgctccccagtcaaatactatcacataaacctctgccttgacttctgctttctgaaaacacaggctaaggtaagcgcaaggcgaaccaggagcgagagggtggggtgggggaacaggtgacagcatgaagtagaaggcctgagaagagcatctgagttgagacttgagccaacacttgagggaggtcacaaagtgaggcaagtgaatttcttgggaaagaccattccaggcagagggaacaggtagaataaggccctaagcacatacatgcctgtgtatttggggaacagcaaagaaaccagggtagctacagaaatgagggcaaagagtactagaggatatcagtaacacggctgaagccacaccacgtttggccttgcaggatttggcttttacagaacacaaaagggagcacaagaatggcaggatctgacttaggttaaaaggattgccctggctgcagtgctgagaaaagatctgtatggggaataggaaacatcctcccctgtgggatcccacttgtgagaaccagaaccagaaagtgaaaaaattcaaacccttttgagggaggcttaaaaggaaaaagtcttctttaaaaggcagaactatccaaagatggcatgagctgccttgggtggtaatgatctcctgtcactgggggtgctcaaatacaggctggagaacttgtcattggaaagtgtgtaaaaatgctttatatgggctaatacaggatggcacaaagacagacttcagaatgcttcatatcataagagcatctaagacccagagagaataatgacccccccaaaagtcccagcagaacccaattaaaataaaatgaggacccacagctcccaatgcagtgttcaggccccttcacatgaccccatgctatcatcttaaaacaaaacaaaaataaaaacaaaacgccgtccctacttcaagtaccttaatttaaactgatttgctctgggatatgtaagttcaagacatagaaagaatgagtggtgaagtgagaaggagactccgaatatcgtcacaagcataatatgctagagaggtgaggatctggctggagatggctcagcttattggttcatttattcattcaatacatttttattgaacatttgttatgcattcaatagaggtgaatgaaatccatggagtctatgctttttggaacttacatcctagcagggatgagtaattataacaagttttatgagtgtcccagcaagggtggcagagctcagtgacaaagactctcagagcagaacacagccattgtagcagcaaacctgcaggagcaagggagtgtgagggacggtgaactccccagagcacaggctgggggtgagtagggcagctagagaaagggaagccgagccccagtcctaaagaatccagggcaaatcatcaaggaagatctcagggctcatttttcataaaactagatgcaaaaggaagtctatccctcagttagaaggcattacaccaggcagtacaggtcgatcacctgggtgttttattctaattcagatgctcaggtcccacttcccccaaattttgatcccattggtctggggtagaggctaagtacttatatttctttaaaatctccccagaatttctgaagtacagccagggctgaaaacttctgtagcaagcagagatgtctgagaaaccagagagcaccccctatattccgctgcacccacagtattcatttcttcctctagtctgcatattctgaacacctactgtctagcaagtaaatcaggacttgctagatagcaggtgttcaggatatgcggactagatgaagaaataaatactctgtgaatgaagtaaaggaagccatcgctgcttacttgaattcgagccaggataggagtaaaactgaccttatgctgatcccctgaatgactgacttccatccctcctgactgtggacgagactggccaaaaactggagctagatagagccttatgtggcagtggggtcagggggcagaagggagaaaaggggagacagggtggcgggatggaggggaccaatagctcattacagatctgggacagtgggggaatctcaaacacacattaatgactactaagccttatggaagatatcctgtctttattaaagtgtcccatctttatataagtgacccccttcctccatcactacagatgatggtgactttctattaaagaggagagtagtcaagtttttaacagaggtggggtaaatgaggcccctcaaaagtgcagcttgctgcctgtccccaccaattccattccagaccccccactgtcagaaagtgtctcctcccatttcaagccatatcacatctcattttagagccttgtaaggttctcccacatatctgtgcacttccccatggacaaagcattttacatctttaacgccctctctcttgctgaagataccccatccctgtggctttagggggacagctgatctttggcaagaggcctcatgcttggccaatgtgagaaagccattcaactataatttcagcaaagaacccaggaggccaggcccctgctcctgaattctggccatcagcactgctgagaatctgctagacttggtccccgaactctgaagaccctccattataatgcctcccagagattttgtgctttgcttctaaaactctgtcttctgaacctcccctaaattctctgccagttaatacgcagtgggtgagaagcctaactctatgagaccccaccccaaccaccatctttcaggcaggcagaccccagaatctgccctgagtggaaagaagctggaatctgagaaacaaaaaaaagagaccctgtgtacctggcagcaaaggaacagcctgatctcccacctcttgcacttcaagggaaacctctgctgcgtgtgtgaaggcagaatcacggatgaggctcacagggtgggcaaagaagctaatttaaggctgcagctagagaaagtgggagatcatgaggggcaggggtgagggactaataagagcaaggtcgagctcattactgtggaaagcccttttgagatcacccagtcctctaattttcaaactttttaaaagtagttaaactttttttttttttttttttggtacaaaaatcttaaatggaaccctatctaaagtaaagctgttctgatcgaagcaagaggaggaggtaggagttggaggatgggtgtttagatcaggagttggagacacccactagcttagcctactttccaaatccaaaagtccctgaggcacctacgcagaactttggggtcctgggtttcactatgataaaccaatgatcttgcccaaaccctgagttttatagatggaaaaactgtataatttgtccaagatccccactgagtcagtgacatcaccagcgctagaagtttacactattctcaacccacgtctctcctctaccctcgcatcagctaactggcaccctcgacaggctctgggcccaaccacggaatcttatacggagctacggaaagagaactgcaggtagatgatcagcagcaggaccgtggcccaaaacaagcaccaggggatagagcagaagttccagcctgagcccgtctggtcctgcgacttggtggggctgggcgcccgggagaaggtgtaggtggtcgcctcctcctccagcagcttctcgctgggcttccagtgcacgatgccctcctggcaggcctcgcagaactctccgcggtgccgccggttgtcctggcggctggccacgtggatgcggtactggccgccacgctcgccgtagcactgctcgcgcaggctggtgatgaggttgtccaccaggccctcgatgttctcctccagcatgctggactcgtccagccgcgccgtgccgcactcatagcacagctgcttgaagacgcgcatgcgcaccgagcccgcccgctgggcgcggtccaggaacatgtggaagaggatgaccacgtagggcgactgccaggtgtgccagcaccaggagcagtggaacctgcggagacgggaggagagggaggaatagaagacgggcggaggtggtggaaacagccctaggaatggcgtgaggggacgtggaggctaagcagagcctggaggtggaggaagtgtgttgccggcgccctgggttcattagctttccccaggaagccactcagccttgcaagtgcccctaggactacagcaggttcctcaggatgtcaccgggcatccagcagtgctctacctcctcagtgctttccagaggcctaactcccaccaccccagcattgggcgtcattcttattcctcatgggcaaaatgcgcttggtgcactaggtgagtccttccttctcacaccagataagaaacacataatccatctgcacatttctatctgttaacactgactgtgaacaggctagatccaaattaggagaaaatgacaccattactagctatcaacgtccaggccagtgtcagagttaatgcatcacaaggcctggaggtggaggcagtctgtgcccagatccccaaggcctgtagtctcccaggcctgactggggccagctggggattacaggtccccagccaggtctggggcagccacaagccctccccactcagcccccacagccttccaggtcttcaagaagctcctgatcctgcctgtaagtgtccagcccttgacacccctcctgtcagccagtttaggagcttcacattttcattctcttcttgttcacacatcttttggggactgtttcctctctcagaccagactacaaaacctggattgaaaaatgtcgtaactagagggacctggaaatcacctaattaatgttttcttttatgctgagacagagtgagagaggcatccatgtacacacagctagaggcagaaccggcgcccagcacgtaacaggtgcccagtaatgtttcctgaattgaagtgaattggctgaaccagggcaagcaggaaggccttgcttctgacttccaggctgcaccactcagcctccccatcttatgtctcaaaggtaagcccctacactctggacccatgaacaagagtgctagaaattcatctcagatagtttttacatactaatcacctagaactcttcttgaaatcagattctgattcagatctaaaaggggcccaagattctgctttcttaacaaattccaggtgatgccgatcctgctgctctgtggaccacaggctaacctctcactgtgcaaaaggagaaagccaggtccaagaagaaaatcgagttcctcaacagccatggagccaatgatagagccagtttctggcacatctcatgtattcaatattttaagtgaaattaagttgagttaaatagatttaaaccggtcccaggaccagagcacggacgtctcgacccccagtgggcctcaaacccttcttctctggttttaaactactttttaagagactgttaaaatagaaaatatgtaaaatgtcagtgtgtaggactcatacgtatattctatgtctttattttccagacggaaaaattgtgactcagagaggaagagtaacacaggtgatcagtagaagagctgaaatccaactcaagtgtcgtagttcccagttagggactctttctctgacttccagtctacgccagcctaatagtgagattgaagctaaacacttgggttctacgtaatcttcctctccttggaaggtgccccagagctagggacctagaggcggcctgcagggatccaccttcctgggctactcacctgcctgaagcatgcaattccaggtactgcttccaaccagggctcagcacattgtgcttgaggttggggtctatgatgaggtcccagctgtcagccggctttgcctcctccatcttctcatagaagactttcttccactcatctgtggtcacgcttttacacatggtctcgtcagtagtgagggaaggcaatttccaccttagtgagaacacggagagtgagggtaggtgcagggcagggcagcgcagtctccacggtctaaaaatcctcatcgacaagaccaggaggaagcaggacccagctccctcctttgtccgcagtggaacctgtttccacggcaaccaggcaggttgccagaagacagagcttggggaggagggagtctctgaagaggtgtttcaaggccctgaactgagattgcagaggcagagtttgtgggtctaaatgatccaagacagagtgggggacctgaccagagattgagcttcagaccatctcaccctggcctggaaagagtatggggaggtgaggactgggaactggctcagtttcaccttgccgtcccctggaggcatcatcagcatctggctgctacggtaaccatgatgccttaggcagccaaggagaaatgagggatggggagatgtaaatttgttagtagatggagcaataataataaactctctctcggcttccccagccatcttgtgaccagcactttgccattttcaaaacacaattggaggtctcttaagttatgattactattgctgcagtacagatcaggagcctaggactcacctagcctataaatggcggagcctgtatacaaattcaagctgttgaccccagaccggttcattaattcattcatttcaaacatatccgagcatgtgggtagggtttgcagacatgtgccaagctctatgtcagtgcttgtagctgactgtgtactgaataactgtgcaataggatccatgctgcaatggccttgtgcaagaacagccacctgtgcacaaaggtaggagcattgcatcagccaggcaggagcagacaagattatttccaagctgattatagaagcgcagaagaggagcaccacccacaggcaaaacagcctttactatacatgcctctgctgctatttttaataaattatttttccttttaaaaaatcatatgggtttattctagaaaaaatacaaaatatagatgaaagaaaagagaagtaagactcttccataaaaccccacccgagatgactactgttaacattacgatatgtacatcccgcttaccatttttctgtacatgtacaagtgtatgtgtgtgtatatacacacacattctgtacaccacatacattctatataccacattgtgacattttcaaaaaataatacgtcatgaatatttttctaggtcatattccgtagtagtacattatgggctacctatattctgttatatggataggcataatttatttagccaatcctgtcttttagggcattttggttttatttcagtttctcacattacactcttcccatctatttgtataaacttgttgacgaagctcatcgcatgcattagaaacaacacttcctacaattggaaaacacgtctcttgactccactctctccaaaagcttggtgtggctagcagaatctgagcaggctcttcaaacagtatgaattttggacagccagcagatcttgaagtttagtgatgaaaaagagggacttaaaatcacccatctgataccagaaaccatcttccaagtgcttctcctgccgcttcatggatgtttgatgccttgatttacactattttaacctcagtttattcatcttctcagtgggataataacaaaacagtatctgctgtgattaaaagcaggggctttagaatggcttgcctggttgtggtgttgttgttgttgttgttgttgttacagagtctcgctctgttgcccaggctggagtgcaatggcacaatctcgactcactgcaacctccacctcccaagttcaagtgattctcttgcctcagcctcccaagtaacagggattacaggcatgcgtcaccacacctggctgattttgtattttccgtagagatgggatttcaccatgttggccaggctggtctcaaactcctgacctcaggtgatctgcctaccttagcatccccaagtgctgggattacaggcatgagtcaccgtgcctggctgcttttacaaaaaaaaaaaaatttccatatagactcataggtagcaattctaatgtatataatctgtatcttttcatcctagtaaaaaatacgtgttaatgttttatgtgaatataattttaatttgcatagtaacagcaatcaccatatagcacttactatatagcaatcactatacagcacttacctggtaagtgcttagaaagcattgttctggtgctttataaatattaatttatttcattcaataacaaacttgacaggtaggtaacagcagcagcagctccattttacagatatgtgagctaaagtctagaggttagataacttgcacaagatttaacagctaataactagttgaactgggacttaaacctatatgactgtctacaaagccccagctttagccattgtgatgctcagcgtggaatctagaacataacatctgctaattaaatgtgtgtttcttcatcactcacgtggccgttacagaccccaagaattgcaaatgaagtttatatcatttcagcaaatggttcactggggcccccccacactgaggccacatctccccagaagaggggtgagttgtacttgacccaccaggctccctgctactgctggggatgctgcctctactgccaaacttaatgaagcaatggtgtccacagacccctgatactcggtataaatattttagagctgagagagatatttagcttgaaatcttaccaaagaaaatatggtacagaaagtcatctctaggcacagcaaccctgtaaagcctcaatcatttgatgccaggcatcttggctcaatggagagagcactgaactgggagtcaggagacacatagcccagctctgctcctggctgacattgtgaccttgggcaagccactaatttcccttggcctcagtttgtccatctgttcaatgaagaattagggtagatgacaaaggtaagctcccctctaacttcagtcatgtatggtttcaaacagctttatacttagaaaactgaatcctgggagggcaggaggtaggatggaggccactggttggaagagggaagcttctaaagaggcatggcaggtaatgcctggagccaggctctgtttcctggggcctgctatatagttgacgatctctggggaggtgcttctctactagatttgtactgaacacagcaagaaggacagaaattaaatatatcaagccactgaacattaacattggaaaacccattttttatgtagagacggggtcttgctgtgttgcccaggctggtcccaaactcctgggctcaagcaaacctcctgcctccacctcccaaagtgctaagatcacaggcatgcgccatctcacctggccggcattgggaaaaactcttaagttcttcaggacccttcattaaactttcagtccttcaagtcagtattcttacctctgaattaaggcaaccaacacctaaataagtaaactcgtttaacaaacctcacagatatgatgggaactgcctcaggtgggagttactggccaaaatgagaatgggggctgtggaccttcccagaaaatacgtgaagctgagaggagcttataacaaacagtgctacccagaacaaatcctctagaagtattttgcaggtgttgctacaataaacactatgatgacagaagacagaaagtaagaatcaccagaggggtgtgtgtgtgtgtgtgtgtgagtgtgtgtgtgtgtgtaaccagctgatgcaatccccattggcacaaattaagttttatttagaacccaagcttgctgtgcagaggccaatataatgcatccttctggatagcagagtattttctctaataaaaatttctatcaagacagaaaaaaatactgtggtattgcaacttgctctctatcaaatgacctctaacaccatggaatctacaatttagagaaggccaattcagacatctctaaagctgttggcctcaccctggtcaatttcttaaagtttgtgatcatgttttaagtggataaaatgctttaaattaagttcccaactagaaaatagagcaatgaaaagaaaaaacaagcctctaattttttttcttgaaatgatgcactcatgaaaaattctcaactatgcacaattttctatccctaaatggcatttgagaagaaggaggggtgtgttttagggctggacccatgactggaagtttctactggtaccctgtaccaaagatctaaatgtgcctcacagtcccaaaacaaagactctttccttccagaatgccccaacattgctggaccagaacagtaagcccctccatctgttgatttaatgatattaagagcccatgtagtagtctcaactttaaaggaatttttaattttcttctctaatggcaacattttttttccttgggtactaagatttctaaaatagcagagatcaaagttatgggtacagaaagaaaagggaaaaaaaactagtttaccattagggctaattttgagaaagccagtccattctaccctttaattcttggaactaagcactatatcatcatggttgctaattctgagcatgtaccacatcctggagaacattatcctagccctgcaaggtcctgtcccccagctgattctataactgagtcttccaaagaccaccacattgttcaatcaggccaactacttcaggattatgggtgatatagttaagactaatgaatttcatgagtgtgagctcattgccagatttcctttactttgaaatgagttgccagtcagaagcaatgctatatggaatatcacaatggtatataaggaattctctaaatccactgctaagtgcctgatatggtttggatttgtgtccccacccaaatctcatgttgaattgtaatccccaatgttggaagagggtcctggtgggaggtgattggattatagtggtggatttcccccttgctcttctggtgatagtgagtgagttctcatgagatctggttgtttaaatgagtgtagcacctcccccttcgctctctcttcctcctgcttcagccacgtaagacaagcctgctttccttcaccttccgtcatgattgtaagtttcctaaggcctcctcagctatgctacctgtacagcctatggaaccctgagccaattaaacctcttttctttatattaataaattacccagtctcaggtatttctttttagcagtgcaagaatggactaatacaatgcccaaattccaaaaacagagagagaccaacactgaacaattgattgggccatgattccatgggaaacaaccaacgacctggtggcaagttgattacactggaccatttccatcaaggaagggatagacctttgttttcactggaagaaacaattaccgtgaatatggacttcccttcctctccacaatgcctctgccatttgtgaactttcataatgccttattcaccattatggtatttctccacttgggtctttccttttagctgctcaggcttcttcactacatggtagtttgtttccaagaagattcattctaggaagaataaatggaagcttccagtcctccttaaggctagagtcagaagtcccataacatcactcctgtcatattctgttgatgaaagcaatcacagggccagcccgatataggggaatgggaaataaacttcaactcttgatggggaaattgcctgtgcctataggaagggaaggaattggtggcagccatctttggagactttctaccacagtacctgattatttttcttcatccttcaaagagcttagtgccttgagaacacgatgtccaattctatgatgtaggtagaggttgacattattttgcaaaaaaaaaaaaaaaaaaaagcaaactaaggatcaaaaaggcaaagtagccaaagagtaaactaatccagcaagtccaatcccaaaacatagccagataggaacagtagggctgctccctttgggtcaaagcaaaggaaagcattacaggtacccagcctgccagtaccacccacctctgcatgcccagtcatgatttataagaacctcttcctttgcttcccctccaccccaacagcaaccattgaacttcttttccaagctcttgctcaattttgtgaggcatatgtgcctaccatcagcgagggcccttcagagatatacagcccaaaatccaaagtcccccagtcttcattctcttgaagttttatccccataaaactctgtgtttttttttttcagagatgggttctgtctatgttgcccaagttactcttgagctctcaggctcaagcaatcctccttttcagcctcctgagtagctggaattataggcacacatcactgtgcccagtctatgtgttttgttttttctatgtttgttttttgagacagggtctcactctgtcactcagactggagtgcagtggttcaatcatggttcactgcagcctcgatctcctgggctcaagtgatccacccacatcagcctcccaaataactggaactacaggcatgcaccatcatgatcagctgattttttaattttttttttttttttttttttttttttttttttttgtagaggtagggtctcactgtgttgcctcggctggtctcaaactcctgggctcacgtgatcttcccacctcagcctcccaaagttctaagactacaggcatgcactactgcccagtctctctgctttttttttttttttcaagtgcaagatcttgtctttgagaagagcattcatcagaaaatgttctatggatattaccaagggaacagtgccatggtccaggaagtgaagaagggcatacttgagagaaattatcaagtcctcaaaaactaatttccctattttcaggatatttgatctaaaataaaagacagcttccttccccttattctgaagaaggggcaaggcaacattacatgtggggaagcaacaatgttattcatttatttgttttttaaaacactctgaattatcaactaccatgtgccaggctctatactggacacatgggatatagagataaattagtctcactcatttcatgtccagtgaacatcaatagccaggtgacccacactaacccagagcctttggcttaggacatgaagactgacccttaagcatgttcctgttgccaagcagccactattatgggaacgtatcttcagactgtacccccaagagattcttcctgaagcagttttggaaagatatgcaaccgttcaaccctaataacatttcatggaaggtctagtaggaaatgaagtcactgtacattatcagaccgtcttactgtggttgaatggcatactcatggagttcagaagacaggacacaactttcctttactcttccatcaaatctccaataggtccactgagagtccacctagaatgcatgtccagaacttccccttattttttctggtctcctttctaggtcttctctttgatctcttctgctcttctactttctcttcaggaccttgcttcaaccttcggtgtagagtatctataagctaataacctttctcccactaatactgaccacattccattgcatagctgtcatttcttactatgctaacaaagtttatgtccctttattctattatatcaaagacctctactcactagggtaaaaagaaagaaagaaagtggaggaaggagtagaaaaaaatccattctgatgcacacttgccctccttctgagcatgatctttccaagaaaagcaataaaacaagaaaacttggtcctctcttttgcaaatgagaggaaaccgctctggacagcagatgtgtatttcacagtggccacagaataaacctgaatcacatttgcattcagtcactttggctgagtctctaccatatgacctgaaaatacaaagatgtatagaacagaattatggagtaaaagggatcttggaaattatctagtctaatcctaatcagatgtgccagtgactctgagacatttcatatgaagacataaataggtataaaataatcagattttaatttagtgagaagatggttcttcatatagaatgaggagacttcactgtctatctttagacagacccagtgatctgggattagggttgcctctgaaattgaagtaataaccaatgcctattgagagccaagcagttacctagcctgaatgtgaacatttccagtgatgtggagctcgttatccagtgatagcagcactctctaacccctggctattaagaagctcttctttactgagtgccaccatctcactttcaaaaccttgactctctgtgccttgcaatagaaagcacttaacaacgtgccagcccacagtaagcaggcagttaatattgactacttttgggaagtgaaaggggtgttgtggttttattgttaccactattaaagcctatgtttataagttgtgaaattctgcattggcagaacaccactggcttgttttagtctttaaacatgaaagcttttttaaagaataccttgtaatgagctgaaatgcaactttaggagaaagacagagcactatttattctactctctgacataattttccataatggcaaaacaatctctatttgttaatctgaatattatggaaactttcaagcacatagaaaagcaaaacagacaatgaaactccatgtgcccatcacccagcttcagtaaccatcagttatatgtcttctaaaacattttctttaacccaatatctgagatttccttcaaataatatgggtaggggtgtagatgaaatatgattgaccatgagttggtaacgttgagggtgagtagtagatacatggacatttattatactattctatgtatttttgtatattgaaactttccataatagaaagtaaataaataagcatttttcttttgcttactgcattagtcagaattctccagagaaacagaaccaataggaaaaagagagagagagagagagagagagagagagagtataagggattggctcacataattataaggactgaaaagcccatgatctcccctctgtgagctgaagacctaggaaagctggtggtgtagctacagttcaagtcaaaaagcttgagaacccagaggaccaatggtgtaggttacagttcaagagatgtcccagttcaggtaatcaggcaaaagagtgaattcttccttcctctgccattttgttctattctatccctcaacagattggatgatgccccacctacactgaggagggcaatctactttcctcagtctacagattcaaatgctaatctcatttggaaacacttcacagagacacaccagaaataatgtttaaccaaatatctgcaccccatggacctgtcaaagtgacacatgaaattaaccatcattgttctctcctaaatttttgctttcaaaacagtgaactcatgtccttgctccttgtagctgtggacttctagtttaatcttctggggtctgaatttttccatactgttcctatcattgtaataataaacttacatatgtaaaacagttcaaaaatgttcctcttacagcctcacatatacttaccaatgaatgtctatatttgaaatactcagggaacacataagagtaggtaattagcacaatacataggtctattatctagaagcctggcttctcaggtcaaaagaattgtcatttttctaaggcctcaacttttgattggctttgctttggaggttaatttataagtttccacggaatttgggggttgtgataatttgacatgggtgaatgaaattggaaagtcatgtacatcaggcaaacaggacaaaaggcagtgaaacaaccaggtgcatccttcactactagtcacatcagttgtgaagtccattactttatcaaaaactgttctcactttctcttgaaagccaatgttggtctctcaaggatctaagttaattcctttgtagacctcattcaggagaagagggctaagggagtcctcacttgttagccactaaggaaccaagaatcctcaaactgcagattctctctttggtgtcccagagcagatatttacttccctgggacacaattcttgacctagattaactcctgtatgaatcacagagagaagttccagtaagaaagagccctgatctacatatcctggagggaggcccttcccttgagctgggtataggctacgcctcaccttgtggttaggggtggcaggatggttagtgccagacacagcctgaaagagaagtaggaaaggtgagccctgaggctagaatgggcaatgtcccaggaccgagaggctggccagcagggcaggtgtgaggtcagtcttattgcaggctgtctgaggcagcagctccaggaggtgcacctctctcagcttccaggagccaagccctgctcaggaagagagatgactttcataccaagtaggaggccaaggggcctaaagctccttatctgtaaacccatggggaacagattcagaaggccctcaaataaacactccagcccagaaccggccaagtctgcaccagaataaactcatgagtcatactgaccctggtgttgccttacatggcagctaacaaggctggctagtctaagggctttggcatccgtagcctttttggtttagcactacctttactattttaacttcttgccgttgtttgactgactggtatttcaggcatcttggacccatgcttctgaaagcagctgacatctggtgtgataaaatggtgacctatacccctgtatatctatgcaggtctgtctcaggcgtaaatatgaaactcagttaatacattctacattgataactctcagaaactataggagagagatagtattagcaagacctgtgtggaaagaacaagaaagggagaaatgacaggtctgcattctgtcactgctgagacttgccatgtgaccaaagaacgtggcctctctgcttctacatttctgtgtacttaaaatcagtagaaccatattacctgatctcaaagtttccttcctgctctagcaatttgtgggtcacaattacatgaaacacctatagctttggtaaaggcaaaatgaccctctcccaaacctcttagatactcagaaacatatataaggagctactttctattttccccatgaaggagtattgctgtgctcataaattttccttattaaatattttcagaataaatatgaaatgatggctatctacaagcctcctccagttttgtaatgtccaaagttataaccactccctgatctagacagttcttggctatacctttacccgaatctatatgtcctccaatatttcctgattccaagtaaactcagcaggacctacacaaaaaagaaaaaaaaaaagcatgtaaccatggaaatcaagccctgctctcacactgtagggctgccccactgggtgaactgctcagcgaggcactcaagttccaacccatgatctggtctcatttaacttgcaaagcacagctcctaccacctgagcgtttctcaacagacatagcggatgcttttcctttcccacaaaaggctgcataatcccacctccatttctttgttcttgctctttcttctacctaaaatgtctcattcccctcttcatggcgcattcttttatccagcctggtgttcttctctcctattctctcctatacttgggctgaggaggaggcaagtttctatactctctttagcagcccacattttccataccacagcatttataaggattgctagcacttaatgagcacttactatatgccaagcaggtaccctgctaaagatttacattttcttctgatatcaaccctatgataggctcttgtttttccactttcatgcgcgtccgtgtgaagagaccaccaaacaggctttgtgtgagcaacatggctgtttatttcacctgggtgcaggcgggctgagtccgaaaagagagtcagcgaagggagataggggtggggccgtttgataggatttgggaaggtaatggaaaattacagtcaaagggggttgctctctggtgggcaggggtggatctcacaaagtacattctcaagggtggggagaattacaaagaaccttcttaagggtgggggagactacaaagtaccttcttaagggtgggggagattacaaagtacattgatcagttagggtggggcaggaacaaatcacaatggtggaatgtcatcagttaaggctgtttttacttcttttgtggatcttcagttacttcaggccatctggatgtatacgtgcaagtcacaggggatgcgatggcgtggcctgggctcagaggcctgacatccacctttcatgggtgactcaaataagccttgaaataattcaattacttgccctgggttgcttggccagcaaaggattaaaggagagatttgaactgggcagcctggtggcagcgcccactctcttaatcactgcgcattgtgatggcaggattatttgtcttctccaacaaaacggttagctctcagaggctccacacctggcttactcgctgatgaaccccagcatcaagtagagcaccaaagaaagttggagttgaatgaatgaattaaatcctgcctgcactgggaaaagattcccctgactgttcccactgggaaatatgctgtctcttctctgaccactaaaaactctttccggtacttctgttacatttcccatgtattttcgttatgagtgagttgtgaggtgacaacagttctaatagttcacaagctccttaagatcaggtgctgtgtctgccagaactacatgggcttagcgtacttgtttgtgaacccagggtgacttgtagaggaagaggaggaatatgttgcacttaaagaaacacagctacacttcctgccctcaggcatcctgtgatcagattggatcatgcattcataatgcccctctaacatcacaaaagaagcaaagaggccgggcaccgtggctcacgcctgtaatcccagcactttgggaggccgaggcgggcggatcacgaggtcaggagatcgagaccatcctggctaacatggtgaaaccccgtctctactaaaattacaaaaaattagccgggcgcggtggcaggcccctgtagtcccagctactcgggaggctgaggcaggagaatggcgtgaacccgggaggcggagcttgcagtgagcccagatagcgccactgcactccagcctgggcgaaagagtgagactccatctcaaaaaaaaaaaaaaagaagcaaagaaacgcatctgcaaatttactcgtgctgagtaaccactgcttagagactatctgtcaagggcatgattatcttattctctgaggcaacaggcagtgatatgtcccttgggtaatagtatttgtagacatttcaaatgtcagattactgagctaagtaactcactaacaggatgcggaatttgctaacacataagagtccatcactgttgttactgggctgtttctaatgattgtcttagtgtcacactgttgtgcgataatacctcaggttcagacactctgatcttacaagagatgaagattataaattctgccatcagcctgtctgcattcaaatcctggcttcaccacttactggctgtgtgacaattgaccaagtgacttgatttccctgggtctcaatatcctatctttaaaatgaacaaaataatggtatccatcttacgaatttgtgagagtcaaatggtggcatatgttaacagttcttagaatagtatttattattcataaaaatgttgcagaatttcgcttagttcagctaaaacctgggttcttgtcacatgactagaaaaatttaggcacgcagacacattgaagggtgagtagaacagggttttattgggtgaaaaggaagaaaagaaagaaaactcagcaaagtgagatggagtcctgctaacagacccctgacctcacagatttaatcccaggccacacaaaggaactgaagagagcaggctcctcctttgcttaagttgcaaatttgccataatccacccacttcctcagtgtgcgtgttgggctccagtcggctgtgggcatgcccacacaagccctgggcaggttccctcatctgcacaaaagcatctgctgcaaacacttgtgggacgggtcagagattccctggggatcactttttatccgcctaggcatttggctgtctcagaattgtatttaactaacatagtaaatgttgaataaatgttagtcattattgtattatttctgagctagaatgagctttgaagatcatctaggtcaactgctgatcccaatgaaagaatcctctttgaccttgtctgcatttcaaacctctgcttgaatacctccaactacacttactcactacttcataacctgctggattttgacaaagcactgtcttttgttaaactctttcttgagagtttaaaataaaaacgggcaagccacatgttttcctgttgcatccatagtgactttatgtttgctttttggactcacattgactacatagtatcctttccacaacttcatggcacacttcagatatttaaaggccgcagctattatgatctttagagctttcccagccctcatctcaaaacacaagcctcagaaaatggctctgtgactaacgtccattacacacaggatactaaagtcatgggggaaagtagagaggtttccaggtgtcgacgaaaagagtcaaactctgtgaaatatttgaagagatttattctgagccaaatatgaatgaccatggcccatgacacagccctcaggaggtcctgagaacatgacaacatgtgcccaaggtaggcagggcgcagcttggttttacacattttagagatgcataagacatcaatcaaatacatttaagaaatacattggtttggtgcagaaaggcagaagaattcaaagcaggtgattccaggccataggtgaatttaaacattttctagataacaattggttgagtttgtctaaagacctgggattcatagaaagagaatgttcaggttaagatacagattgtggagaccaaagttcttttaaagtcttatagtggctgcccttagagacaacaggtgacaaatgtttccaattcagattttagttaatctgtttaggattgggagggtctggaagaaaaagatctagctatgttagtagagattctttacagatgcaaatttttccccacaaagaacagctttgcatggctatttcaaaatatggcaaagaaacgtgtcttggggtaaaatattttgattttcttgtctcataatgttatgccagagtcaggttggaaagcaaatcatgatatatagggttcaataaaacccatctgatgagaatttatgatttgtagggcatgactctccagaccccttagacaggaattcgggcaagataaacaaatcataggttagtcctcacagggaatgcctccatacctgcagcttccagctgccttccaggtatgaacacatggaagcacctccagggcaaggcctcttgggcttctcttccactctatcctactcattctaggctttactccaggtctttaagggatatttatttaaaggaatcaggacttatttcttcacaatgatttgcagcttggaggcctgcacagacttcagcgtacagtcgtcactcagtatccatggagggggttggttccaggatcctcaatggataccaaaattgagaatgctcaagtccttgacataaaatggcatagtacttgcatatcacccacacgcatcctcctgtacactttaaatcatctctagattactcataatacctaacgcagtgtaaatgctaggtacattgtgtcatactgtattgtttagagaatgacaaaaggtctgtacatattcagtgtagaccaaccattatagccctaactacattatctgcagttgatattgagctgagcagcgctgtctcaagaacccagctccctgaccactccgccaccaggctttaactctctgcctaggctgttttctttttgttttgttttgttttgtttcagatggaatctcattctgtcacccaggatggagtgcaatggtgcaatctcagctctctgcaacctccacctcccgggttcaagcatttctcctgcctcagcctcctgagtagctgggactacaggcatgcgccaacatcgtcaggcctctgagcccaagccaagccatcacatcccctgtgacttgcacttatacgcccagatggcctgaagtaactgaagaatcacaaaagaagtgaatatgccctgccccaccttaactgatgacattccaccacaaaagaagtgtaaatggccggtccttgccttaagtgatgacattaccttgtgaaagtccttttcctggctcatcctggctcaaaaagcacccccactgagcaccttgcgacccccactcctgcccaccagagaactagccccctttgactgtaattttcctttacctacccaaattctgtaaaacggccccacccttatctcccttcgctgactctcttttcagactcagcccgcctgcacccaggtgaaataaacagccatgttgctcacacaaagcctgtttggtggtctcttcacatggacgcgcatgaaatttggtgccgtgactcagatcgggggacctcccttgggagatcaatcccctgtcctcctgttctttgctccatgagaaagatccacctacgacctcaggtcctcagacggaccagcccaaggaacatctcaccaattttaaatcaggtaaatggcctcttcttactctcttctccaacctctctcactgtccctcaaccactttcttctttccactcttcaatctctcccttctcttaatttcaattcctttcattttctgggagagacaaaggagacacgttttatctgtggacccaaaactccggcgccggtcacggactgggaaggcagccttcccttggtgtttaatcactgcagggacacctctctgattactcatccacgtttcaaaggtgtcagaccatgcagggacgcctgccttggtccttcgcccttagcggcaagtcccgcttttctggggaaggggcaaataccccaaccccttctctccttgtctccaccccttctctgctttcctggggcaggggcaagtacccctcaaccccttctccttcaccattagcagcaagtcccgcctttctagggggcaagaactcccaatcccttatttctgcaccccaacctcgtatctgtgtgccccaatcccttatttccgtgccccgacctcttatttctgtgccccatcccctatttccacaccccgaccttttatctctgcgccccaaccacttttcccacttttctggaaggtaagaacccccgaaccccttccctccatttctctactctctcttttctctaggcttgcttccttcactataggcaaccttccaccctccattcctccttctactcccttggcctgtgttctcaaaaacttaaaacctcttcaaatcacacctgacctaaaacctaaatgccttattttcttctgcaatgccgcttgaccccaatacaaactccacagtagttccaaatagccagaaaatggcactttgaatttttccatcctgcaagatctaaataattcttgtcgtaacataggccaacggtctgaggtgcctgacgtccaggcattcttttacacatcagtcccttcctagtctctgtgcccagtgcaactcgtcccaaatcttccttctttccctcccacctgtaccctcagtcccaaccccaagcgtcgctgagtctttctaatcttccttttctacagacccatctgacctctcccctcctcgacaggccgagctaggtcccaattcttcctcagcctccgctcctccaccctataatccttttattgcctccccttctcacacctggtcaggcttagtttcgttccatgactagccctcccccacctgcccagcaatttactcttaaaacggtggctggagccaaaggcatagtcaaggttaatgctcctttttctttatcccaaatcagatagcgtttaggctctttttcatcaaatataaaaatccagcccagttcatgacttgtttggcagcaaccctgagatgctttacagccctagaccctaaaaagtcaaaaggccgtcttattctcaaaatacattttattacccaatctgctcccgacattaaataaaactccaaaaattaaattccggccctcaaaccccacaacaggatttaattaacctggccttcaaggtgtacaataatagaaaaaagttgcaattccttgcctccactgtgagacaaaccccagccacatctccagcacacaagaacttccaaacgcctgaaccgcagcagccaggtgttcctccagaacctcctcccacaggagcttgctacacgtgctggaaatctggccactgggccaaggaatgcccgcagcccgggattcctcctaagccgcgtcccatctgtgtgggaccccactgaaaatcggactgttcaactcacctggcagccactcccagagcccctggaactctggcccaaggctctctgactccttcccagatcttctcggcttagcggctgaagactgacactgcccgatcgcctcggaagccccctagaccatcacagacgccgagcttcgggtaactctcacagtggaaggtgagcccgtccccttcttaatcaatatggaggcaacccactccacattaccttcttttcaagggcctgtttcccttgcctccataactgttgtgggtattgacggccaggcttctaaacctcttaaaattccccaactctggtgccaacttagacagtactcttttaagcactcctttttagttatccccacctgcccagttcccttattaggctgagacactttaactaaattatctgcttccctgactattcctggactacagctatatctcattgccacccttcttcacaatccaaagcctcctttgtgtcctcctcttgtatccccccaccttaacccacaagtataagatacctctactccctccttggtgaccgatcatgcaccccttaccatctcattaaaacctaatcacccttacccccctcaatgccaatatcccatcccgcagcacgctttaaaaagattaaagcctgttatcactcacctgctacagcatggccttttaaagcctataaactctccttacaattcccccattttacctgtcctaaaaccagacaagccttacaagttagttcaggatctgcgccttatcaaccaaattgttttgcctagccaccccgtggtgccaaacccgtatactctcctatcctcaatacctgcctctacaacccattattctgttctggatctcaaacatgctttctttactattcctttgcacccttaatcccagcctctcttcgctttcacttggactgaccctgacacccatcaagctcagcaaattacctaggctgtactgccgcaaagctcacagacagcccccattacttcaatcaagcccaaatttcttcctcatctgttacctatctcggcataattctcataaaaacacacgtgctctccctgccaatcgtgtccgactaatctctcaaaccccagcaccttctacaaaacaacaactcctttccttcctaggcatggttagcgtggtcagaattcttacacaagagccaggaccataccctgtaggctttctgtccaaacaacttgaccttactgttttagcctagccctcatgtctgcgtgcagcggctgccgctgctttaatacttttagaggccctaaaaatcacaaactatgctcaactcactctctacagttctcataacttccaaaatctattttcttcctcatactgacgcatatactttctgctccccggctccttcagctgtactcactctttgttgagtctcccacaattaccgttgttcctggtccagacttcaatccggcctcccacattattcctgataccacacctgacccccatgactgtatctctctgatccacctgacattcaccccatttccccaaatttccttctttcctgttcctcaccctgatcatgcttgatttattgatggcagttccaccaggcctaatcgccacaaaccggcaaaggcaggttatgctatagtacaagccactagcccgcctcttagaacctctcatttcctttccatcgtggaaatctatcctcaaggaaataacttctcagtgttccatctgctattctactactcctcagggattattcaggccccctgccttccctacacatcaagctcaaggatttgccccacccaggactggcaaattagctttactcaacatgccctgagtcagataactaaaatacctcttagtctaggcagacagtttcactggataggtagattcctttcctacagggtctgagaaggccaccacggtcatttcttcccttctgtcagacataattcctcagtttagccttcccacctcaatacagtctgataacagacaagcctttattagtcaaatcagccaagcagtttttcaggctcttagtattcagtgaaacctttatatcccttacggtcctccgtcttcaagaaaagtagaatggactaaaggtcttttaaaaacacacctcaccatgctcagccaccaacttgaaaaggactggacaatacttttaccactttcccttctcagaagtcagacctgtcgtcagaatgctacaaggtacagcccatttgagctcctgtatagacgctcctttttattaggccccagtctcattccagacaccagaccaacttagactgtgcccccaaaaaaacttgtcatccctactatcttctgtctagtcatactcctattcaccattctcaactactcatacatgccctgctcttgtttacactgccggtttacactgtttttccaagccatcacagctgatatctcctggtggtatccccaaactgccactcttaactcttgaagtaaataaataatctttgctggcaggactatgctgaatctccttaggcactctctaatcagatatcctgagtcgtcccaattcttagaccttttatacctgtttttctccttctgttattccatttagtttctcaattaatccaaaaccatattcaggccatcaccaatcattctatacgacaaatgtttcttctaacatccccacaatatcaccccttaccacaagacctcccttcagcttaatctctcccactctaggttcccacgccacccctaatcccgcttgaagcagccctgacaaacatcgcccattctctctccatatcaccccccaaaaattttcgccgccccaacacttcaacactattttgttttatttttcttattcatataagaaggcaggaatgtcagtcaggcctctgagcccaagccaagccatcgcatcccctgtgacttgcacttatatgcccagatggcctgaagtaactgaagaatcacaaaagaagtgaatatgccctgccccaccttaactgatgacattccaccacaaaagaagtgtaaatggtcggtccttgccttaagtgatgacattaccttgtgaaagtccttttcctggctcatcctggctcaaaaagcaccccccactgagcaccttgcgacccccactcctgcccgccagagaacaagccccctttgactgtaattttcctttacctacccaaatcctataaaacggccccacccttatctcgcttcgctgactctcttttcagactcagcccgcctgcacccaggtgaaataaacagccatgttgctcatacaaagcctgtttggtggtctcttcacacagatgcgcgtgaaaactatgttcagctgatttttgtattcttagtagagacagggtttcaccatgttggtcaggctggtttcgaactcctgacctcaggtgatccacccacctcggcctcccaaagtgctgggattacaggcgtgagccaccacactcagccatgcctaggctgtttttacatctcatgctgggaggaaactgacagaccctactgctgttttcctcccaccccagacaactgctttgttcagtggttgtggcgagttagaaaccggggatggcatggcctagagagaggaatagggggaggggagtgtcaaatctgctatttgacatcgtcatgaccagccttgccattttgtttcacaggtcaaagtgagtgttatcgcccgaaagtttgtcattcgaagctcctccatgtctcacttagtgagaatttttccagacattggcaagtggtctgttgccatctttaattctcaatgctgtggcaaaatgtgtttttacggcctggtgtggtagctcatgcctgtaatcctagcactttgggaggccaaggcaggtggattgcctaagctcaggagttcgagaccagcctgggcaacatgctgaaaccccgtctctactaaaatacaaaaagttagccaggcgtggtggcatgcacctgtaatcccagctactcgggaggctgaggcagaagaattgctagaacccgggaggtggaggttgcagtgagtcgagatcaggccactgcactccagcctgggtgacagagcgagactccatctcttaaaaaaaaaaaaaaatgtgcttttacgcatttcggtgggaagtagagatggaatatcaaggatggttagaatgatggtacattcccatgttttaaaaagagacggttggcagcccggagtctggactgaaatgaggagaaacagtaaagtggctttttgaaggccataactgaggcaggagaatggcttgaacccggcaggtggaggttgcagtgagccaagatcgcgccactgcactccagccaaggcaacagagcaagactctgtcaaaaaaaaaaaacaaaaactttcactttggagtgaggcagacaaagctgactccaccacttaactgggcctgtaactttcaaggagttggtatcctctaacgccttattccctcttttggctgctggagggaggcaggtaattattgctatctcccagggttcttatgaggataaaggagataaatatatggaaattttacatttactcttaaaaccttgaggtgaaaccacagcagtgagcaggaaaagagggagctgccctcagggcaaatgctaatatcaacacaacaatccagagctggactttgagcagagggagagcagaatcaactcaggttcccggattatgcctgacacaaggaaagggattaaaggaattgcaggtctgtagctgtccaaggctgttgcaaacacaagcccaaatcttctctggaagaaagaatcctgaattcagcaacaaggttttccacagactgaaataaactaaatcaaggattacaaaacccttctctcagggaatgcatttccagtcagctctcaacgccatcagggacttggcccagaaggcttctttccagtgaatgaattctgtgcacggcaggatctgtcttctcctcgggctttgatctggggcaacctgacctcagtttctccttagagggcagccatgcttgctaacattttgatgccccggactattctgtttagctaatgcattggctttgctaacaatcagattttactttctgttgctatgggtttttttcttcttttttagatattttgcctgtgatctatataattttatgccagaagacttggactcaagcattaagatgtaagtggacatctggtgtgactcagtcttgccttgtaggtctgcttataattagaaagaggcatacctacattatagggatatgggtgggcttcagttagtacacaggctacagcatttatattaattcatacataacttatttcacaccaacagccaacttaaatctcagtattgtattatctgtaaactctcaggtgttttcattatgaagacttgatgccctatggaagtcacagtccatatagatcagtctctatgtggtgtcatgttcaagatacacagtataagagccagaaaagcaattatagaagaattttattaacttgcttttccaaaagaagatgagagtggatcagactcacaagttgtagcaacacttctcatattcctatgtctcttcccctctacttcttcccttctgtgtcccccagcacctttcgtttgctgcctccccctctccaccatgttgttcaccttcagcctccctcgcctccacttttctcacctcctatccctccaactttctccctgggtcattctccctgccataaaatccttcttgatccattcttacaaaagtctgtagagactggtctagcaatgacaaatgtagggagtgagggatgagaaaagcatgtggaagagtggggaaaggtccatccagcaattgcattcactttggtggagtggggggaaaagggaaatttgtggataatccctgatgaatattaatttttataacagagtcttatgcctataaaagatagatatttatataattataaatgtatgttacttagtgcttcatattattattataataaatattaaaagtaatttatgccccaatgttctttttataaaaaagtttaaagtagctttcaaagatgcatacaacataataatatgttctatttttaaaacagtcaaaaatatctaacaaaataatacatgcatttccctttgacccagcaatcctatgtctagaaatttatgcctaacatatgttgacaaaaacagaaaatgatatacacaaatcgctattcagtactatgttgtttgtagcagtcggaattggaaacaacctaaactgtacggcataccttacctatggtaagatacaagaggaataaaatatgaaacaccacccagtaaagaactatggagctaaacaaaagaatgaggataatctctataaaccattatggagtgatatccaggatagcctctcaactaaaaaacaaaaaaaggaaaagaaaaaaccaaggggcagaactgtatataaagattgctacctttcctcgaaggatgaaagatacatatttgactatattaaaaataaatggaaagataagttaaaaactaaggaatattattgttcactggggaggagggaacagggtagaggagacacaggtagaacacagatatttctaaatgtgctttgttgtgttgtgttgttttgggtccatgttattttttacataattataaaacaaaaaaattgaatttttaaaaattctgaaaacttggggaaaaaattaacctaacattatgaaatctgtggcttactcaatggtgaattatttcaaatgactttaaaacataataatttgactgtttccatatatctcatggaggctgaagtgtggggatggggagtaattacagtgttattatttttattttaatagggtaagtaacacattgtattagtgcttctattaatgttactgggaaccaagatttttatggtaatcaaaaagagattggaaatacataaaatctaagatggtaaataaaaattcctattatctgaatttgaattggaaatataagtattatatcataatgaaattgtattgcccataaaaattatgaacttcctaactttgtctattacacagacctgaaagaaataaatcatcaatccattagcaacaagtacctctcagcacctggatcaccaaaagtgatcagaactttctggaaaaataattccttcagatataagtcaataaatgtataaaatgagcctggaatattttcttgtaccagatttcaaaaattcctattgtcatgtcaaaagacaaaaggcaaatgaaactaacctgaagaagctttcactggccaaaaacaaaataattggatcatcaaaaagaataatggccacaattcattgaagtacatcaaatatgctaaaaatccataaattaataatgatattttaaataaaaaaaaccaactatttatttcaaaaataggcaagggaaaaatattacatatttatcttggcttccttatgtaatctgcattttgtgataaccaaataatagttgaggggaagctattctttagagaagaattacaattaataaaagaaaaggggccgaggcgcagtggttcacacctgtaatctcagcactttgggaggccaagtagggagatcacttgaggtcaggagtttgagaccagcctgtccaatgtggtgaaaccccatctctactaaaaatacaaaaaaatcagctgggcctggtggagcacactggtaatcccagctactcgcgaagctgaggcatgagaattacttgaacccaggtggtgggggttgcagtgagctgagattgcgccactgaactccagcctgggtgacagagcaagactctatctcaaaaagtaaataaataaaaaataaaagggaacaataggatcagaatatcactattttgcagtcctaatgaaataatgataaagaaaaaaatctaaatctgctaaactcattaattaagatgttgtggggaactttatagtggatgggtcaggctgacaccatctgatcttactgatcaattaagaaaagaaaggcaatcagacatcacgtgtctcctaatataacgctgcaggaacagtccaacactagcactgaaatagtcacattaaaaaatccaaatctggctgggtgcggtggctcacgcctataatcccagcactttgagaagccaaagtgggtgtatcacgaggtcagaagttcgagaacagcctgaccaacatgatgaaaccctgtctctactaaaaatacaaaatttagctgggcatggtggcgcgtgcctgtaatcccagctactcaggagcctgaggcaggagaatcgcttgaacccgggaggcagaggttgcagtgagcctagatcgtgccactgcactccagcctgggtgacagagtgagacttccaaaaaaaaaaaaaaaaaaaacatacctgatcaggcctgtagatagtctagaggaaatacgaagtatgaggaaacgtctcagacaaaaaccacaagaatgtatcaccaaagtccaaaatgtgagcaattctacaagatacatgattttttttccaaataaataaatggtaaagaagaagagggggaaggaggactgctataaagttaaaaagaattgagacgcacaacccgatgtgatatgtgaactttctgactgaatcaaatcaactataaaaaggcatgtttgagataacacagacaacttaattatgtactaaattagatgattttaaggaattctttttgaagaattatgaggaattatgaagaatgattatgaagaatttcaaggagttgcatttggaaatttgaaatttaaaaaaaattttaatagtaaaaacaaaagcagaaggtaaaagggaataaaactgtaaataagatggatccaggactggatttggggcatagatgtatacatgtgttataggagtaccacaaaacaagctctatgtttgcagctaccaatgtgagaagggagagaaaaatagtgagaaagtgctcagtacctactcagcaaaaacaaacaagcttttcaggtagagcatcattctactgctaagtcctgagcaaatcctctgccctggatcatcacttaaaacaaatccaggacagcttccctttttaatttgattggccaaatatttaaatcctttactccataccccaaccacctgaactatataagaccaaaagacccctcatcatttaagaaacatttgttgaactctactatatttcagtatgtgtggtaagagtaaagtatttatttacaaagaaggcagactctgctgtcagtgaacttagagtctatagtgatttgctggcattcatacaaccatcacatcatgccaagatagataggtcatgagagcgaataacaaagatctctggaagcggaaggattcctcttcaaattctcaggacaagttaaggtttcttacagaaacaccataactgtgtgttgttagcacaagatgggttttgctgggggtgacattccacataaaccaaaggcagaggtggtctgcacatccttctggggtgcttagtacatgagctccccccttatccaaggttttgctatccatggtttcagttactcatggtcaaccatggtttgaaaataggtgaacacagagcaataagatattttgagaaagagagaccacatttacataatttttattacagtatatctaatcattgttctattttattattgttaatttcttactgtgtgtaagttttgtttgtttgtttgtttgtttcattttttgagatggagtcttgctctgtcacccaggctggagtgcagtggcgcgatctcggctcactgaaacctccacctcccaggttcaagcgattctcctgcctcagcctcctgagtagaactacaggcatgcaccaccacacccagctaatttttgtatttttagtagagatggggtttcaccgtgttggtcaggatggtatcaatcacttgaccttgtgatctgcccaccttggcttcccaaagtgctgggattacaggcgtaagccaccacactctgcccactctgtgtaatttataaattatcatatatcatataatttatcataggtatgtgtgtataggaaaaaacgtagtatatttaggtttcagtactatctgcagtttcatgtatccactgaggatcttggaatgtatctcccatgtataaggggggaccacagtacagagacaagcattaaattggtatttacaattgaccatcaatcagaaaaattatacaaaaatttcgataggctcccacagtggtagagatgtttatagggttcgaggacctttaatgactattcttctccttcaagtaaaactgataagttattagttagtaagacagtagcagcggctttagttcatttggtagtatttgtccagctcttgaggtgaatgtggtctctgtgatgacttttagaaatgtcagatttctagtaagtcaagtctatatagattattttgtttatgcatacatatataacatgtgagttatttgattaaatgcatatatgcctaaaaaggtatatccacatgtaaatatgtatttatatgtatgtatgtattacatataagcacctaatttgtatatacatccatggcgttatttttaaaaacttaatgagattgtctattctcagtgtctagagaattattcaatatgagctctgtagcaacacataagtgataaagtctataatgtaatggcatctctcgaaagccagccttgggccctgtccaggtagctgaaacatttggctgcccagtgctccggaggattgctaaaattagctagagagaaaagaggcaaatatatcttaaggatggccgggagctgagtctaacttcacttcttttccaataaagtgactgtcaaaaaccaaagatctgggctaaaaagggcttcagaaagccatttgatttcagttccagctgaagtgtgaatttcttgtacggcacaaaattagttatctattgctacataaaaagttgtcctaaaacttggcttaattcacccaaagcagttattatctcaaagtttctgtgggtcaggaattaacacatggcttaactgagtcagttgtgctcagggtctctcatcgggatgcagttaagatgttgaccagggtcataatgacctgagagtttgactggagtcggaagatccatttctaaaacagctcacttgcattgttggctgttgttaagaggcctcaggtttctaatctcatgggcttcttcaaaaagctgctagagcgtcctcctgacatgaagactggtttttccagaggcaataatctaaataccagggaggtagaaaccacaatgtcttttataacctagtaccagaagtaacactgtcatttctgcagtatcttattggttacatagttaatgctattcactaaacaaggtatgaacaccaggaggcaaggatccctgggtgccatctgggagtctggcacactcacccacaggcctcccactgttgcttgaatgcttacagtaatggaacctcattccacaaggcagcctaccttaccattagccgctctgatggaaattactctcttgctttgggttgtgatatggtttgcttgtgtccccacccaaatctcacctcgaattgtaataatccccatgtgtcaagggtgaggcaaggtggagataattgaatcgtggaggtggtttcccgcatattattctcaagtaaatgaataagtctcatgaggtctgatggttttataaatgggagtttccctgcacgtgctttcttgcctgctgccatgtaagatgtgccattgcttctcgtttgctttccgccatgattgtgaggcctccctagccatgtggaacagtgagtctattaaacctctttcctttagaaattacccagtcttgggtatgtctttattagcagtgtgagaacagactaatacaggttgtaaatattatcccgcctttttaattcttctctgtatcgggaggctgagaaaacaatgctaatccttctgtgaaaaaaaaaaatagtccttcagatatctgaagatggtaattctgtaccttctagtcatcctacttccacatcctactccaccccattctccagttccttcacttctttttgtctatgtgaggagctttaagacaagactccttatcccaaaatatttatttaagaataggtgagggcacatgtcccctccccagcttttccttcacctgctgtccagccattgtgtcagtgtcctcacctctcctaagcaggtcatctaccctgggggagtgcctacatgccatctcatcagctaccagagctcaattttcaaccaggagtttcatccttctttaaaaaggtcaactgaatcccatacaaattttatgtggtaacaagagaaggaaaagagagccctggcccagtagggcttctcatcaacttcatgacccacactaactccagtgatcactaacctaagacacaaaggtctaagcaataaagaactctgtcttggggcagtctatattctagggtgatgggaatatttctgtctgcaataattttctattttaccatcctatttccctttttgtcacctagattcatttttctgcccagcagtcagaatgacagctttgaaatataatttaaatcatactgctcccctgctcaattctccaatggattcacatcactttcagagtaatatccaattttctcatcatacatacaaggtctacctatctttccatctcatctcttgccacttcagcctccctcactctgctgttaccatactgactttcttgctgttcttcaaacataccagactctttccacctcaacacttttgcccttgcagtttcttttacctacactcttccctggaccttcccatgtcttgctgttacttcattcacagttctgcatgtcaccctctgagtggtttccataaatcaccctattaccctctatttatttaccattagttcattttcatgttagtacttatcactaactagcattatattgcagtagttgtttgcctatttgcttattgtatttcttcagttttgttttctaatgccaagaacggtgtctggcactcagtaacatcaggtaaataaaagaatgaaacatccattaaaatgaattttcctagcctgctttctgagtagcgcttggtatctgagttagtgatattataaaatacatcttttttggtacctgagtacctgctaactgtatcttggtaaatctgttccatgccaaatttctttctgttctgatgattcaaaccttagcagtcagacagagctgaacttggtcctggtaataaaagcctttcccttaggagagctctttgcaactgagagatgtggtctcctaacccccgaggtgtaatttgagcaatcaggccaggtgaaacccgagctggtaaggaataagaaaggatacaaatgatgatgttgttatggctgttctaagacacaagggggcagcaaatccagctctttatttatttaacgtggtaagaatttttttttttttttctcaacttttattttagattcatgggagatatgtgcaggtttgttacctgggtatactgtttgatgctgaggtttggagtacaaatgatcccatcattcaggtactgagcatagtacccaataattattcaacccttgccgctgtccctccctccccgctctagtagtccccactggctattgtttcagctcttatttttaaaggtaaaacaggaattttgacaactatcattagttatcaaaactgatggagatgttcaacagattagataaatctatggagattcaatcgattagataaatctcagtatgtccacacaatgagtttcttctggaggaatgcagtaataattttagctaaaatttaaaccttggcctaagttataaaaggactgataggtcaaggagtgagggcttaactgttaccagggagacagcccgtgtgtcctgtagggccactgggaacttcgtgaggaggtgagccgcaggagaacacgctttctgagcaggaagtggggcttctgtggaaatcaggattgtcagacgcttaatcctaattgccacccccttgggcctacacactggggcagggaacttaccaagttgtccatgtcaaaacgtactttggagccctcactcttagctctttttccacccaaactttataaaaacaccaaaaagttcaaaaatattgagtaatcatctgtaataccccgaacaacaaggaatagtgtcatgaatggaccagaaacttaaaaacatttttttcaggaaacgatccagatgggaaaagattgcacaaagtcttgaccgactagtcacatgtgaaaagagggcctgaaagaaaagtaaatgaataaaccccttcccagaacctgagaaaaccatcagaatagagcagaaaggctcagggtgagggcaggggtgggcagctgaggggatctgactgaaggaagatgggatagaaagttgtcccattccagcaggtatagctaaaaataaaaataaaaaaaatagaaagtcatggaaagcaacaatgtaatcattgtaaacatagttatgaaacaatgttaggttactatataattattgagtgataaagtatgctgcaaaaaaatcaataatctatataacttaatgctagacaagctttattgagcaactgctatgtacgagcaccatgctaagtgcttgatatgcattatctcatttaatcttaatataattacctacatggtaaattccatggttatagccacttaaaggataaagaaacaaactcaaagagaacttgaccaaacccacacagcacgaaaatgctacgtaggctggtctgactctgaagcccacgcttttaatgactataggcaagccacaccttggcatcttactctgacatcaccatattctcgctgcagcccattgcgactaaacaagccacaacctcgcccaggactcctaccttccaagcacctacagatttctaccttcaagttatgagcccagaaattcccttggtacttcatccctacttcatactacacacctattaatttcattctttctttctttttttaagagggggtctcactctgttgcccaggttagagtgcagcggcatgatcatggctgactgcagcatcaacctcctggattcaggcaaccctcccacctcagcctcccaagaagctgggaccacaggtgtgcaccaccatgcctgctaatattttttattatttttatagtgacaaaatacaaaatattccctatgtggcccaggctggtcttgaatttctgggctcaagtggtccttccattttagcctctccaaatgctgggattacaggcatgagccactgtgcccggcctattaatttcatggatcagaattttcctacccagcaaagcctaggatctactgaccagctttaacaaaacctccaagagacctccactgcttctctccccatctctaactgttaaagcaaatccaactttcaggggctagctcaaaagccatcttttcccggaagctttcctgattctcccagaaacaatttttctctctcaactctgactccaggagtcacttgtggctttcccttatagccttcattcatctagatagaggtgcagcatcacacaatcctagcagcatgcacagagcctatcagagaaagcactggctataggttcgggctcagccataggtagattactcatatggtcccagaatttgccactgtgcccatcctgatgggctcacattagcaatcataatttttctggcttaatggatacctaacccaagaagcagctatatcaggaagaccacctcagctgagacatgggcaatgtgggatacacagcacaggacctacccacaacagggcctcctctcagcctcagctaaatatgcattcggaatggagaatactcactgaccacatacatagtcactccctagaaggaggtataagcaagagtattcaggaatcattgcaaagagaatgcaagcagactcgaatcttcttgttgcctacataaggccaagctaaacggttctttgaggctgcctgatcaatattagagctgggtaactcaaagttcagaggcctgagagagcacgaccatggcagctgctccctcataaaattcaccattaccaggatttttcaagggggtgcctttgcacatgtgagggaggagagaggaggagttaagggaaaaacagtttgctccacatggactctgacttcatgcagcaaggaggccccactctggatgctcctcaagatgatccctctccctgggggtggggtcctgacttctttggcctctctcagcattgtgagtatgacggccaaggtcatccccctgcaagcctggacctattaacactgcccagaggggagcagccgagggagaggccccggaacaggaaaaatgtcccagcttcataaacccacaagcccaaaagaaggaggtagcagctacaggacttcactgtttttttggctagggtggctggaggagatggcagatcacagcaggggagaaagtaagaaaggaaaacggggagaggaaagtggatggagaggaaggaagaaaatataatagtgataaatgggcaaaagggaagacggaaggaaggaggaaaggagggtcaaaaaaaggagcacaaataagagggaatctttagaaaaaataaagcagagactcagagggagaaacagagggagaaagagtaataaaaagaagaagagaagccaaggaacagtcagaaacaagaacaataggaagaaataaaggggagagagagcaaaaaaaaaaaagaaaggacagaacttcactgtccttcttggccagggtggaaagagcaaggaacagaagagcaagaagaaagccactaggggaagcagaggtaggaagggcaggaatggagaaagaagaaagcaagagacagagtcagaaagactgagagacaaagagagacttggggaagggggagggagagtccttgagataagtgagatagagtggaatgaagaaaggagagaagaaaaaagacagtctaagaataccagaaagaaccaaagggagaaaggaagagaaaagaaagagagaaaagggcagagagcatgaaataggaggagagaattcagaatgtggagacaaaaggccagggagaaacaggaagctagagaaacagaagcacagagggagaatttgaaagggaaaatttcttcccttaactctctacctacacacctggacattatcccctcccaagggacctcttaggagtcagttgccttgatgaactaaaggggcttgaaaaagtgtagataacaggagtgggtgttaaggagaagaaggaagcggaatgggaataacaaacagaaaaaagagaagagcaaatgagaaagggttgggttagaaacaagatgcaggggctttgtccacccgctgtctaattgcgaccctgtctgagcctcacttttctcatccattaaatgaaatgcttactttactaattttttaggacaattaaactcaagaatgtacataaagcacctgaaatgccacactctcttaatgattctttttattttgtgggttgtagttctgatgccaacaatgaactaggttacaggaaaacaggatctcatcttactcacctttatatacccatcacctaatacacaccctgttacatagatacagctaatgtgtgtcaaatgaattgaaaaaagacagagaagggaagatacagaactcttagaaacaaagaagaaaagagaaatggagataagggagacaaagaagaaaagaaatttttttttttaatggaggaagaggaataatgtagaagaaagagaaaaaagaagcaaggaactttgctttggtgacaaccaggcagctcagtacagagctcccactcacagtgaaatctgtagttctatggatctcaccctgatataaagctgccagactgacagcaaagccacctttgcaaaattatgactgagacagtgaaagagatctaacttaactgattcgactccatcttgcttctaacctccaagctgtccttgttcattcttggctgtaggctgaactaactttgagagaaacttcgtttataatttgtagtttaaaacaaaaatgataacagctctttcccaaagcagatctccttcttgcctggggaccagactgcctttgtaggactaacattaatcacaagattagaaattatggtttgggagtcatgcagctggaggctacaagattctgaccctccctaaagtgctcctaaggtcagtgcttgagatattttgcagaccctgcacgtggtggatcagctggccccaccctgatcaataaactggctcatccaatcttgtggcccccatcaaggaactgactcagtgcaagaagacagtttcgactgcctattatttcatccctgaccaatcagctctcctggctcactggcttccccttacctcccaagttgtccttaaaaactctcctccctgaatgttctaggagactgatttgagtaataataaaaatccagtctcccacacagctggctctgtgtgaattactctttctctatggcaattccgctgtcttgagaaattggctctgtctaggcagcaggcaaagtgaaccccttgggtagttacaacatgtctgcctgagacctggatctgccgtaagtgccaaggcaggaggcaaccctgaggagggtcacagggatgtgtggaggattgaagagtagctcacaaccgtctgtcaccttttgggatgaaattaaaacaaaaccctctgcctagcctgacttcttcaagctccatctcatttgagcacctattcccaggcagtaagctctgtttgtcagagccacgccatcatcctgctgagcactagagagctcagcccatggccacctttagcagaaggtgaagttacgaagttagtgagggctcaggaaccatcccaccaaacagagaagtttgccccaaactacagaagaactagacgggattgattaatgaatgaatcagccaaacactccccttaactctttgcctacacacctggacattatcctctcccaggtgacctctaaggagtcagttgccttgatgaactaaaaatgggggcctggtatcagaatctataccttatgttagtagatctctgggtaaatagtgaattggctaaacgagctcattaaaagcagtgagcatgaaaaacgggagaagtttgggcagaagaacttgataacccagtgacatcagatgggaaggggccattctgagtataacatgctgtttgtcatgtgtcctgggaacagggttgggatggaaactagaatgaaaattaaagaacgattttgctagataccatgtggaacactgaggcacaatatcatggtcatggtgcccagtggccaaatacaacacccaaaagagagggatgttctctcccatagaatgccaaggagttctgtcatatgacagccccactgcatcatggtcaccaatcccagtgggagttgtggcacccaggagaccagcagcaatgcccagtgaggcaaggcgctatccaatgggaaatggtagttcctgagaactaccatcaacagccaaaaaagaattttgcaaaggagcaatctcttcaggacaggcagattgcaaggctttgcttccaatatcaccatgtaaagtgtctctgtgtggtttcatttcaggcattcctagaaggtaggaaacattgaagtccactgttgggcaaagactcagcgtacatcaagtgtgtttctgataacagggaatttttaggtggctcacaaatgagatgggatctagtgagacaataaaagatgtgataatatgcatcacacagggaacagggaacccaggaaaaagacatcctttacctaggctatgagataataccacttatctgactagaagtgctcactgctaggacaaaggccagagaagagtcaccatactagatattcaacaggaaatgtgcagtaagataaatatctactgctatagcttatatgtttttgtcccccactcgcccccaaagttatgctgaaacctaatcctcactgtaaggatacgagatggggcttttaggaggtgattaggtcatgagggtagagtccttataaatgggattagtgctcttataaaagagagtccagagagctcatttgcccctccaccatgtgaggatgtagcaagaagatgccatctatgaacaaggaagtgagccctttccagacaccagatttgctggggccttgaccttggactttcagcctgcagaactgtggggaataaatttttattttttataagcctgtctgtattagtctgttgttgcactgatattaggaactacctgagactgagttactgatgaagaaaagaggtttaattgactcatagttccatgggctgtacaggaagcatggctggggaagcctcaggaaacttacaatcatggcagaaggtgaagggaaaacaggcacaacttcacatggcagagcaggagagagagaaaatgaaggaggaagtgctacatgctttgaaacaaccagatcttgtgagaactcgctatctcaagaacagcaagggggaagtctgccccatgatccaatcacctcctatgaggctcttcctccaacactgaggattacaattcaacatgagatttgagtggggacacagacccaagccatatcattccacccctgacccttcccatagctcatgtccttttcacatttcaaaacaaaatcatgccttcccaacagtcccccagaatcttaactcattccagcattaactcaaaggtccaagtccaaagtctcatctgagacaaggcaagtcccttccgcctataagcctgtaaaatcgaaaacagttgcagttctttttggcgaccctatttttgaatgaggtgaggttttcctgcatcagatatttatgggagtttcatattgaagatgagccaggccttagttttaggcaagcaaaaatactccttagattctgagttttaagtattaatttttacagtgtaaaaaacagttgcagttctttttggcgaccccatttttgaatgaggtgaggttttcctgcatcagacatttatactgtatataagagactcttaaaacaaaggggtcgaaaactttgaaagtaaaatggtgggcaaacatatatgtactagataagtggaggaaaaaaagtgaagagagggatcattctcttatatcagataagataaatttaaggaaaacagtatcaaatgggatgtctcaagaagtgcttttataggctgggcacagtgactcacacctgtaatcccagcactttgggaggccgaggcgggcggatcacctgaggtcaggagtttgagaccagcctgaccaagatagtgaaaccccgtctctactaaaaatacaaaattagatgtgcatggtggcacatgcctgcaatcccagctacttggtaggctgaggcaggagaattgcttgaacctgggaggcggaggttgcagtgagccgagatcacgctactacactccagcctgggtggcagagtgaaaaaaaaagtgctttagagtgttaaagtatacaaataacaattaaaaatggtaattatgaatatttatgcatcaatatcaatattcataaacaaaaattgcaagagttataagaaaaaacagattaaaaatattttagtagaaagaggcttcatcactcttagtccaagaaattccaagtaaacaaaaatgaataaagaaggatacagaggacctaaataacataataacttgttgatgcattttataccaaattacacaccttgagggggaaaactcacctttcttctaggaaaccacggaagggaacagtcatgaaacttgatcactgccagacacagttgaccaagcctataatcccagcactttgggaggccagcacggatggatcacttaaggccaggagttcaagaccagcctggccaacatggtgaaaccccgtccctactaaaaatacaaaaattagccaggagtggtggtgcatgcatgtagtcccagctacttgggagactgaggcaggagaataacttgaacccggaaggcggaggttgtagtgagtcgagatcgtaccactgcactccagcctggacagcagagtgagactccctcacacacacaaaaaaagctgattacctattaggccacaagaaagcatcaataattttttaagcagagaaatactattaatagacaactttctctaataataaatatgaaaactagcaatataaagtttttaaaacaaaattctaccacctggaattttttttcccataagttatgggggtacaggtggtatttggttgcataagttctttagtggtgatttgtgagattttgatgcacccatcttccgagctgtatacactgcagcatatttgtagtcttttatccttcgtccctcttccactcttcccctcaagtccccaaagttcattgtatcattcttacgcctttgcatcctcatagcttagctcccacatatcagtgagaacatacgatgtttggttttccattcctgagttacttcacttagaataatagtccccaatctcatctaggtcactgcaaatgctgttaattcattcctttttatggctgcatagtattccatcatatatatatatatataccacagtttctttatccactctttgattgataggcatttgagttggttccatgattttgcaattgcgaattgtgcttctataaacatgagtgtgcaagtatctttttcgaataatgacttcttttcctctggatagacacccagtagtgggattgctggatcaaactgtagttccacttttagttctttaaggaatctccacactgttttccatagtggctctactagtttacattcccactagcagtgtagaagtgttccctgttcactgcatccacgccaacatctactgttttttgattttttgattatggccattcttgcaggagtaagatggtatcacattgtgattttgatttgcatttccctgatcattagtgatgttgagcattttttcatatgtttgttggacatttgtacatcttcttttgagaattgactattcatgtccttagcccacttttttggtgggattgtttgtttttttcttactgatttgtttgagttcattgcagattcttgttattagtcttttgtcagatgtatagattgtgaagattttctcccactctgtgggttgtctgtttactttgctgactgttccttttgccatgcaaaagctctttagtttaattgggtcccagctatttatctttgtttttattgcatttgcttttgggttcttggtcaggaaatccttgcctaagccaatgtctagaagggtttttccaatgttatcgtctagaatttttacactttcaggtcttaggtttaagtccttaatccatcttgagttgatttttgtataaggtgagagatgaggatccagtttcattctcctacatgcagctagccaattatcccagcatcatttgttgaaaaggaagtcctttccccactttacatttttgtttgctttgtcgaagatcagttggttggctgtaagtatttgggtttatttctgggttctctattctgcttcattggtctatgtgcctatttttataccagtaccatgctattttggtgactatggccttatagtatagtatgaaatcaggtaatgtgatgcctccagatttcctctttttgcttagtcttgctttggctatgcgggctcttttttggttccatatggattttagaactgttttttctaattctgtgaagaatgatggtattttgatgatgagtgcattgaatttgtagattgcttttggcagtatggtcattttcacaatattcattctacccatccatgagcatgggatatgtttccatttgtttgtgtcctctgtgatttctttcagcagtgtttcatagttttccttgcagaggtctttcaattcttttgttaggtatattcctaagtattttgtttaatagctattgtaaaagtggttgagttcttgatttgattctctgcttggtcgctgttgatatgtagaagagctactgatttgtgtacattaatcttgtatctggaaactttgctcaattcatttatcagttctaggagctttctggaggagtccttagggttctcaaggtaaaccatcatatcatcagaaaacaatgacagtttgactgcctctttatcaatttggatgccttttatttctttctcttgtctgattgctctggctagcacttccagtactatgctgaagaggagtggtgagagtggacatccttgtcttgttccagttctcagagggaatgctttgaacttttccccattcagtattatgttttctgtggttttgtcatagatggcttttattacgttaaggtatgtcctttgtatgtcgattttgctgagagttttaatcataaaggatgctggattttgtcaaatactttttctacatctattgagataatcacgtgatttttgtttttaattctgtttatgtcatgtatcacatttattgacttgcatacattaaaccatccctgcatccctggtgtgaaatccacttgatcatggtggattatctttttgatatgttgtttgctttgcttagctagtattttgttaaggattttagcatctatgttcatcaaggatattggtctgtagtttccttttttggttatattctttcctggttttgttattaggggtgatgctggattcagagaatgaatagggagggttccttctttctctctctcctggaacagttcaaaaggattggtatcaattctttgaatgtctggtagaattctactgtgaatccatctggttctaactttttttgttggtaatattgaagttaccatttcaatctcgctgcttgttactggtctgttctaggtatctaattcttcctgatttaagctaggagggttgtatttttctagaatttatctatctattctaggttttctagtttatgtgcataaaggtgttcatagtagccttgaatgatcttttgtatttcagtagtgtcagttgtaatatcttctgtttcatttcttaataaggttatttggattttctctcttcttttcttggttagccttgctaacagtctatcaattttatttatgttttcaaagaaccggctttttgtttcatttatcttttgtattttcttttgttccaatttcatttagttctgctctgatctgggttattttctttcttctgctgggtttgggtttggtttgttcttgtttctctagttccttgaggtgtgaccttagattgcctgtttgtgctctttcagactttttgatgtaggcatttagggctatgaactttcctcttaacacctcctttgctgtagcttagaggttttgataggttgtgtcattattgtcattcagatcaaataattttttaatttccatcttgatttcatttctgacccaatgctcattcaggagcaggttatttactttccatgtatttgcatgtttttgaaggttccttttggagttgatttcaagttttattccactgtggtgtgagagagtgcttgatataatttcaattttcttacatttattgaggctcattttatggcctatcatattctctatcttggagaaagttccatgcactgttgaatagaatgtgtattctgtggttgttccgtatatatctgttaagtccatttattccaaggtatagtttaaatccatggtttctttgttgactttcttgatgacctgtctagtgctgtcagtggagtattgaagtcccccactattattgtgttgctgtctatctcatttcttaggtctgctagtaatcattttataaatttgggagatccaacgtttgttaggtgcatatacatttaggattgtgatattttcctgttggacaaagccttttatcattatgtaattgtccctctctgtctcttttaatcactgttgctttaaaatttatttcatctgatataagaatagctacctctgctcacttttggtgtccatgtgcatgaaatgccttcttccacccctttactttaagtttatgtgagtccttatgtgttaggtgagtctcctgaaggcagcagatagtttgttggtgagttcttatccactctgtgtttctgtatctttcaagtggagcatttaggccatttacattaaatgttagtattgaaatgtgaggtaccattgctttcaacgtgccctttgttgctggtgtactttggggtttttcggtttttgtttttgctttttcacttgtatttttgtcttacaggtcctgtgtgatttatgctttaacgaggttctgttttgatgtgtttccaggatttgtttcaagatttagagctcctcttagcagttcttataatggtggcttggtaatggcaaattctctcagcatttgtttgtctgaaaatgactgtatctttccttcatatgtgatgcttagtttcaccgaatacaaaattcttggctgataattattatgtttgaggaggctgaagataggtcccccatcccttctagcttgtagggtttctgcaaagaaatctgctgttaatctgataggtttgcctttataggttacctgcatcttctgtctcacagctcttaagattctttccttcatcttaactttggataacctgataacaatgtgcctaggcaaagatcttttgcgatgaatttaccaggtgttctttgtgctttttgtatttagatgtctaggtctgtcgcaaggccggggaagttttcctcaattattccccccaatatgttttccaggcttttagaattctcttcttcctcaggagcactgattattcttaggtttcatcatttaacataaccccagacttcttggaggctttgttcatattttcttattttttttctttgttggattgggttaatttgaagactttgtcctcaggctctgaatttctttcttctgtttgttcaattctattgcggagactttccagagcattttgcatttctaaaagtgtgactaaagtttcctgaatttttttattgttttttctttaagctatctatttccttgaatatttctcccttcatttcttgtatcattttttggatttccttgcattgggcttcgcctttctctgatccttccctgattagcttaataactaaccacctgaattgtttttcaggtaaatcagggatttcttcttggtttggatccattgttgatgaagtagtatgattttagtggggggtgttgaagggccttgttttatcatattacctgggttggttttctggttccttctcatttggataggctctttcagagggaaggtctagggctgaagccttttgttcagtttcttttgtcccacagggtgttcccttgactctcccctttttcctatagatgtggcttcctgtgagacaaactgcagtgatatttgtctgggtctagccacccagcgagtctacccagctctgggctgatgcagggggttgtctgcacagagtcctgtgatttgaactgtctatggttctctcagccatggatacaagctcctgttccagtggaggtggccgatggtgcaatggactccatgagggtctttagctttggtggtttaatgctctatttttgtgctggttggcctcctgccaggaggtggcgcttttcagaaagcattagctgtagcagtgtggagagagactggcagtgggtgcagccctagaacactcaaggttatatgccctttgtcttctgctgcctgggtgggtagggaaggaccatcaggtgggggtgggcctaggcatgtctgagttcagactctccttgggtgggtcttgctgaagctgctgtggggaattgaggtgagattcccaggtcattggagttgtgtacctaggaggattatggctgcctctgctaagtcacacaggttgtctgggaagtggaggaaagctggtagccacaggcctcaccaggctcccatgcaaaccaaagggccagtctcactcctgccgtgctcccctcaacagctctaagtctgtttccaggtggaggacgagatatgcttgaaaacttgcccgaggctatccgtctcccagctgcgaaagaaaagggcttcagttcttcccctacctgtgaagtctgcgctccagattcccgccctcccctgagttctggccaggaggcttctcaccctgttcaagttgttacaaaattcagctagagaattccttcttcctgtggagttttattcactggtcctctggccaccctccctatggttccctgtggtgccaggcaggaatgggctgcttggggacccagcaagctcctgggacctttctgctgcttcctctacccctgtatttttgcttggctctctaacttgactcagctccaggtaaagttggaaacttctgcaaacagatcttcagcttctccagtgggggtgtgtgttcgggagaagagggtctccctttccctcttctgcggtacagtatttggggtgtctcccaggtcctacaggagcagttcgctttcttccgagggtctgtaggtcctctcgggattgctgtttctttcttgcagttgatctggagctaaaattcacaatgcaagcctctgcatgctgctctgtccagaacttcaatctagtcctgcctcccgtccgccatgatcccctctacctcccacctggaaattttgatttcacaatttttaaataattcttggataaaatggaaatttatcagaacctgtgggatataactatggaagtgttcagaggaaattctatggcctaaattcttacattaataaacaaaactaaaataattgaagtaagtatccaatgttagaatttagaaaaagagcaataaaaataaatagaaggaaagtagagggatggtattaataaagaaaaaggcagatattgaataaatccaaaatttttttaaaagtcagaattttttttttttttttttttttgagacagagtcttactctgttgcctaggctggagtccggtggtacgatcttggctcactgaaacctctgcctcccagcttcaagtgattctcctgcttcagcctccgagtagctgagcttacaggcacctgtcactatgcccagctaatttttgtatttttagtagcgatggggtttcaccctcttggtcagtctgttctcaaactcctgacctcaggcgatccacccaccttggcctcccaaagtgctgggattacaggtgtgagccaccacactcggccaaatgtcagaatatttttaaagggtccaaaagttggttctttgctgggcagtgttcaaagcaataaacttgctgtttttctaattttttttttttttttttttggtcagagtctcgctctgtcacccaggctggagtgcagtggcatgatcttggctcactgcaagctctgcctcccagtttcacaccattctcctacctcaggcctgccgagtagctgggactacaggcgcccacgaccacacccagctagtttttttctttgtattttttagtagagatggggtttcaccctgttagccaggatggtctccatctcctgaccttgtgatccgcctgcctcggcctcccaaagtgctgggagtacaggcgtaagccactgcgcccggcctgtttttctaatttttaaagaaaaaatttaattatataaatgagatataataaacgaaacaattacaggtagagattaacttaacaaaacaataaaataatactttactaaaccctgtgctactaaatttgaaaacctggatataatatataatgttctaataaaacaattttattaaaatataacttcccaaaattggtctaaatagctcagttactataaacttacttaaaactttttaaagacttgtcttccccaaaagactatgtcaagacagtttcacatgggactctttttccttttttgagacagggtctcagtatgttacccaggctggagtgcaggggcatggcatccctgctcactgcagcctctgacctcccaggctcaggtgatcctcccacctcagcctcccgagtagctgtgtgtgccaccacacctggctaatttttgtgttttttatagagatgaagttttgccatgttgcctagactggtctcaaactcctgggctcaagcgatccatctgcctgggcctcccaatgtgctgggattacagtcatgagccaccatgcccagctgggactatttctaagcctataaaaaacagataatctcagcggagcactgtagctcactgtaatcccagcactttgggagacccaggcaggcagatcacttgagttcgagaccagcctggccaacatggcaaaactctgtctctactaaaaataaaaaaattagccaggcgtggtgggcatgcctgtggtgccagctactctggaggctgagggaggagaattgcttaaacctggaggtggaggttgcagtgagccgacatggcgccactgtacctcagcctgggtgacagagcaacactctgtctcaaaaacaaaaaacaaacaaacaaaaaagacaggtagtcccaatgctatttggactgttcaagagcaggtatcacaaatccccaggccaccaaccggtacccatcagggcctgttaggaactgggctgcacagcaggaggtgagcggtgggtgagcaagcagtaaggccagagatctgcctgctctcagatcagtggcagcattagattctcgtaggagcacaaaccctagtgtgaactgtgcacgtgagggatcaatgttgcccgctccttatggtaatctaatgcctggtgatctgaggtggaacagtttcatcctgaaaccctccccccgccccccagcctgtctccagtctgtagaaaatttgtcttccatgaaaccagttcatggtgccaaaaacgttggggactgctgctttagaacataaaaaacagagtttccattttggaactacttctcccaataaaagattctatagagagaaacatatacaggaaatagttataaaattctgaagaaaatattagcaaagaattatattcaaaatcaatactacatgaccaaacatggtttattctaggaataaaagactggttcaatatcaggaaatctgttcgtataaattactatattagatactgatagataagtatcatcttaattatcatttccttagatactaaaaagccattagataaaattcaatacttgttctggataaaaaccttgaactataaaatatatataatatattttaactgtaaaatgatatatgcttaatatgataaaatattttttctcaatcctcaaactagcatttatattaaataagggtagattagaagcatcctcattaaagtcaaaactaagacacaaatgtgtctgtcatagtactagataacatttcatcttacaagcgcacaaaagcatatcagggtaacaatggaaaaaatataagttaaatatcttattctatgcataattatgtttttaaaagaaccaatgacagagtaaaatgtgtccaaaaataaactgcaatcaaactaactttcattactatgcatgaaagcatcctgtatgataatacatgataatgaaactttgctgttcacctgtttaaggttttaagggattaaaagatgttagaagtctaattggtgctggagcaattgcatatctgcaggtgatatgatttggctccgtgtccccacccaaatctcatcttgaattgtaatcctcatgtgtcaagcaagggacctggtgggaggtgattggatcatgggcagtttcccccatgctgttcttgtggcagtgagagagttctctcaagatctggttgataagtgtgtggcaatttcccctgcactcgctctctctctctctcgttctctctctctctcactgtctctcacctgctgccatgtaagacaagccttgcttccccttcaccttccaccatgattgtaagtgtcctgaggtccccccagccatgcagaattgtgagtcaattaaatctcctttctttataaattacctagtctcaggtagtacttttacagcagtgtgagaaagaactaatacagagaactggtactgggagtggggcactgctataaaaataacctgaaaatatggaagcagctttggaactgggtaacaggcagaggttagaatagtttggaggcctcagaagaagacagggaaataagggaaagtttggaacttcctagagacttgttgaatggttttgaccaaaatgctgatagtgaaatggacaatgaattccaggctgaagtggtctcagatggagatgaggaacttgttgggaactggagcaaatgttactgttgctatgctttagcaaagagactggtgacattttgctcctgtcctagatctgtggaactttgaacttgaaagagatgatttagggtatctgacagaggaaatttctaagcagcaaagcattcaagagttgatctgtcttttcctgaaagcatacagttatatgtgttcacaaagagatgatttgaatggaacttatatttaaaagggaagcagagcataaaagtttggaaaatttgcagcctgaccatgaggtagaaaagaaaaagccattttgtggggagaaattcaagccagctgcagaaatttgcataagtcaccaggatctgaatgttcatagccaagacagtggagcaaatgtctccatttccatgtcacagatcttcaaggcagcccctcccatcacaagcccagaggcctaggagggaaaaattgttttgtgggccaagctcaggaccctgctgctctgtgcagccttacaacttagtgtcctgtgtcccagctgctccagctccagctgggactaaaagggagcaaggtacagtttgggccatgtttcagagggtgcaggccccaagccttgccagcttccatgtggtgttgggcttgcgggtgcacagaagacaagagttgaggctgccaagttgaaatcttggcagcctctgcctagatttcagaggatgtatggaaacacctgcatgtccaggcagaagcctgcttcaggggtggagccctcatggagaacctctactagggcaatgcagaggggaaatgtggggttggagcccccacacagagtccccactggtgcactgcctagtgcagctgtgagaagagggccacctcagaccccagaatgatagagccatccacagcttgcaccttgtgcccggaatagctgcagacacttaacaccagcccgtgaaagcagccatgggggctgtatcctgcagtgtcacagaggtggagctgccaaaggcctcgggagcctatattttgcatcagcatgacctggatgggaaatatggagttaaaggagatcatcatgaagctttaagatttaatgactgccctgtttggattttggacttgcatggggcctgtagcccctttgttttggacgatttctcccatttggaatgggaacatttatcaaatacctgtacccccatgtaccttggaagtactaacttgcttttgattttacaggcttattggtggaagggagttgccttgtctcagatgagagtttggacttggacttttgagttaatgattgaatgagttaagaatttggggaactgttgggaaggcatgactggttttgaaatatgaaaagaacatgaaatttgggaggggccagggtggaatgatatggtctgggtctgtgtccccacccaaatctcatcttgaattgtaatccccacacgttgagggagggacctggtgggaggtgattggatcatgggggcagtttcctctacgctgttctcatgatagtgagtgatttctcatgggggtggtttctccaatgctgttctcatgatagtaagtgtttttacctgagatctggttgtttgataagtctggcaatttccctgagctctctctctcttgcctgtcttcaccttgtgaagaaggtacttgctttccctttgccctctgctatgattgtaagtttcctgaggcctcctcagccatgtggaactgtgagtcagttaaacctcctttctttataaattacccagtctcaggtagtatctttatagcagtgtgagaatagactaataaagcaggcaaaaaagtactcataccttatataacaattaactaaaaatggatcacagacttaaatgtaaaatatcaaactataatacttttaggaaaaaaagagaaaatctttaagagctagagctagacaaagagtcttaacactaaaaacatcactcgtaagagaaaagttgataaatgtaacttcacccgttaaaaacttttgctctgtgacagaccctgttaagagaatgaaaagacaagctacagaatgggagaaaatatctgtaaaacacatatctgacaaaggcctagcattttgaatatataaagagctctcaaaattcaatagtaaaaggaaacaaacatggtaatgaaaagagattttactgaagaggatacacaagattgcaaattggcaaatgaaaaaagatgttctatatcattagccattagggaaatgcaaattaaaactacaatgatatattgatatatacctagcaagattactaaaacaaagaagtgacaacatcaaattctggtgaggatgcaaagaatcactcatagtttactagtgggaaaaaaatgatatggccattctggaaatcagtttgtcagattctgaaaaattaagcatgcaactaccatatggcttaggaattacacttctgggcatttgtctcaaagaaataaagactcatgttcacacaaaaacctagacacaaattttatagcaactttattcataattagcccagatgttcttcaactgataatggttaaatacactgtggatattatggaatattattcagcaataaaaagacacaaactactgatacaggcaataaactggatgaatctccagagaattatgctgagcaaaaaaaaatgccaatcccaaaaggttacatgctatagttctcctttatattgcgatcttgaaaggacaagtttataaaaatggagaactaatggcatatgggaggagtggaagcaggtggaaagttgctgtgcctattaaagagcaccatgagggattcttatggtgatggaagagttctgtatcttgactgtaacaatgccaatatcctgatagtaatattattgtagagttttgcaagattttaccttttggagaaactgggcaaagggcacaaagaatctctgaactatttctctttctttctttttttagagacagggtctcactctgccaaccaagctggagtgcagtgatgtgattgtagctcactgctgcctcaaattcctggactcaagccaccctcccgcctcagcctcccaagtagctggattacagatgcacaccaccatgcctggttaactttcaattttttgtagatcagggtcttgctgtatgacccagactgtcttaaactcctgggctcaagagatcctcccaccttggccccccaaagcactgggtttataagcataagccaccacactcagcccctatactacttcttacaactgcaggtaaatctgcaattatctcaaaatgaaaagggtaagttttaaaaggctgattgctatactttggacgttcgtcccccaaactgcatattgaaatttgatccctaatgttagaggtggggcctgatgggaaatatttgggtcctgaggtttaaggtggatccctcgtgaatatattaatgccctctctgggggatggtgacttcgcactcttagtgctttcgtgatatggtttggctgtgcccaactcaaatctcatcgtgaattgtagttcccataatccccatgttgtgggagggacccagtgggagataatttaatcatggggcagttaaccctcatgctgttcttgttatagcgattgagttctcatgaggtctgatagttttatatggggtttttcccccttttgctcagcacttctccttgctgctgccatgtgaagaagaacatgtttgctccctcttccaccatgattgtaaattttgtgtggcctccccagccatggagaactgtgagtcaactaaactgctttcctttacaaattacccagtctccagtatgtctctattagcagtgtaaaaatggactaatacaccttgagagctgatatttaaaaagagcctccctctctactctctcttgcgtcttttgccatgtgatctctgcacaagttgctcccctttcccttgcaccatgagtgaaagcagtttgaggctctcactagatgtagatgtgggcaccatgcttcttatacagcctgtggaacatgagccagataaatctttcttcataaattatccatcctcaagtgttcgtttatagcaatgcaaataggccaaaacagtgatataaagataaggaggttttttgttgttgttgtcttcaaagttactgacaaggaatacaatggggtgttaagatttgacacacacattatttcaggaaaataaattttaaaatcatatcccaatgtcattatttgagcatcagctgtagttgggtagtaaagtgtaatatcaggcttttggcaactagttgcattgttcatcaacaacattaagtcaccaagcttaaaacatcacaacaatgaatttaatcaatgaacaatgaaatgttatcaagaccattcacaaaattaaaagcaggcctggcgtagtggctcaccccgtaatcccaacactttgggaggctgaggcaggtggatgaccaaaggtcaggagttcgagacgagcctggccaacatggtgaatccctgtatctactaaaaatacaaaaattagccaggcatgttggcatgcacctgtaatcccagctacttgggaagctaaagcatgagaattacttgaacctgggaggcggaggttgcagtgagattgtgccactgcactccagtatgggcgatagagactcctcaaagaaaaaaaaaacaactatatgaattaaagcttacattaacaacaaataagagtttgaatgtgttatcctgcatatggaaatcagataggtctttgaagaaaaactgcaacctccgcctcccaggttcaagcgcttctcctgcctcagctttctgagtagctaggactacaggcacgtaccaccacgtttgactaatttttgtatttttagtagaaacagggtttcatcatgttggccaggatagtctcgatctcctgacctggtgatccacccgcttcggcctcccaaagtgctgggattacaggcgtgagccactgcatccggccagaaaaacattttaaaatactttgtacactatttgaaatgactatggaatgcttgtttcaatcaataaaaaaaagaaatatgaaatgtgaaatgcttgtttcaatcaataaaaaaaagaaatgtgaaatgtaaaatttaataaaatttaaattttagatacatttaaaatgtcaaagtcctccttaagcttcaagaaaataaaatcaatctccttaaaatgaacaaattatgatgaattcgtcaaaaatatttatattgtgttaacctcatttaccaagacatttcaaatttacatctttgtgtctgttaaagacagatttagaaatacactaattttattcaaatacagtttttagttatgatgattagatttaaagatatgtgtgatcggtcagtttatgattatgtagaataacatgtcaatatttacaggataatgcaggtaggtaagacacctgttctactattgcatgatttcatgatttaactggtgtaattaggaaaggttttagatctaattcgaactgtcatatccacttttttttttttttttttttttttttttttttttttttgagatgcagtctcactctgttgcccaggctggagtacagctcattgcaacctctgcctccagggttcaaccgattctcgtgcctcagcctcctgagcagctgggattacaggcacccgccaccacgcctggctagtttttgtatttttgtagagacagggtttcatcatgttggccaggctggtctcgaactcctgacctgaagtaaaccacccaccttggcctcccgaaatgctgggaagatatacttctaataacagcatttccaactacattacttggttgaaacagttgaaactgccattgcagttgcagtaaaggtaacaagaggtaaacttctaatatgtaacaggagatttgacttttctcatatgtaacaggagatttgacttttcatctagaattagaaccaaaatcgttaaatttgtatagatatttgcattagcagaaatcccattttgttcatgttgtttttaaataaagtgactcgtttaaaatttagttgcattttaaaaatctgtgttatgggagtggtaatactgactccaggcagggaaatgagacaattgttagagacgcagggatggagctgagaggtcctcctggtctccaatggcccggcggtggctcgatgggagggagagcgccccctggaggcattggcggttcctggctcgtgtgctcgcgggaacccaagctgtgagcctctggccccgccagggcgtacgaatcctttcctcgtttatccagtattaagtcacgctgtgtgctaagtaccgtggccaggcagcagctagacaacgcgctgaggtaaaatagagaactaaggaagaatgggggaccccaaagtcaacttggtgacacatcacacgcaggagtcggacccacggctccccgagccacagctcagtggggcgggaccgcccgggcctgggcggggccggggcggggcctgtcacgggggaaatcaccgccctagcatccggggaaatcgcggtcttagcatccggcgcgcggcggttgaattgctgcgcccagcgaggcaaccgcctccgaacgccaggtgggggcgaggcgtctcggagtctcagagacaccaaggcccctgcgacaaggtggctgcagctaggccgggggcgtcaggacgacggagcgggttcgggtcggtgacacgcagacctgagggagctgggcccgccttttccgcccgcgccccaggcccttgcagatcgagatttgcgtcctagagtgggaaaaaagcagaggccagggcgccggtaagtaaaggttcctcctcacccgccgccagggcccggtccgcccaacgagcagggcggcgtgagggtcacgggctggaaacaacaatgccacagctcaagccgactccaacagtagtagcgtttttgtttgtttgtttgtttgtttgttttttgagacagggtctccctccgtcgcccaggctggagtgcagtggtgtgatctcggctcactgcaacctccgcctccggattcaagcgattctcccgccttagcctcctgagtagctggggttacaggcgcgcgccaccacactcggctaatttttgtatttttagtaaagacgggtttcaccatattggtcacaccagtctcgaactcccgacctcaggtgatccgcccgcctcggcctcccaaagtgctgggattacaggcgtgaggcactgctcctggcctacagtagtggcttctggaggccactcaggcaccccctgtttctagcttagagaaggaggaaatcgacaataaagtagccttaaagggatccatgttccgccctgccacctcttcagatgtcagcgttgtccaactagtgtccctagaattacccaggatgtgagtggcactgattcatcagtggtttaatcagcaaaaccaagtgtcttacctatctgcctcatctgctcactgcctctttccaaggcgttctcacaggcgcaaacactttcttttcctccattaattccagtaggtaagattttgcagtctcctttaaggtccccgtttctcaaagatagcccaaggaatctcgccacttccttgccttttacacatctggattcatccagagacataaaccctgaccaggactagcttcaaaagggtcccacccgtgcagtcacatagggctcagaagggccctgtacttactttcttgctctgctatggcaatcttgaaattcttaatttttaaaccagcacccgcctcccctccccgccacctccacaacattttcattttgcactgggcctggccttaattctcaattttctcaaaggctgtcatgtaactatataaaaatatagttaaaagagtttcttctctagacatgtctttagtcactaggacatcaagagacaggacggatgcttctattaactgagagttgttggaatcataaaggctttgtaatccaatagtcaccctccacgccttctcaatttcagaacctaagagagtttgcttagagaaagaacctgagaggttgtaaagctgagctgaccaaagctcattgaatcacatgtagctattcagcacttgaaatgtggctggtctgaaaaaagatgtgctacaaatgttaaaacgcacaccagcttttaaagtctctttttttcctttttttttttttttgagacggagtatccttctgtcgctggagtgcagtggcgcaatcctggctcactgcaacttctgctgcctgggttcaagtgattctcccgtctcagcctcccgagtagctgggattgtggtagctgtgcctgccaccacacccggctaatttttgtatttttagtaaagacggggtttcaccatgttggccatggttggccaggctggtctcgaattcctgacctcagatgatctgcccgcatcagcctcccaaagtgctgggattgcaggcgtgagccaccgcacccggccaatttttctttttcttttttgaagacggagtcttactctgttgcccaggctggagtgcagtggtgcaacctcggctcactgcagcctccgcctcccgggttcaggtgatcctcctgcctcacctccccaagtagctgggactacaggcatgtgccaccacgctgtctaattattttgtatttttagtagagacggggtttcaccatgttggccaggctggtctggaactcctgacctcaggtgatcctgagcattttggcctcccaaaatgctgggattacaggtgtgagccactgcacctgacacttttttttttttttttttttttttttgaggaagagtgttgttctgttgcccaagctggagtgcattgactcaatcatgactcactacaacctcatctcctcggctcaagccatcctcttgctgcctcagcctcccgatcacaggcatgcaccaccatgcccagctaatttttaaatttttttgtagagatgaggtctcactatgagaaacatactcgggctgatctcaaactcctgagttgaagcaatcctctcgcctcccaaaatgttaggattacaagtgtgagccactgcactcagcctaaagtctcctttttaatttaaaatattttatccacctttatattaattacatgcttaaatggtattttaaataaatcagattaaataaaatatattcaaattaattttacctgttcctatttattttttaacatgactcagaaaattttaaattgtaactatatgtggggctcacattatatttctttgggaaaacactattacaaaagttttgagatattggaaacttcttataatgttcagaaaaactgccttccccaccacccaccccacccaaaaaactactcacattgactcttatctcccagaaaataccactacctactcttatcctatgcgatccatatcaaacaaccttactaacccagcttaactcaaaggccttggcagttaaagaaccacagcctaattacagatggtctagggctgcagagaaaggctcaaacttccctcagctgttgcattagaaccaactcagttgctggcagacctatctctactgctttggctgtttgattgtccagttttgcataagtgaactgtaaaactatagagaaaggaagaaagatgtcatcagggagggtggtcacctcaccaaccttcactcctaattatattgttacaaactctggcactgcagcatccttgggctgacttctttttgtcagtcacaccactttaaaaagtaattagctttagtgaagaaattgccgatgctctagtctgaagtgtagatagggacagaaaattacctgtaaatttaagctttcacttgagcagtctccattagttatggaatataaaatgggcagactccaatatctcgatctttagtgttttgaatggctctcaaaagcagtgtgatgagggaagatgttagctttacatcagtgtgtactggatgcagtcctaatccagtcctcctagagcctctagttccatggaaagagttcttagtctgttagttcacatgagtgccaattgttcaaaagaacctggcatctctcttgctctgtctctcgccatgcggcatgcctgctcctcctacaccttctaccaagagttaaagcatcagatgcctagcagatgctggtgccatgcttgtaccacctgcaaaaccataagccaaataaaactcgttataagttgcccagcctcaggtattcctttatagcaaggcaaaatggatcaacacacttggtttatgtcttcctttggaaagataaggctgtttgtgagctacctcacccacgagtgtgttttgcctattcactgcttacccgtctgtattagtctttcatgctgctgataaagacatacccgagactgggcaatttacaaaagaaggaggtttattgcgcttacggtaccacatggctggggaggcctcacaattatggcagaaagcaaggaggagcaagtcacatcttacatggatgacagcaggcaaacagagagcttgtgcagggagacttccatttttaaagccatcagagctcatgagacttattcactatcacaagaacagcacgggaaagacccgccctcatgattcaatcacctcccactgggttcctcccacgacacgtgggagttgtggaagttacaattcaagatgagatttgggtggggacacagccaaacgatattaccgtcccatcatgaggctcagtctcagctatgcttctgaactgctttgcctcaggagccacagtatttgacaaagccttagaagctggatctccaccccagtagacacctgcaggtgactgaaatgagattgccccatcagggtgggaggatctaccatcacacagccatgtaatttcttaagaatttaagaaagctttaagcgaaaaagccttggcaagttgagttgggaaagaatgtctaccactggctcaaattactgcctttctgaggcttccctttcacccaacatgcaaaggtcactcttacgtgcaacagcacctttcaactgatcaggtcagcactgtgagatagaattgaggtgtgaacaccacagaatgcaaaatatttgggaatccctggaagcataacagaggtgggaactgggagttgaagctcaagcattcctcctggcactgagaaaggcttggtcttgtcctgatctctggcttttggtagtgaagccatttgggcctgtagttttgttacaagatttttaactacacaattcaacatttttaatagacatagaactacttaggttatgcacttacatgagctttggtggtacccatctcataaggaatcggtccatttccttacaagacttcgatgactaagttgactttatgggcatacaataatttgtgatattattctatccatttaatgtcctgagacctgtagcattgtcccctttttcattgcagatgttggtaatttgtgtcttctttttttttttttttttttatcagtcaggctaaagtagtttgggcactactgacattttgggctggataattctttgtcgtatgaggctcacctgtacgttataggatgttcagcagcatccctggcctccaccctctagatctagcagcactcctccagtggtgacaaccaaaaatatctccagatactgccaaatgtctccagaaaggcagaattgcccctagttgtataccactgctttagactactttatctctgttactatgttttctgtttcaagcatattcatttaatgtaaacattttttttctctgctgaaattcccctctggtcattcatgttgctgtctatttttttccactagaaccttcaatatatatgattaatatattaatcaaatatattttaagttccatctctcttagttctaacacttaggttatctgagagtgtggttctgttgattactttccctcttcacaatgagttgtttttttctttttcatgctcataatattttatcaaatgccaagcatcttgtgtaggacagtaggggttgagataatctatgccccaaaataagcatgctttttctgctaggtcagtaatgtggggtcttgaatcagcttactcagtagttaagctgggtttgggttttattggtccatcttcagtacactaccaggttcgatttcctctaatattaccttttgcttagggtagcgtgctagagggattttctcaatatcctatttcattctcagcttgcagccttcccaatgagcctataccacacaggagtctctctccatgcttttgcctttcaccctgcttgttacttggtgcttgctatcttggtagaggacgccagaagacttggtcatcctggtccaacctcagtcttgggtaaggaaaggtctgggcagattttttgccttttccacagtaagagcttacttccctgtattagtctgttttcacactgctataaagagctacccaagactgggtaatgtataaattaccagttccacatggctggggaggcctcaggatacttacaatctggcagaaggcaaaggggaagcaaagcacgtcttagatggtggcaggaaagagagtgaagggggaagtgccacttttaaaccatcagatctcatgagaactccctcactgtcacaagaacagcacgggggaaaccacccacatgatccaatcacctcctaccaggtccctccctcaacaggtggggattacaatttgagatgagatttgggtggggacacaaagccaaaccatatcttcccctaatagatcttcaccaccgaggaggctctctctagtctcctgccttgtcccaagtcttttccatcagtacccagtagagatcatggaagagagactgaaagtggaagcaaactgtctttatgtctgaggctcccaggggttttatactcttatgctggtccacacttgacctttagcagttcattaacaattttagctgaattc

SEQ ID NO: 40 - DNA, 207835 bp, Homo sapiens; identical to SEQ ID NO: 39

SEQ ID NO: 41 - DNA, 181172 bp, Homo sapiens
gaattctttatcataaccatgtagaaacttgtgttgttccaaaagcttaggctctttttaaagggactttgttttcaccatcagcttcattcagtcattaaaaaaataatgcactaagttcctgttacctgctgggactggtcttaagtggtagagaggggattgcaaagatgaataacacacagtccctgtccttggggaggttaggtccagtgggaagtagcaggggatatttcaggtgttagaggagtgaatcagttgttacacagaaacagaagaggcaaggactgcatctgcttgggaggtggttgggcacagggatggggccctgagagaatgggtcactttttagatggatgacaaacactgagtaggattgaggcagtcaaagccccaggaagagtgatcctaggatgcgtggaggtgtgtgaatatgtgcagatgctgccacgttccgagaaacgcagcattgctccaaacagctagtgtgccgcaggggcgcacaggccaagccaaagggtatctgcccggtgtggggactcgggctcaagccacaggcagtggggagctcccaggggatttcccagaggggagggatggggtcgaaatcgttatttagagagatccttttggcagagctgtagaagatgtcttgaactggggttggggggtgagacaattcccagtgacgcccagagaacagttcagggaaaaaaaatgagccctctagcaagaagcttatcaggaatagagagggttggtccgggaccaccagagtgagtgacacggccaggttcctgattgggacagtgagtggattgtgatactgcacattggaatgtaaggtcacgttaccaattttggtgttgggtgatcagaggtttggttttggtagagttaagctgaagtacttacgggaaacccagatgcagatgtccaggatggagcttgaagttcaggtctggtctgaggacttgcgaatcccaatgagtcaggagttattcatttattttctgctttgatgacaatatccattgatacggttataatccaagttggtgttttaaggcgcaatttttactcagctgtactccgtttcctttatttggttttcttttctcttgttttccatcacaatagcaacttttactttccaaagtcttctgtgaaaggtaagggacccaaaaatgccttttgcttccatcaagattctctcaaacagttgagatttttcatgtaaattttctgccagcatgaaaacaaaagattctagaatcatcacttgctttggtagcttttttttttttttttagcttttcctctgcttctattaaaataataataagactttttaaaattcctaatatggtcattaaaacagaattcactaattattcttatcagctcacttacagtgtatacagaaaataaacagaatcaatattcttcccctgcactcccccgccccggtccccaagacaggtgcagatcgggctggagcatagtggcacagtcatagctcactgcagccttcccctgggctcaagcgatcttcccacctcagcctcccaagtagctaggactacaggcgtacaccaccacacctggctaatttttttttttaaccttttgtagagatgggtcctcactatgtttcccaggttgggcccgaactcctggcttcaagtgatcctcctgcctcagccccccaaagtattgggattacaggcatgagccactgctcctggccaccctttacttttcaaataattttcttcttctttttttttttttttgttttttactaacctagatatccaaaaactctggagaacctactctccctagtgtgccccaccccccgtacctttcatgtgagtccattgcactctctctccctccactccaccctagtacacacacaggaatccgtaaggtctttttaattatgcacagttacaaacaccaagtgatctaaggcagctgttgtgtattatcacctacacaagtaatggtatagatagcattgaacagtcttgtgcacattaactcacttggaagaaagcaaaccaccttttgccagtgtgaccaaacagaaaccatgctctgtaatcttcctctgctgtatctaattctcttttttggactgcctaagctgctttgatttttgtgtgcatatgagtgacgcatgtaatagattattcatttgttcaatgcaggattcttaattgaaagcagtttttcaacaccataagtaaagagaaaagtatttgaaatgagaaaaaaaatcgtgtgtgtgtttgttagccttttgggaaactaagactttttaaatgctttttttcaactaaatgaaaatcaagatcaagttataaatccttaaaagaacaggggtttataattcccattttagcaagttatttgcccaaaacagtatgaatagatggtttatctttagttgtgcatttttgattgagtgtttttaactaaacagtatgtgaggggggttgccatatagactgtagttacctgctaactctgaaatactaatttgtctttagaacacagggtgggggactggacagcttttgaagaatccagaaatacttccttccaaaactttctttacatagaatagatttgaactaatgttctgattttttttttttttttttaacattttcagatagcaaaattactcagtgggaagacccaagactgcagaacccagctattactggtccggtcagtattttcaaattctgcctcttcagtataagattttggttacgtgtttacgtgtttcttgtgtattactgataacggtgatgtcaagggacaacggtgattgagtagttgactagaaacagagcactttgctgccatctccttactgaagtttccaggtgaggtacagctgcatgtgccttttcagatggatttcattataaaggaaaacagcttgataacgacagcagaattaaacatttttcttctcctttataaaagggtggactataagtatagtcaaaattccctcccttcctttttatatgaagcaaaaccaagccctatcttcataaagtgttatcatttctttaggccaggagtagtaaatgtatgccaaaagtttaaatcttttacaactttcaaaaatctgtagaagtttgggtgagattatagctaagttcaggagctggcagagttaagagtttggaactctgccgacccacagtgttctcatggtcccctcatatatgccgggtggaaaaagaatcaattctgatgcaggcgtgatgacctcttaaaacaccgtagcacactgtgttcataaggcagtgtgagaaccccactccctgaagcatcaggagacatttggtatctcacacttgttaacaagtctgtagaatgggaccacactcatcagcagagagcacaccaccagcttttgtcagtggctatacgagtgcagggaggtaatttggaattacaggagttgtactgcgatcagcagaagattgcaaatttgggattcttagaccagaggagcaaaaggaactgaagtttgttatatcacatgctgagctaagaggccagtaggtagatttaaaattccaatttcatggctttaatctgattccattcaaattatgttttgaattagtaagatacatccatttgaaaacttaaaagatactacattgcaaatgtgccccggtaactgactcctgttagttacttgttggatttgtttagtcatttgggtactatttcctaggcaaagtgcccagtagtacctgggtaaaaacagtcaacttttttctctatgcggcttaaacactgccttactctgatgcttccttttgatatatatatattcgcagtcacagttgtttattggaatattattttctcttctacatcattagaacaaggtaaattcaagaaactattctttttaagtgacagaagacttttgacataactttgaagccttttcaaaatatttttatcacttatcaattaccggccgtcactcaaacactgctagtccttattaaatcttactgaaaattgctcagcatcataaagccaagtagatttgcccccaagaaagagctctctgctttctgttaataaaagacccttgtttattccttcatttttattattattattcattatattgctttcaatagaggagaatctgtatttaggtagttatcaacttagtgtagacatttggcctttgttgtcattcagttctaaatatttggcaattttcatttgatttttcttcttgacttatacattatttaaaatatgctttttagtttctaagagtatgggagggttgtgcctattcatttttttttattgatttctaattttattgcattatggtcagataatattgtctagagaatatttattattggatgtttatttaaaacttcattggaagcttgatcactttttgtaaatgttctttttctttttaaaaagaatgtgtattgtgtctttggttgaatatagagttctttttgtgtccattaggtcaagcctgtggtgttcaaattatctacattctcattgctattttgctattggatctaatcaagatagttctgtcagtctctgtggtgactgttgccctgtcgatgttgtctgaggtgtatataactacattctctttctctgttcgtatttgctgtttagcatatcttttctctctcgcgatattttatcttctttcttgccttttgttcaattgatagagtactctctattttattttctctatgtgcttgcaggctgtactttctatttgtattcttatagctctcacattaaactgtgtaacccacatacttgacttagggttaaaatgaatcactgtctactctccttaacatcaggacctcagggaacttgaatgccattcttcccactcccatttgccacgtcattgttgggtggaattttaaaactaccttgctttaaactttcctaatagtcaaatagtcattaatatgttttatcttttttctccctactgtccatactgatttaattttaccaaatgtagacaaatttctttgcccaccattggtttgcccaccattggttcttccatccattttttttctggggtgagttttgatcttagtgaagcctagtccagtttatggttcttactgtgtggtctgctgaccagagtatcagtatcgcctgagagcttgttggaaatgcaagttttcaggtcctaccccagacctactgaatcagcacctctgggggtgggacaccagtctttgttttaactgctctcccagggattccagtgccccctcaggtttgagcacttctgcccagcagcactgccagtgacagtctgagagtggtaatatctcttagtctttgactcaaaaggtctcatttgacctctctgaagttcagctgatgatagaaatcttggttaaattattttccctcagtgctttggagattctcctgcatgtcttctggcctccataaatgatgataacaggtttgctgtcaatctcattgtcgtttctgtgtaggtaaatggctctgttctctagtgattttgaatttttatttgtgtcttagatgttttacaatttcgctatcatcatgtacctatgtgtggagttctcttcatttatcttgctttggactcaggcttcttcagtatggggattgtgtctttcctctgttctggaaaattctcagctattatttcttaacatactgcatttttccgattctctctaagtatctgtttctgtaactcctattggacatttacttctctttcacattgtctgctttatctcttaacttttgtgttttctgtctctcactgctgtattgtgagttattacttagctcttccagttaattctttaagctttttttgtaatctctttatcagttcattgtgtttattatttcagtgactaaatttaattgctcaaagttttatttggtcgtttaaaatttgcttttgtcttcatagttattttgtcctgttctctttatctctttatttatttttgatgctttcatctgcttattatttttaagatatttatttcttagcctctttgagattattctattatctctggtcctaggatcattaaatctcccactacgtctgtagactctccttaagagtgtagattattgcctagttcagtttataatttgtgtgtgtgtgtgtgtgtgtgtgtgtgtgtacatgcatgcaagagggagagagagagcatgagcaagctcatttttttttcctatgaggcttttgtaagtcctgacctgtatttactgttaacttcttagcttgggttcatgcacccccagtcagtataactgtggacctcatacccactttggcacaggcttggagtatggatttattacaggtctgtttctttttgtttttctcccatttatggtcctggacagaaggtaagcttccttgcaacttccctggtccggtgggtagagttttcttgtcccctttccagatgttaggttttaaacaatgactgttctttctccatcatgtagaccaaaggccaagttctgtgtccccatgggagattaaaacccaagcccctatgtctaggtccagtgcccactgatttctctaattgtgagtctttctgcttacctagtacctagagtttctcttcccaagttttaaaaatatcagttctaagtaggcctagcgtttctacatatttttagggagaggggaccctttctgtggcagctcagtgttcagcattcctgtaagttagcatgctctgtgtatagcagatatcactagtaatagcatttagtaagtgatgttcacacatgctgctgtcatgaacactatctcatgttgtgtaacactttcatttttccaagaactttataatcagccgacttgaaactcacagtcgtcccctcagaaaggcagggcaaatgttgttatttccaatttgtcagaagctcagaaagcttattctgttgctgacagtccttgcaagggtcagaatcaggaccggagccccagatgcgctggtgtcactgatgtccccgtgccgggcatgagcccttctgtgcaaggagctccaatgtctcccggccagtgatgatgtgaaaacatttagaaccgacctacacaataaggcagattttcattctgtacccaaaacaggaacacagatttaatgcagagcaaaagggctttaatcaacagatatgttcatttttcacgtagacctattttacaagctaacttgtaagccagaaaatgacattcgagattttcaagtgagaacaaatgatttggtccaataattaaaaaaaaaaaaatgtacgtgtaatctcttcagaagctgcactggaaggatgtttgtcctggtacgttgttggaaagttttcaggaagagaatgtaaaaacttgctcttcttattctatcatgagaactacctctggagagaaaagataatgaatgcaagaggaagacagtgatttttcagctttcacgcatcattccccagaaggagaaaggcttgaaatatctcaacatttccgcccacacctcctcagcccctgccaggagacagagcaggcaagggaacgggcatcataggctgggggccacatgttgaaatctgctccttggggaatttgtcatttaagacagtcgaacttgcatacacagtgatgactgtttaagctttttttccaacattttcaggagtagggggaactgtgatgtaacagtgatgtttggagaaccctcacgaatacaggaacaaacaaaaaatagttgctgggaatcacagactttcagaaatagaagagctgagtcacgtttgttcatccagtcaaattcttccacttaacagtgaagaaactccttagtagagaggatgtgatgcagagccagctgatgagagtctacccgagagtgcaggccttctaacgctggcaggagagagtggaaggaagtcacttttttagttcctatggggtcatttttttcctcatggcactaccacggtttattcattgatttcctattgcctgttgctctcaacagcttgtgagctccaggagggaactgggaaagctacctttggtttatgtactgttatttttctggcacctaaaatgccttgcacagagtaggtgctcaagaagtatcggttgaatggacgagaatgaacaccagaaagtgagaaataaactagagaggaaatcttagtttgtgacgggatgtactgttggtagagcagaaaacatgatctctttattggcttatgtcagaacattgtattctttttcttattttggtggttgtccaggtattaacaaatttataccttgcctagactcagaattgctatgtggtttcatcagactaaacactgcctaaaataaataggatgtgaggtcaaatctgttgttcagtggaaaatcaaagaagactggcttaaaaactaagaaaagaccataggcagtgtaaattgtctatagattgctcctaagctatataaagatgatgtattttttgctctggaattacagagcaaaacactgacgtgctcattttctggaagagtggttgtttgttttgtttcgggttttttatataaacatgtcttaaaactataaaagagggaagttcatgttcttcatttcttctgtttctggtcaagataagtatggtgaaagtgtaaggtttggagtctggagatactagactaaggatcagtatattttattaacttaggccgaaatgataacagcagaagtattctctgctgaaattcatactagtggctaaaaagcaatgagttgttttcgaggctgtcatagttaatgtctgtgtatatgcaaaacccaatcctttttgctcataaaaatatcgtaagctttttcagtagccaaaactcacggccctgactctaagatattgtaagctactttacaaggtagcaaataaagattatttaaatgactacattaacatgttactcctttgcctgaagagatatcacaacttttgaatgactatagttaactcaattcctgagccctcaactggggtactatcactctatttcatagataaagcatttgagatttaaagaaatccttgcccaagaccactaaatattaagggacaaaccttctgacttctaaattgaggattttttgagaatgccatctgcctgattttatattccttgataggagtgtcagttcacttccctttctgctcgttgtatttccccacaaaaattcgttaaaccgtaattagacttttcaaaatgccaacgtaggtcattctgggttgtatgttagaagtatttagccaataactcttacctaaaccacagcaaaaaagaaaaacagaaacaccctgactcatattctgacaaaagtcacttggaaagcatgtttagtttgtgtagcgtaccccaaatggtttctcaaatagcagtatagctgttttcaggggtgaaagctgcattcaaagctgattagccctcatcagttctaggactttcccctgtgctgtgtagacattatctaatttttccatggataatctgagaagtgagaatttacggtttatgactcatgaaattctcttgaatgttgcctcagtatacataaaatttcaggtgtattgtttgcattatctatatttataaatttatcttccaggctgtcccttactccagagaatttaagcagaaatatgactacttcaggaagaaattaaagaaacctgtgagtaatcatgccttccaaaaatgctttgtgttagtcatttgtaagttaccacagtcacttcagtgagaacaacttggttgttacttttatatgaatgctaaaaatattaccttccttttctctctgcactttgatcctcctggttctaaaatctgaattttctttttaacagaaatggtaagtgaaaattaactcagtgttacatatcaaatcacctgaagggtaatttcctatgtaatacataaaaagacaggaatgatttttatgggatataaaataattcagaaccctagtcacaaaatctgtggaagcctattcaattatgcgcagttatcatatttaattaacctggatcccggtaagaaaaatgttcaagtccttccttgtaaatgcaaaagcttagtttcaactacagtatttataatatagtgttatatttaattataataattggcagtattacgtccaaatgtaattttctacttataattatccctggcagtttaaaacctagaaactctaaaaatttttatgggcaacattttaaattataacattgcattttctaatgacacaccatccccaaattgttcaacattgcatcctctgttttactttccgattcctccttagcagttttctcttcaattttctccatcactatggttacacctctagggaggggagagaagcggctgcagctcagaccccctctggtggcctgggctccattgccatctctccctgcctcctcccctcagctggttcctcctgcccgggaacatctctggatggggcacaatgtctgctctcatttaggggttttggtctctgttccaaagtcctgattcaagagcttgcgggtaactgctattgaaatgattctttgccttcaaaactcaaatgatcactgaaaattccacagttttctttgtgagtcatgtcccctggtaatgatgatgactgtggtcatcacccagtctcactctatggctctcacatagcagtgtctgctacccggaaaccatctctgcacattcattcttacagccagaccaagcctggaccgcctctttgcaggaggcagttgccacaaccttggtcaagtgttttgttattttcatgtcagcgaaccatgctttgggctgctttccccacacttggcataatcaggatcccactccccatggcaacaaaatggacttgaggcagcgtggattatatctaccacctggcggccctgccacagttgagcatggataggcccaacctggccaggtggggattattacaggttttgactacctgggctaaagtctcttgagtgaagcaacagatacagtcgactgcctttcggttgccctatgctggagaagtgcccacagttgtttattaaagggggcaaggaggatgttctccttcgcagcagagttctaactttcctgagcatcgctagtggatgccgtgtgtcccatcgtgacacagcaaggctttctgtctgcaagggaaaacccctaaaggagagaatctcagttggaaccatttgtcactgcctgtttctttgaggactgccaacttttctaccatttgctgttgtttttattagaaaacaaagtgtgtatttactgtatgattatgtgttttcttttgtcttttgtgtaggctgatatccccaataggtttgaaatgaaacttcacagaaataacatatttgaagagtcctatcggagaattatgtccgtgaaaagaccagatgtcctaaaagctagactgtggattgagtttgaatcagagaaaggtcttgactatgggggtgtggccagagaatggttcttcttactgtccaaagagatgttcaacccctactacggcctctttgagtactctgccacgtaagtatatggccacacccagtgtgtgtcccccactgagacagttgtatgaatttaaacagaatgaaaggataagcagctcatgagttcgagatgcattaactctgctgagtttgttctctcctcaccccacagccccttgcaagtctagaacaggttctgactctacgtggtgaaatagtgtactctgcgaacatctaacattgattttttttcttgtctattgggttcatggagttgaaattgaaaacgtggataattatgataaggaacaggaggcgattttcatttgcagtgttcaagaggaggacttgtcagtgttagaattcaaaaacaaaggaggtgttttttgaacaagagtcgtttctgaggtctcctgtgtaaaggcaaattgtaaggactttgaggacctaggaccatgccctgctcctgtaaggaaagaaccaggtttccccttgcattaggatttcatcattgccaggcttggaaactgaggcagactaaattgctttctgagcaattaaacatcagctacttccaggccagccattcctccttcagactctgaatcctccaagggttgggcagtacccaagcccccagtagaatagtcattgaccttgctgaagggcatttgtcatcactccagccctgggctctaaggggacgtgggttcccccacatctcccacctggtaccagtctcctgggggctcatttggaaggccgcctcagtacattcttcctggttgctctagccaagaattgcccaattgatttgttgttactgagtcccatgagaaagcccactatgtacaatgtatccaactattgaaggtggagggcagggtggagagagacaagatctttacctcttctccacattttcaaagatacccccaccccggaggaatcagtctgtgatcccagtttgaaaactactgatccacatgattgtgaaccaagcaagatcatttggacaaatctaaaaatttgcaggtttgcatcattgagagagccatatcctgttcctaatcccctcgaggccttttcagagcagagtagtggtcagaagacagaccaagggttgggcccatagcaaacatcttatggccaagccaaaagcctctggaaggaattaaacttccttcatcacagagacgacctaaagtactcacatctttgggaatccctgcacagcccctttattatgtggcgtttctcatctccccaagatatttggctgaaccatatgaaatagacacttcgtaggtcaaaaacagtcaaacatcagcgtctcttatggtttaattgactttagagggcacatgcgtcagcctccatggtgggtcacggttgagcatgtggtaagtcaggtcctctagcccacacattttcccactaggtacagaatgctcgcagggacactgtaaaagttgagtgacaggtggcaaacaaatatgcaaaatcttgcatttgaaagtgtgattgggcttttcttctctttctcctcaaaagggacaactacacccttcagatcaaccctaattcaggcctctgtaatgaggatcatttgtcctacttcacttttattggaagagttgctggtctggccgtatttcatgggaagctcttagatggtaagtcttgaagtaataaaaataggtcagtgctgcttgcggtttgctagtaggtgtcttatctttcgcatcatgggtttttaagcaaaagcttcactggtttactcataaagtatttttatgttttgcccataatggatgtccttttctctggtagcttattttgggcactgaagacatagtgtctacacacagttaaaaacaaaagtttttttttaacttcagtgtaaaacacagaacattatgtatttatacatttgtatgttttctggaataactttagtgaaagcaagatttgataacagatggaaaaactaattgaaaagttaattaaaatgatctcatctatctaatatcctgtgattattgcgtttgtccccaaattattttttaatttgaagggactaaataatttcaaaataatgttactgcttagctaagacattaaccctgaaacaaataacacaaaataatttcattcttatttaaagcatatagatcatggaagaatttcaaggtaccttgaaagttagaagtcaaaccctctacctggcggtatctataggcttagagacttctaaaagatttggccaattcaaaatagtgtccttaagaaaacactacagaaatcatcagtgagaaaaaagcatcagaaatactttttaagagcctggaggtagagtggttgaggatgggaagagggagagtaggatttgagattgacattgcagtaacttataagaaagatatttccaagggaactgtgttcattgcatttatagagccttagctattctaataaataatttgtataccctctgtacttttcccatgaatatgtttttactgttaattggtagctgatattgatgctctgattttgttgctttatttggtagcagggcgacagtaaacactttttttcctctagaaggaaactaaaccacacactctttccatgtatgtatagtgtgaatatattttaatttccagctttggagtcatgccatagattgtttcagcctgctccaattcactccaactttctcagaaggtcagtttagtcaccgtatgcaagtgagaagatgctgttagttgctacagtgtctttaataccctctctaacagggggtaatagagaagcataagatatgatcctgaccttagtcagcttatattttagcggggggaaaagagatgagaacaaaaccagaagaatcacagtgatagtgtctgagcagaagggagtgcattgagtcctcagaggagaaagtgacttggctggaggctcagggaatctttcccaggatgagctgcacctcggaggtggggtagcatttgagcgttcaaaggctggggtcatttcagatgagtgaggaccagcccagagtcaaggccttgtggaagaagatgggcggaagcaggaaccactcagggtctcaaggagctggctaaagtgaccccgacaagagtgatcacgatataaacctggaattgcacatttaagagtccaagtgcacatagatgggcctagtcagcagtgtcttcaaatttcccacagatgggaatgtccctgtcggcagggctcattctgcacatctgtccgatgggaatgtccctgtcggcagggctcattctgcacatctgtccgctgctccccctggtcggcttcatgcttttacttccccagacactggagtctattggagcctgcatagggccacgctgagccggggagaattggcctgtactgcagagggtgggtgcctggtggggggatgaaggagcagaagcaggagcctggggtgccaggtctggtggggtcaggaccccctgtgaggaggtgcgtgatgcctttggatcaggtgaaatggaggcacctgcaggacgcctgaatggtgggaggccgacctcgctgctgttgcctccctgaggcctctgccgtccctccgcggggggttgcacaggccctctccggggccttccccatttccagcctgtccccttcctgtgctttctccccatcgctgcccaagcaatgataacagaagacagatggaatttcacctggcctttcactgactccccactgccctcagagagcaccccaactctccagcaccccatgtgggctctgcactgccggccccttctctggcctgtctacccgccctggcaaacggctggcaagtccccagccttgttcctctgcttagtgtgcccttttctcccccaattcctacgcctgatttgcactgcggactctgcttgaccttgaagctcatctgtcacctcccagaggcctttctggccccactctgctgcgccatctctcttagcacagctgccctcctcatgccactctccccctgatctcgcctcctcgcttgtgcaatactgtagaaggcccttggttactccttcatggtttctcatttacattgaaagcaggttaatcttttctttcatgctctgatacatagcagtgtcaaagacctgaaactaaacccagtgtttaccgtgttttaggtttcttcattagaccattttacaagatgatgttgggaaagcagataaccctgaatgacatggaatctgtggtaagtaaatgcacgtcacacactggccatcaccgggcactcgtgtcttatgagaaggtattggagagccatatttgtagtctcagccacttttatgggtgttgcattccatgtgaacaacaggagacatttaattgcttgaaaagttcattgatctaattcttgtaataaatcattgttcacatttcctggaaccatggtacctagggtggatacatccaaatcccagttgcctctgcttacccggcataggacttgtgtgaacttactaaatccaagagacagctgaagatctatggtagcctgtgttttctataaaaactgctgctgctgaatgtttagagcttcatccgctctccctctgtttcctgacatcataaaaatggcagaggcaaaggtcaaaacaataggaagagtatcaggcagacgtcctagacatggatgagtgacgccacagctcaggcaagtgaacacttgagacgttctccaagtagtgatttgggttttcatgttgcatttaacattaattttacctagacagaccattttagagttggaaggattttattttttttttattttttttattttttgagatgatgtcttgctctttcacccaggctagagtgcagtggcgcgatcttggctcacttccgccttgcggattctagcaattcccctgcctcagcctctcagatagctgggattacaggcacacgccaccatgcctggctaattttttttttttttttttttttttgtattttagtagaaacgaggtttcgctatgttggccaggatggtctcgatctcctgacctcatgatcctcttgcctcatcctcccaaagtgctgggattacaggtgtgagccaccgcacccagcacggatttgctataaaacaaaaattgatgttctttttataatatacttctgcttctgtttttcttttaatgtacctataccccacatctacctccagagtgtatgggtgtttgcccacacgccagcacacacacagggccactgggaagcgcgtttgtccatttggggtatttgcagctcattcgtgtttgctcacttgagttaaaaagcccctgcatgatgtcacctgcctgtgataccaactgtattttgggcacggttgggtagatgagctgtgtcctcggccctgaccagcgctgactcagtgtttctgttgctcctcattgtatgaaaggagaggaagaggccagcagtgcccttgaacccactgctggtttgccagtcatggtgggttgggatgcacacctgtgattccggtctccactttgaccctgtgtttgtgctttctgctttcatcactgtatgatgaagcagctaggagcacaggaatttctcttaacgtctaactttataccacatgctgacagttagtgcctaaagtacagtgcgtgtattatttttaccctcttcacagcccgtcgtgtccccagcaggagagaccgtggagggaccagggacaggcgcttaggcctgtgactgatcctctggattctgaaaccagagcagccaccctttttgctgacattaacctggagagtgatcaaagcacaagaaaggggataacttaaaactattggtatttacttagttggaacattattttacttatttatttttttggcgatagaatcttattctgtttgccaggctggagtacagtggcacaaccatagttcactgcagcctctatcccctggcacaagtgatcctcctgtctcagcctcccaagtagctaggaccacaggcacacaccaccatgcctagctaatttctttttttttttttgtagtcatggcgtcttgctatgctgcttaggctggtcttgaacagcctcaagccctcctcctgcctcagcctcccaaagccgaggattacaggattataggcatgagccagcaagcccagtctagaacattctttatccttcctgttttcctcagatactttcactctttttttaaactttatttattttttatagagacagggtctcactatgttgcccaggctggtctctaactcctgggctcaagtgatcctcccaccttggcctcccaaagtgctggaattacagcgatgatattttcactctaaaaagatagaaagtatattgaccagcctggccaacatggcgaaaccccgtctctactaaaaatacaaaagtcagccaggtgtgatgtcacacgcccgtaatcctagctactcaggaggctgaggcgggagagtcactagaacccgggaggcaaagattgcagtgagccaaggtcatgccattgcactccagcctgggtgacaagagcgaaactccatctcaaaaacaaaaaaaaaaaaaaaaagagagagagaaaagaaagtatacttatgtctgtatgttaaattttgtagaccagtatggcagctccatccaccatccagagtaggtgccttccactgtgcatcactaaggacaggatttaactgcaagctcattacaactaaagcagtttgtttgtttatagtttaaagaggaaggtttggtttaggtggagcaggaaacattgcattagtaacatatttcttgagcattctgcacagaattacattagaatgtaattaaagaagtcaaatgagtttgtattttggggaaaaaatgctgaattttcactcctgtgtcattctgtaggatagtgaatattacaactctttgaaatggatcctggagaatgaccctactgagctggacctcatgttctgcatagacgaagaaaactttggacaggtacatgtgggtaaccctgggaactcttctttagctttcaaggggcatttttcttcttgacgggctgtaacacaactttgctggaccatcagaaacaaccagcaggagctgcaggtgttaattttcatctcattgtagcagcacctttttgtcatgccaagacgccacactccaattacaaccatttctctcttccagcaaagttacagaaattccaagaggccttggggcatgaaccagcacctcttctaatccaaagcaaatgtgaatgtttcatttgtgcctcggttttagaatttaggtacttgaaaaaatagtgagattgttgacttagcgatgtaaatacatgaccaggagtgggtgatgttggaagggccattggtttttctctctgttttatggttctgttgtcatggcgacatttgtcttgtgaggctcagcatggcaggctccggtttttctaccattccctctgctttgcccccacgctgttattcaggctggactaatcctcaaagtcagtttcagactggtcagcagggatttggatgggccactgaaagtggatttcaaaggtaaagttgcctgcttggaataattctcatcatgctaaggatctatgcgatgtatttgtctcaattctgaagcctttgcttcatctgccactcagtaataatgatgcagcttgggaggtgttctcaatgtattctctgaccctggtacctgtccttccgcaaaagcccagaggtatttcccatccttcagactaaatctccacggctatgaaattaattagaccatagaactcattgtaatggttgccctctgaaaaatgaaatagacgtgttctttattgctagatgtcaaagattgctagagaatctttgagaaaagaagctgatgccactagaggatttaatgacaactgagggtaaaaattgttggataagaaaataatcacattaatatcagaatcacttgttattcccatgtcctgtgtttgagccaggagagttcagtctctagtgtgagtcctggtgtgggtggaacctggggagtccatagggcccttcagtggctaggcaaggctcagagaaggacttcaggcaccagaggcaagagaccttgtggcttaatgtaaatgatcaagtcctttaaaaatctccttttgtgccccctccccactgcccccctttcccggcctcctccccaccccactgtgttgtgctttatgcctgagaatccttacagacaggcggacactgttctcctgcacggggaccttgtgatggggcagggaggggtcttttcagctgctgcccctctggtctccagcagcctccccaggaccgagagtactggtgtctccagccctgtctacctccttcctctgctgcctttgacacaaatagctcactccccccagagacacctgcaaggcacagtgcctttcactccgggctctcacccctccccactggtctccagtcccctggaagtgcatgctcctctgctggccctgtggatgcaggtgtcaccctgccagctgtcctgcacccgctgcttttttgtctcacccttgctatctggatttcctcatcctacctgtggctccggctgcacccatctccgctcaccaccagcctcttatctcaggccggcgtctgccttccagcctccagaattcccaggtctaacggcctcctcaactgcttctcctgagaggctcacgggtcccagtgctaaagccactttttcctccccagcccccacatcggttatggtctcatcagtgccaccactgtcccctcccacctgacacttgggcatcccctcagaatctccctctctcctcatgccatctcccctcctcatgccatctccccgtgcccaggcttgctgtgccccgtgactccccgtccttggcacgtccctgtctgtgcactcccctagccctgctccgatcacttcttgactgctgttctcacagcctcctgtcggccgccccctttcctgctttgctgttctccagtgccctgttctctagtgcctaccctgttctccagtgccctgttctccagtgcccgcctagctgtgagccccttatggactatttctgaaatgcagccctgaaaatgtccttcttctacttggccatcttgtgaccttcagcataaatgaaaactgttagcatggcatatgacccctcataatccagacctacccccctctggcattaccctctgacacctccttcctgtcaacctgtcaacaaacagtgtgccttcaagggtttccccagagatgcttcagtgccacattgctggctcgacactgcccactctgtaccgatgcattctcattctctctcccatcacctctttccctgccatcctcgaggtattgactgacgtgctgtgtgctgtatgccccctgaggtcttctgggtctctccagggctcagcatgtagttgatgcctgccagtgctcattgagcaaacgaatgaggagtgctaacctggcttattaaaaatatgaataaggtggtaagtaatagaaatcctaagtgtgagaaaacaaaatcagtcaagtcttggtggctttttttaaaaagccggacctattgaagggtcttaaactgccaattttcaaacgattagacatggttagtcaccctggaagtatcttcctttcatttttaacatatgaaggaaggagtggaagtaaagaaccaaggaagactgaaagtcagtcttgtgtgtcacatgcattaaaaaagtcttttcgtagattcattcatagaaaaccatatgaccaaattaacccaattcagaaaactattaagccacaatcagaagcaaatgatctgggaaaccttcctaattacatttaaatgtaattgtttccacctcataaatgaaagtcaaacacagggtgttggagtttttaagcaggcctctaataaatcttctgatgatcgttcaggccagattttcattaaaaacagttctcagacctcctcgtttaatgttgtgaattcttctgacttttgggtaggatcaagtagagtaatgcattaatcaaaacagacccatgagatgagtaagataagaattaggtgcccagtttgttgaattactgccttgcctttttgagagagctatcctgattaacagggaactcacgtatttattttgcactctgggaaggaatttagagcaagttaaatagctgcatatggatctcatctcccatatccagtccatcagcgagttgttcacacacctcccaaacctttctcatttctgtgcattctgccgatctcttctctcactcacacccaagtccaagctcccatcttccccactagacccccgacccgtctctacatccaatatggcttcttataatggcagagtggtctttttggaatataaaaatgagcatgtcattcctctgccagaaaccttcaggggtctcccctgcccttgagataaagaccccaaccttactttgtcccacaaggtcctgcgtggcctggctctccctgctcctcctccagactcactgtgaatcacaggccccactgggcttgtccaacacaagccccttcctgcctcaggccctctgctttctcttccatctgttgggagcatactccctcccagtctcagttcaggtgtcccttcatcagggaagccagcccttgacccagaccctatgcatcttccatgcctgccctgtggcatgtaccacagacgactttgcatttgtctgagtatgtttgtgtttagtgcctgtctctcctgctcagcttcctcccgatgatggcagccgcatgcctgccctgtgctcactcactgtcgtgtacttcccacaagcactttgcctggtgcatggtgggtacttgtagttgttgatgtggaaatctaggtgttagcatgatgcccggacaagcctctcacctctttggccctctgcaaaactgttgactctgacccagaagaaagcccattcctccccaatgccaaacagtcaagtcacttccacagtggggcaaagcaagtgcagttgtcatggggtgaaacagacatgcagtcagccttccacggtgtttcaaccttctttttttttaatttcacagttagaaatatcagaccatgaagtttggtagctgttccttcatgtaatgaagctgcagctgttgccattattttgcaatttgttttctttctgattggtaagaatctggggctgctggtttctagggcctaatatgaaagtttccactgaagaaatgtcagtgtttgaactatgatcctgtgccaagcaggaagaataagccgtacccccattcactgctgtgcacacatacctgcccccaccgggaggaggggcccttttagggctgtaacaagtgaaaattctttattgcaagttcagcagagcaacgtctaatttggttatgggtttgtttgtttgtttgttttttgagacagagtctcgctctgtcacccaggctggagtgcagtggcagaatatcggctcactgcaacctctgcctcctactttcaagcaattctcaatgcctcagcctgctgagtagctgagactacaggtgcaagccaccatgcccagctaatttttgtatttttagtggagacaggacttcatcatattgcccaggctggtctcgaactcctggcctcaagtgatctgcccacctcagcctcccgaagtgctgggcttacaggtgtgagccaccgtgcttggcctgatttgattgttttgaagagctgccagaagtttcaagaggctgtgcagtagttggagggagaccatgggcagcagccatataggaaggttctttaggatcgggtcgagccagtctccataggaatgattacccaaagggaacaaggaggacatcatctcagacattgaagtggttagtggccctcccagaagccacagcacattccacaggtgtactgtggatctctctgttaagatttcatggagagaggtgggccactggcagaaagaatctaaaaaggctctttagggggtgataatgaattaaaaggtagagaaacacttgggggaaggcagtgagtgaaaaggcagaaatggtcaatgagggagagggcagagcatgtcctggcggaagccaggagccagacgaagagcccggagctggaggtggctcccaggagcgctgaggccccggccccttcaggccagtcagggacacagaggggtggcacctggggagacgggaagtgggaaggctggcatggacttgctgcctccctgctgtcggtagttgcgctgctggagaggctggggaggatgaggaaggcctggttggtggagtgatgggggtgcagggtgctgactgcccccgaggccgtgccctgcaggatttgtgagcacccatcagtgggcgtttgcccagcagtgctccgtttccaagaatggagtctgacaagcagataagccttgctccacccaagtccagcatattccatatgagccaagctgtttctcagcagcttcccaggcagcgcaaagcatttatggagggtcagggagatgtgtgggaatcgggttgttaactggccaaggcagggagtcccccagaagttcctctgatctctgtgaggaagagagccaagtttatgctggggccagtagacttaaagaggaatttttctactgcagtgttctcccacgagctcttgctgagcgcctgctgtggctgggcattgtgttccttgtgtggggtcctccaggagcccaggcacaggagggcgatggcccagaaagccctgggagggcggggtgtgcgtttcgtggctgaaggtggcaagaatccaccccacagagcaggctctgcagactgctcaccagggagcagggcccctgggtgccagcaccagctccatctgcagttcgctgtttctccttggtcactttgctggatttctgcctccgggatgctgtccaccctcatgacgggggccagggcgctgccgcagcacctataggagatgcgcagggcagagagcagcccctgtgtgacgctgccccgatttctcccacttagggttgacactgtcacggtaccacccggtgttcagtgctgaggacatacagtccctcccctcctgtggtggcaacagctgatgttaagaagggacaaatttgggcgaaaggagaacacaggctgtagttagagtgatggtgagacaggaatgaaggcccgcagggaatctgtgtgcctggaggcgagcattagagtcagatagccgcctctccaacccccatggagcctcgtgcccaaccagcaaggactctggggcatcggccagtggcagtaagccagtgtggtgggctggacaatatgcctgcactgcaggagacggtgtcacgatcagcccccgacagccggtctcaaaagtggaatttgaagagtggtcattgcttctcatgaaagtgtcgccgtaactcatgaaagtgtcacctgtaacgaatcctagagggatgcatttctgtaccacggagggctcgagccgagacaccgagatctgggggcgtgacccctaacctagtagcttagggagcagaattacaaacccctcatcctgtgcccatccttgggccctctcctcactcccccacagagaaacccagggtcagaatcaaccatgagacttgacggctgcccacaggatgatttactgctgtgacctcatttagcatgggttagtgtgggcccattttttcttttctttcaaaaattatttatttatctaattataaaatattaacctccataataaaaataaagccagtataataaaaatatgtaaaataaataaatgtcacttattcccagtatctcaagaaaactcaggattaaaatttttatttacattttccagaattattctctgtaagcacaaaacagatttttttttttacagaagtggaattgtactctgcatactgttttcttttttattttatttatttatttatttatttatttatttatttattttgagatggagtctcgctctgttgcccaggctggagtgcaatggcatgatctcggctcagtgcaacctcagccccctgggttcaagcgattctcctgcccaagcctcctgagtagctgggattacaggcgtgagccaccactcccagctaatttttgtatttttagtagagatgggttttaccatgttggccaggctggtctcgaactcctgacctcgtgatctgcccacctcggcctcccaaattttttttattatactttaagttctgggatacatgtgcagaatgtgcaggtttgttacataggtatacacatgccatcgtggtttgctgcacccatcaacccatcatctacattaggtatttttcttaatgctatccctcccctagccctccaccccatgacaggccccggtgtgtgatgttcccctccctgtgtccatgagttctcatcgtttaactcccacttatgagtgaagctggaaaccatcattttcagcaaactaacacagaaacagaaaacagttttcaaattaatatatcacacataccttttcatgtcactgaatatcagtctataacattctaatgactgtgctgaattttactttgtagacgtgccatatatttttaaccatgccctgttggtagacgtttaggctattttagtattttctatataaacatataattctgtataaccctggaatactcacatatatacataatatatatagcatacaaatgtataatctggaatatacattttgtgtacttgactaatttttttccattgctataaactccaaaagagaaattactgtgagaagggatatataattttaaaattgtgatgcctattgccaaattataatatcttcagaaaaagattgaaccaattagactcccacccacagtgaaggggagaaccagttctctgcactcagcaacactggcttattttctctctcatccctgggcgctgcttttggaggaagcagagtgttttcctccttagccctcccctccccactttgtctgtggccgacccgctcattcagtagctctctggaaattacaactttcaggcaacaccaaagaaggctctgtgatcaaagagagagggctggatgaatgctggaaggagtgtattacagggattgtggatgcttatctacttgacctccttccccttccctgtgcgaggggaaagggtgggaggaaagattcggcttgagtgtagccgagctgtaccgaaagccttctcgataccaatgcctgggctgggatttattaacttgtcattgacgtggatctgataagaaaactcttaccgaaggaacaacaaggcagtctggggaggaataaatggggaaaagaagaaaagccaacctgggtttattaacacatagaacaaaaggtatggatgagcactgtccacgcacctctgagaaccagccacgaactggcagagtttcactgtagaaacatccccaccccacccccaagtggaagctgtttggcatcctccatccccaacacggcctgtacggggcaggagcagatgacccctgggagaaaatgggatgcactgggaagatggcagctagaaagggaaatggagaaatgaaggatgtcagcaaaaccggaaacgcagcaaagggattaaaattcacattgggcacagtgaagagttcagttgactttgcagaaatggaaagcatagtggaaaaatgagattccttcctgaataaagagaaaaagagaatgtcgagggaccggatggatgatgaatgtgttttacgttgaaaagccatctcagtgtgaatgggaacaagagccagtgcgtggagaagccgcatgagagacccaggtgtgagtgctcgggtcagaggggctcaggatctcctgggtgcaggtggcaggaccaaggaacccctggaggtggcctctgccagggcatagagttcatcacaacatggaacctccatccctcctgggtaccaccctaacacttactttggaaaaccctctcccctggcttggtttactctataatgcaaccagcaggcagaggaaaaaagatttagagggaaccccaccaaaatagtggcatggctttctttcagtaggagaggtgtaggtgctatatttttccaccttttttccccaaaatttctacaatgagaaaaaaacattttattttaaaatagtaggcctctctcccttccctcacgctggttactgtgctatgtggccttatggtaagctaggtctgggtcagggcataggagaaagggctgccctgattgcagctgcttttttcatgatcatgggtggtgctaagggaggaagcttcagggcagatgagtgaggagaaggcgtccaatgcaaataaatgccttcaaaaaccagataaatctgtctcttcagcctggatccttaagcttctttcttgtctttaagtttctgtttgcatttttgaaagaaataccatgcatcctttttttatgactagaaaatataattttcagaaacagaatgcattagaatttggatttctggagtcttgatgggtgtaccctgttcttttctctgttaaacataattagtttcctgataaatgaatagcagaggaaaaaatgttgctcttcattattgctaatatatgaagaataattaaaagtcataaataaccataaaacaatttgcctttaatgatagcatctttaactgtgtaacatcctagcaaaaaagcctcattggacattctcttgtgcacagagcccatttgccgggaaatatttctgaatacatgttgtcttccctttatagtaagacattgtcactcaataataatatgcaagataacttcgtgatagtaattgttgttttgtctttgtaattacagacatatcaagtggatttgaagcccaatgggtcagaaataatggtcacaaatgaaaacaaaagggaatatatcgagtatgtatacacatatttactgccttttctttgaataattgaaatgcatgtttggtcactgtcccttgctgaaacagctcatgcatttattatgggcatgagtttattggtcagttttcaacaaggtaagttcttttctggcttgggctaatgggaagttgaatatgggatggaaagtctgtcttgtatcatgactccattgagctgccctataaaggagcagaggagggagaaaaggtctatattattgagtaatacggcaaatactcttttggaatatgtggatatcaactaagatttagaattgcaacggagaaccacggtgtcagtgaccagcagggcaaaattaggaaccaacaaagaaaaaatattttgtctctctcccaacttcttttccataatagaaatgtatagaaatagttaaaatggataggaagaattcagcatgtgcaaccctaaggaattctttctggtatttgtaatattcttaactcaacttcagcctcagtggaacaaaatgttgagtctttttggaagtctagctgttaagtgattctaagacatttgtaccaggcagaagtttttctctgttgggcacgttacgttttcttttttagtgtatatgtgtgcttcaaatgcataactctgggatcttccaaggagatcccctggtgcaggggtgaggtgagcactgcagtgtgtggttcctggcacctggtttctgctctcttgtgggtcgccacagtggccctgagttcctcgtttgcattcagtgcttcgtttcaacaggctaggctccctcctttcttctcatttggaattggtcagaggtcttgaaatcagacagctcttgcattgactgtgggtcttagcacctttcagtgtgatctgcaaagaaaaacctactgtccttcctaattaggaagaaacggagcgtgttagagtctctactcagagatcctggcaaggagtggaactattacatggcggactcttttcactctcaagttgaaagcttgttatgctgaatacatagactagaaataaggtacctcggttcttacctggccacattaattggcactctcgttctgaatatgaacaatcttagctgatgacatcctggcagacaccattgtcttccttcagaaagtacagactgtgagtggggtttaaaaaatattctagctcagggtgacccaggtctcaagtctgaggactctgacatgcgtggtatgtgtcttgcatcattctttgcagttaattcttttagggttcaaacgtggtgggagtcagggccaggcagggttccagctagctttacttttaaaagtataattgaaatcaccaactgctccctgatacctctgctcccctggtgccagaagaatgctgttgagctgttcattgtagcccaggaggtgccacctgagaggccgcacagtggttgtgctgcaggctggtcctcagggccattaccatggttacagtgtaccaccccgaaggtgagaacccttcagaatgatggaatgcctgagatgacatccagagtacatttgccttgcgatcagttttgctgtgcattaaacactgtcgcagggaacttggttttggtgaacttcagttgcataaggaggtcttaccattcatcctctaaattttggcattaaattatgagtgcaaatcattttgctgataaagcttatatgttattgttgaatattagcacattggatactagaatgaaatattagataactaaatgcattgtcctgagtacactttacaaatatgtatacatatatgtgggtgtgtatacgggtgtgtgcatcttatacatgtatacctgtgtgttcataccccatgaacttttcccttttctccatgttgtcacattttaaagcagttaaagcatttaaagcattttaaagcagttaagcatttaaagcagtttaggtcagccaaaccttgatgtgggggaagttaattactcttttgaaatctccagtgagattttaggtttttcacgggtgttccagggagtcttgaaagaagccatgaataaactaaacagtgggggcacagaggagaccctcccctctgctctgctgtcgtggatggaggagaagcactccctgttgcggagaaagcagtgagcactagtgatgatggaggtggttcaatattgtcctcttttctcctgcagcttagtcatccagtggagatttgtgaacagggtccagaagcagatgaacgccttcttggaggtaagccatgctggccagggttctctgccatgtgcctctggtcccgggtcgatgggggatcgcgcttctcctttagctagtgtggtggagctgatcagagacagaggcgaggctggggaccctgcaggaagaccgggatcgcacagctcacaccgctggccagtctccagcacaagagtgttcagccaccgtgccgccacctccttttccttttcacgggttctcctgcttgacttctcttatttttacatttgtcctgtttttaaagaggacgttttacagacttgatctagaaccattgtcttggagtttcaggcggtacccaagagaaggctgccttttgctgcagtgacaggttccaagaagcccgagggctcagagctgaatgatgaagcgcagtccccaaagtgcctggccacccctccctccctggatcactgctgcctgggcttgattgattgattgattgattgattgattgattttgagagagattctcactgtcacccaggctggagtacagtggtgcgatctcggctcactgcagcctctgcctcccgggttcaagcaattctcctgcctcagcctcccaagtagctgggactacaggcacgcgccaccacacccagctaatttttgtatttttagtagagacggggtttcaccatgttggccaggatggtcttgatctcctgacctcatgatccacccgccccggcctcccaaagtgctgggattacaggcatgagccgccgcgcccagccatggacatttttttttaatcccctgccctttttctttgtggcataattcattgcaggttctcttctatacagatacatggaaaacacattttcttaagctgagtttttatttattttatacccagccacctcatgacagcttttaccctgttacagagcaaagtgggcactgcccagatcgaacttttaatatcagggatgctcccaggcccctagcagtgggtgagggattcatcattttaaacagtattccacttggaccaaaagcaaaattctttcttaaatatgatatagtattagttacctcaaagatcacacaggaaacagcctcgtgtccacgtgactgattttctctgcactgaggcagagctctcgtggggtgatgctttcccttcactcaggtacctacacaggatgcgtgaaagcccgggcagcacactcagaaacagctcggggccttagggacttaaaatgggaggacagaatggcaggtttcactctttatttagataagaaatcccaggaagcagattcctgggccccaccgcaggcggtccacaccttcagaaacgcggcgttcgcagcgcgcagggcccagcagagctgagctcatcctagatcacgccacagttagtggtacctgggaactggagcatggttttctgtacgcacagtgtctgcacccatcacctgcctccctctgtgtttcttctccctgcctccagcacgttatttttaagcgtgtctcttacacatctgtagcctgtgcatcttaggacgcactgactcacagcagtgttataaatggcttttggaatccaccctgcctacagtatcccatattttcatcaggtttcagaaattactccactacttgaatcttctagattctatgctttttcgaaactgttatattgtgactgtgctgtttttactggaactatagttacttgatactgtcactgacataggaatcatcaggagagattatatttttttctggctaaccagaaaagtttgtttttcctgtgaaattttttttttttgaaggcaataggtgtttaagatgttttttttttttctttcagggattcacagaactacttcctattgatttgattaaaatttttgatgaaaatgagctggaggtttgtattataaacattattttatgtaaagtggattttttaaagtatctctcattactttacaagtaatattttaatattcttggatccataatgtcctagagagtaactttagatgaattatattacatgtctcttatagggcttatttgccaatgtggttctattacatgtctcttatggggcttgtttgccaatgtaggagtaaggaacagcaaaaataatcagctgtagttgccttgtccatcagagggcagttctggaacatgcctagtaagtagaggccactgagcagagctgggatcatggccctatgcaccaggcgaggcaaattgccacaacaagtagaaacaaggtttgcagtagccctctggacagcagaaacctgcttacactaccagactggccaagtatcctctgctgcatccccatccacccccaccgtggcagccaaatgggggtcttggccacaaggtggccgtaagcatctacttgggcctgtagaacgacgtctcattgaacttgaagtggtttatgttgagtgaggaaaaatgtcagaaggcaacagggttgtagcaaaaggtagtttagtgattgtctagttcagcttcttggtgttgacatagttgagtaacagccattttaaaaacaaaggaatatctcgccctttgttgtgtcgagagaaacaggggaaagactgtctgttgagaagccgttggtgggactcggccatttgccccgtccatagccagtgagtgtttcccatacactggccttctatacttttatctcaaaacagaaagttcaagatcgatgatgtctatagaaatcatatacctcaagcctttcctctgataggtgggaaactgaggcagagagcagctgggtttacccagcaaggttttggcacggtcaggcctaggaactttatttccaggcttctggcttagttctgtttccatttcattctggtacctttgcataaatatcttccatttgtccacaggaaacctcccctgatggagagttgcataataggaacggcaaaccttagactaaatgctaagtcgaagacccagttgtgccttagcgtatgtctgccattcttaggcctctgggcagatgaggtgatttgtcatcactggaattgatcaacctggaggagagtcataagcactaattcttttgtgggtagggagatgcttttagatattcagaggaataacctctcaggaggagaagcagccagggtaatgcacagatgctgctggagcgtgagagaatccacaggtcccatgcgtaagactagaggggtagggaggacgactgtggcatttttatatccgatacgacatgccgtggcttgcgcaaggttcgaattgagctgccctcgtgactgctgcctctgtgatctgctatggcaggtggagcctggaacaggtgtctgccttcctctgttgttatgatttgctagcttaccttcgcggcacagtgaccacatgctggcactgagggtggtcatttctcagtgtgtgatctcgcacctttcacatcctgcttttacatctggtaaattttcttcctagttgctcatgtgcggcctcggtgatgtggatgtgaatgactggagacagcattctatttacaagaacggctactgcccaaaccaccccgtcattcagtggttctggaaggtaactccggggcccagccccagccggtgtcctccacctgaggcaggattgagggctgtgtggcgccctccattgtggtctgacttcaggactgatgctggctttggggtctgttagagcttggactgctgggggagggaagaggcaaactgagccagcagccccgtggtggctcctctgtaactgtagcagacagctagacttgaatgaagttggtccctacaaaagcacactggccttccttgaccacctcgtgaaagtgacttttatttgagggactggtcctccaatgcgtaaatagaaatggggggcttctcagggcagaaacaggcttcagggatggctttgcaagatgccactttctgttaagaagtcgttttctcaatttttaaaatatattccaacaaatattttgatctgtgtatctttcaaccaaagataacacaacatttgatttattatcttagggccactgtttgtatcctgttcagcttaggagggaagtaaaataggaatgggttagtccaaaggagatatagtaaacaaacttaaaaaaaaaaaaacagttatcccccaaaaaggctgattatttacttcaccccaaaaaggaatcatttaactttttcaaatttatttttatttatttatttatttattttaaagatggggtctcactgtgttgcccaggctggattcaaattcttgggcttaagcaatcctcctacctcggcccctcaaagtgctgggattacaggcatgagccaccatgcccggcctttttcacatttctaaatgccttttattactatttcaaatgccagcaggaatacagagataaaaaagcaaaatcttcaaagcctagtccaggtctcacttggcttgttttagatgtttgcctacagcagtccaagtggcattaccagtaaagccacctggattcccataataatgcagatatgtaagatacacagattattttagaaccccatctttgcctttgttgttttgtttttgttttgttttgttttgtttcattttataaaatgatgtcttctagggaacgtgtctacaatctgaaatcccatctcataacctggcttccccttgtgatgacaaatcttaaatactgtatatttataattggcttagggggaactggtaagcctcgaacacagaaacatgagcttggtgccatcagagagtttgctttttatatcatttattttggcctattggcagaagaagaaagagacggacattgtgatcactcagtctcttagattagagaggccagctagtattgtggccataaaaaacctactcagttttcagagtcaactgtctaggtcttacattgcaatataaataagattaagttctgcctgcctgcatgacagcagcatgtgccatgggtcacgtggggggtataatgaccttctgcctctgttcataggctgtgctactcatggacgccgaaaagcgtatccggttactgcagtttgtcacagggacatcgcgagtacctatgaatggatttgccgaactttatggtgagcaggataccattggattcagttgtcctcctgggaatttccagccaggcatgaactctggcccaagaaccctgccgccaggcctctgcagaaggctaagtttcaggacagtgtgccatgcataggttccatgaaagttcaatgaaagtactgttatctatactttatatagataacatggtgcttctacttcgagggattggggggcagtttgtgaagaggtccataaggctgctcttttttttttttcctagtttagttttttagtaaatcgttaaaaactaggttttgtagggtcatttatatggtcgtaaactgaggtataaagtcacctccagtaggcagaatttttcagtgtttaccatagatttaaaaatcactctgtactttgcatactgaaagtcacatttcattcaccctcccacccacaaaactagtttgaagtttaaatttccagggcccagctgagaggctgtagctgcctgcctttccacgtaactgttgtgtttgttaatcttggtgcagttccattctggagactaagcagagtctttctgtgaggttgtgcagacctctggcttccctcaacattaaatatcaatgttgcagcagaagagagtgtcttgggcctcacccctgggggcaaaccctgccctgacagtagctggactgcagaccacaccatagcttcattcttctgccccaagcaatcttaacatttctttttcttttcttgtctaggttccaatggtcctcagctgtttacaatagagcaatggggcagtcctgagaaactgcccagagctcacacatggtgagtgacaaaaacacatgcatgtcaatgcaatatctgaactgcttagctgggtatggtgctgggctcaaggctattgaatgctctgtttcctgtctgtaagtagcttagagaattaaaggacagtgatgtggatgaaaatagaaattgtacagtagtgctaataagacataatgcactcagtatgtttggcacataaagggctcaggcctccctgctgtggggaatttctcctctgagcccagtccttccctcattattctaggtagtggagctttcactgttcagcatacatagataaggcagctctcaacctgtataataaacacgttgggtttttactccaaccttaaattggttgagaagttaggacaaaataccctgtagaaacatcctttttcaaaggccttctatgcccatgaataacctgtaattccctggaattgagcagtaacatgactgtggtcggaggagggtaagagggctgacacgtggccagggatgcccaagcgtggagcgtggctgccctcagaaggccctctcaggaggcacagtgacgcagaagggtcccagttgttttctgaacagttgcatgaaacccagcacaaatgcagactggatgggatcagtttcttgaagccgggttcagggagctcttgctaactcaaactcccatgtccctcgtgttggtttttctgcaaaggcctttatttcttgctcctgaggaagcagcagaagtgggccttctggaaaacggtgagcagcgtagccctgtgtttctcatgcagcgggggctgcaaagcctgctctggccatagtgagctaacataagcaaccaaacactccctgcaggaaacgccctcccttacactagaagtgctggccaggagagaattctcatgaacatgtgtttgcgaaaaattggctgtgaaaggtttttcacttctgtcggattcccttgcctcaccagaaaggtgttttttttttctattcgtaccattcacgtgactctccagatggaaacaatgtggtcattgcctgtcagagccttgaaagcaagctgactccagcctaaaattcatgaatattcagagcagtcattgtccgtggttctctggctttattctaagggaagaatgtttgagtagttcagagcttttatccaaatggtgtccaagtcatatgtggttttctgggttctactggcctccatatgaaggcaccagcgttgagccaagccccaggactgtgggtggtgatgcgaaactcaagctcataatactaaccaggatgaagattaggaaaagcgaaattattgggcacagtcatcatctgtggtcaggcactgcttaatctttatggcagccttatgagatatgttattcccttgggctgtcagaaggctggcccagggctcaccagagtcacagattcccagatcacaggatttgaactcagagctaccagaattagagcctgcaccctttaccactacaccagatacactgcctctgttgatatacccactttctttttagacttttccaaggaaaccaaattagtgaaccaatttcatgttcattcagcccatgtttctctgtgacttcagggacacatatcttactattgaactgtcttttttatttcggagcccacatgattctgccacaagtagaacttcccagataagacctctgaactcagtggttctcaacctcagctgcatgttggaaccatctagagagccttaaagaaatcactgatgcctggaatttggacttcattggtctggtgtgtgacccaggcagtgggattttcaaagctccccagatgatttttataggctggcagggttgaaaattcacagctcttccctaggaagggcaaagatccacctacaggaagggaacaacccagctggctcttaccagaacttattttcctctttatgtgtcacggaaataaagcaactgtgtagttttcctaatgatgttctccccagactaacttgacccggatggagaggactggcagttgcaagcaacactggctagcatgagtgggactgttctgctgtttcttctaaatggctttcctccctacctgaccctgactgtattttgacataggaaacagaaacttcactggctgtttcgtggcaacagttctgccataaaattttgccatacataggtttaatttcttccacgttttatgatacacaattaaagttcagaataaaaatctgatttcctagaagagcagaagctgaaggatctggttctctgtgatgagggtacctttcattaagctttccaatggtgattattgagtgtctgacattcaaaggacttcatttcattgttctataaaaggtcactactcagacatttaaaattactcttcattaagaatcacaggcccacctgcccttttaggtagactctaaagcaaacaaaaatcatctcgttcagcccatgcatcttccacgtgaggacgctgaagccctgtgaggacaatgagctccttaaagtcacccagctcattagtgcagagcaaagccaggtccgtgtgtcctgacctctgaaatgataggaactcacactcaccaagcactctgttcattccggggatggtgctcagcacttgatgcgattgactcataccatcatcacagtggccctaagaggtgggtgatgttatgacccacttttttacagataacactgggatgcaaagcggtgaagcattaagcagcatgattcagaacctcagatcttgacatcccgtctttgcctctctcttcatcatgccagtgtttctcaaacctgaataatctgtgcaccttttttaaagggaaaaaatggtcacagattctcaagaatgggcctgagacccccatagggattgcaggcccgggactgtgaaaccccagctgaaaagcctgaagccactttcggtgaaaggctcttttaaatgccatctgtagatgtgaagtcctgtctttattaatatgataatagaaagttaaaagcctgtattagtacttgctcttttaggattcctgggttcctgagaaccccagtttgagaagcacagtgttattctctgtcttttagtgtttagtggctgttagagaatccaagtggaactcagtgggacttattcaatatttagtggttgttaaacggccctctacggtatgtgtttcttttctgttgctgtgacaacggttagcttttagtatatgtgcaagtgctgccaaagcgagcacgtgaatggttagcttttaaaacccaagaagttactttgctcattcttggaatcacacatcaatacctggagggggcggttttaaacacagtttgagcactcgcggcagaggcagcacaagtgcacttcaagagctgggctttggagcaccccagggctgtacctggccccgtgtgaccttgggcaagttacctaaccttgctgtgtctcaagctcctcctctgtgaaataggggtgaagcattagctgccttacaaagtgattgccagggttcataacattgagacaaggctgatggggcatggtgagcactccatgaacatgagctcttacgtcataatgagctgtggcaagtgtgcatgccattttcatgacagatacacatcagcaatcaccccccaacacatacacacacacacagaggtgcaggttctgtggctaaaggctctggtcttgagccccatgtagacatacagtaaatgttgaaaggtgttaacactgataccatctcttgagtaattgagcccttgctgtatgccgggcccactgatccgatccacttggcactcatatgtgcagtttccccatgtcacagaagcacagaggccatccatttgtctgaaaaccctcactattgccagggcgatttgcagcccccgcccccacctgaagcctccagatatgtagggactttttctaaatgcaactttacatagcaaatgtcaattttgcctgactttgatcagaggaggtagcttagcactggtgttcccgagccccggacagcctgggttctgtttgtgggtctgccgtttgacaaagactgtgacctcaggaaccttgccctatgtctctgctccaggagctcctgtgcagaatggagataacatgacctgcttcatagggttgtgatgaaaatgaagtgagttaatagggagaaaagcacttggcttgaggcctagtgtggaataagtaatagtattagagatagacacagtcttaattcgtgggtaactccaaaagcatcagctctgtgttccaagggtttggaaatcttgccggttactcccttcccaccaggattcctccgagatctgcatctgactatagcaaaggtttcatggaccatttgaaaatgttctttctctgtaaattacaagagcttatttagtgtggatgtttcatagctagaggtttttggggtttttttctccaggtaatcaaaattgttggttaaggcttttttattctcttactcaaacctcatgccctattaaccagatcgaggaagtgctgttgtggcttttcacctacactttttgttccttttgcagctttaatcgccttgacttacctccatatgaaacctttgaagatttacgagagaaacttctcatggccgtggaaaatgctcaaggatttgaaggggtggattaagcaccctgtgcctcgggggtggttgttcttcaagcaagttctgcttgcacttttgcatttgcctaacagacttttgcagaggcgatggcagagagcagctgcaggcatggtccctggagccgagccttcaccacgcactcgtccaagttcggatgcgggaacctggtcccagcttgagttcctgcctttcccaccacaaattatcaactggttgatgtgtacactaattacatttcaggaggacttaatgctatttatgttgtgcctctgcaggcaaagcccttaataaatattttacatcctttctaatgacaatgaatggaattaatcactcaacaggtatagtattacgactcatgtttactttttaaaatgatttagaccgattttcagattttatttcgttatgattaaagatgtctcatgtacttggaaaagtgagcattttttttttttttgtatttcactttcataccaggcttaatgtcaatgacatttttatttttgaagtactctgacacctccaccctctactttattagaattggaaggcaaatttttgtccaaaaacctacagacaagtactttgagagaatttccaatataatattagacataatgataattttttccatactcagaatgaaaaactggatattacgtttttgttttggggtttttttgtacaaatttagctaatagctacaggctgagagaattgtaacatagcatgacaaattttgtgttgacttgaaaggaatcacaccattattccttagaagtaattacatgtgttctaacacatttgagacagggttggactcccatttctcatccgagaaattacttaacccttcctggcgctgtacagtcatcttttattctatttcctctttgctgtttgtagtagagacattttgaatgaaacttggcactgcttgattcaaaactgtggaaaccagatctgtttagtctcctgtttgtatgcgtttgctaatggtagctaaataaccagtttttgttgtaaatgcaccaattctgaaggcactttatgtactacatggaggtcatatctggttttgtttttatttttttatcatgaacattaaatgtgatgatgatttcttttccctgcacacatctttccggtgcaatatctatcaattgtgaatctggctgctggtgtataaaaacctggatgtaaagctgagcctacagacctgtcctcaccaactgttttgtgatttctactcaactacaaagatttatttaatgtactcttaatctaactgagttttgttaccaatgacctgttgcatgcttcaataccgtgtactgcctgagttgtgcctcttgtgtgctagattaaaagtgagacagagacttgacttgatcctctgagctcaagctattgagctggtagtggcagaggactgagggtacctgcacagtttgattcttttccacgtgtaagtctccattgcagaattgtcgtgctttgagaaaacacctgaggcagtgtgggagttgaacgaccctgctgtcctttttaacctgtgttgtcctagaccctgtcggggcagtcaggggacactagagatttgatctcatgcgagtcatcaataggacaaaaaagttgtggtttggggaggtctgtttgttacataaaaaggacctttcggtgtaagaaattgccgtttttaccctgccctggctggcatgtgagaagccatggaaggttgtggttgtaaatgagttgtctaaaggggtgcagaggcctgaggtttctaaaagaaggtagatttctacagagctgagtgttggttcctttttcttattggttgaaaattacctggtagtgatcagaaaacttagatgctatgtaactaaaaaaaaaaaaaaaaaaaaaaaaaaaaaaaaaaaaattcccgctcatgagttttgactattggtgagatgttttccgctacagttaacatgacaaatgtctcagtggcaaaaatcccctttttgtaagcccccatagtctagaggcagttttctttttaagaatcatgccagagcctgagtcgagcagtatgctttcttggtttttgagagtaattgtgtaattgtagagggagaaatccaattctaacctaagaactgggattcttctgtcatcttgtaaaccgtatattgaaaaaaacagaatgtcactaaatgcatattaagtcaagtattggaaagtataaaagaaaaatcattctgacaatttctaagccagaagcaaacaagaattactgaaatctaccccatgaatacttggaaggcagtaattgtgagtgacacctcagttcatcaaccccttaataatatcagcttaattttaatgacaactaaatatgctgaagtgaggatttagtattttttaaaaaagcaaaacaaggttcagtagtcctcagcaattctccaagtttctctctttgcctaaaatggtcatagatcttgatttctctgaatcgtgatgaccacacccagtcatcttcacagcataattgcaggtggcagtaaagagagtgtgctgggtaaggagcagttgctgggtcattccttgggccccgacctgcccggggagtagccctgggggagagagggcagtgttgcctatcccagaggtcccagcagtcacactgctctgcaggccgggctctctttatagccagagaaatcaccttaatgcagtctctttagttgtctgctgaagctgtagttattatgggccacttacatgaggctgagaagtacgtgccggagctcacacactgcctgttgcggttctcttaacatcagttatcacagctgcctgtgggtcccgggtatttccattcctgccccttgttggcccgaggaaggatgtggaaagagcacctggtgggatgaaggtccaacagcctgtgcctctccactgctggccctggagccggcagcagtgaggcattcattgtctgtgttgcggtgtattcccagcttcagtgctcttttcctttttgcctgaaatgtttatgcttctctgcagccagtcctctaacaaatctcaagaacaaaggtaagacacttggtttttgtttccaggacccttcagaaggtgacatcagatattccctaaattcagacaatgagggatacagagcgacttggcatgtattatttctcccatgtaaggacaaagggacagattattattgttatttctgagacagagtcttgctctgtagctcaggctggagtgcagtggctcaatctcagctcaccacaacctctgcctcctggcttcaagcgattcttctgcctcagcctccccgaatagttgggattacaggcacccaccaccacgcctggctaatttttgtatttttagtagagatggtttcaccatgctggccaggctggtcttgaactcctgacctcaggtgatcctcccgcctcagccttccaaagtgctgggattacaagcatgagccaccgcacccggcctcacagtgacagattctgagaaacagcatgcaaaacatttgaaccattttctacatctcccattgttgcatagagagtgtgcaccgctgctatcttgccagatccacactggtcctcccgaaagccaggttcatacacagcaactttttaattattctaacagttacccattaacagtcgactcctgtatttctgagagtcttgtactcacctctgaaatttaaaaacgtataaagagagcctgggttaatcagttctgcagcccctacgtgacactgtgctagttctccttcttctgtctcctccttaccctggccctgcacccctgtacttaagagggagaggtgggaggtgctgtctggtatcatttgctgcctcgccagtagagggtgccgctgtgcagggtaactgcccgcctgctcccttcctgacctcccctgaccccgaagatcactacctctgtcattcaggcattggggtacatcctgataagtcgtgtcagaactgccaatttcaggactgagatgtgtttttaaaaaacaaatccttataaactccactttgtactttagattttaaaactggggaaaaatgtgatattctttggaccacttttttaatttatataagccttaatgaacagtgtctatacatttgcatacacacacccccaccccagagtgttctcagtatgtcagagaaagtgccacagcattaggacgggagcttggagaacgttttctagaaaagggttagcttcctgttggcatgaaattttccaagcaaacctcattaaacatctgttgtttgttaaagatgttccactgaaagcaacgcatgtttcaaaggcacgtctttccgttcgttggttttctgtgtgtaaggagtagcattgctgttggcgcctaacctcgcgtgcactgcattctcaaccccgtaccagtgcatcatcagaagccttcctcgtgaccataactctgtgtctgcagatatgtgttcccgtgtaagccagttttccccttttactcagactgatttcacctagattgtcacggtttccttcatgttaactttgcgtgactttgttcttcctttactactctgtatgtaatatatatacatatatacgtacatatgctgtccaaatatatttgtatatatttgtatagcatttttacacctttattgagtaatctggtttcgaaaggaggtgagagtttagtcccttctgcagttttctccaagctgtgtcctgtgaatttcaacccttggagcctaagaaaaccctaggaagatgatgttaatttgctgtcatttcctaattcaggatctatcatcaaatgaaacatgaaaaaaacagtgacttttaaggtgaaaagagtttcaagcattccaaataaattatcaatgtttcataactttttattataaacccacctcctaataggaagccaagtactatttgatacagtggtaaaaaccaaactaccttgaatttttttaaggcaacttatgaataatgctcattttcacagtcagaatagctttaaaatatggttgaatttgatacacacaggaagttttcttgaagaacaatcctttcgcttttcttttttcttgagagatctaaagagaaactgtagattgttttcctgacagcaaaagactaatgtgacaaaatgaagtcattgtaaagaagcgatgcaacttgtcaaatatttaataaagaattatggaagctggaacattttctacatcaagtgttatgggttgtttgatttaaagcttctttgtgaatgcaccatcttaattgttgtcagaggggtttaaatgcctgcagatttatagtatgttcatttccttcatctccctaaaagcgccgcacttttaaaaacattaaagtctggcagggcacagtggctcacgcctgtaatcccagcactttgggaggctgaggtgggcagatcactgaggttaggcattcaagaccagcctgaccaacatggtgaaaccccatctctactaaaaatacaaaaaatatatatatatattagccagacgtggtggcgcatgcctgtaatgccagctactcaggaggctgaggcaggagaatcgcttgaacccgggaggcagaggtttcagtgagctgagattgtgccattgcatgcactccagcctgggtgacagagcgagattccgtttcaaaaaaaaaaaaaaagtctgcccaaaacacatggcttaagcctactaaaaggatgcacatttattcttatccgtctgctgttttgttcttttattaaacttgagaattactgattttacgtaacatttgtataatccatgttagtctgttcctcaaaaggcatccttgtatacctagccctcaacttgtgtgagagttaataagactcaataatgaatccccaagttgcttctcagaaaggtgctgtcagaatcccgaccgtgtgtcactgccctgtgcaaagccggtggcatttttcctcatgccatttcattccgctcagatcatctcagactcctggagaattttccctttttctttagtactgagcttcctcttgatgtgcttaacccatcccctcggggcagaggagatagctagcggggaagcaggacatcatttagtctttggtttcttgcggcttgtctttttccattaacagtagatggcatcttgccagaaagctgtccgcagcacttggaattcctgcckcctcctccagggttatgagtacacatgagaggcacaattggacagagtcactgtgaatatttatatgttctttcttaaaaccacacatggtggaacgaattacatcaatgacacagttgctagattaatacgcttttaacctgctctgaagtccaagactcattaggcacttgtgagatggtgaagcccctggtaaaagtgtttgcggtgagcatgggtatcctgaattctgacactagctttctcggggttggctctcagagccatgttcaaaggggttcctgaggtaagaacgcagaagcctctttctgggagagaacacttctcaaaacagcttccagagagctcaggctgtagaatctctgaggaatcatttataggacttgaactgggctggaaaaaatttgagcatgagtttacttaagacccaagacacagtccttggtaagtaggccgcagtgcccagatgtgacccagtggggactcaagagggcaagaagggagagtccctgttgggaaccttttagggctgaccttaggccagactgggaaaaaggtcagtctccccaattagcctgttgctgtgttccttcctgcccagcccacttcacagtgccccgtgctgctcatgtgcctcctcccctttcctctgcaaagttcccagctgggctgcaagtctcgggtacctgcagtgttgacagcgcagagccctccygtcacctccaggcagagtggccctcacttcacaggggcctcctggggacaaggcgtcctgagccctccgtgcttccgggtgaaggtcagagactgtccctgtgtcacgttctcccaggcccactcaaagcacaaagtyccacaaggggttgtggctcttccaggtcctctgctggtcttactgccttggtgtttgaaatgacgactgcaacaacttcatccttttcttggccaggtgcccccagaaactaccttttcagatatgcccttttaccagggctccaggccccctccctcacagctctgcagccttgctgcacagttccccatcggaattgtgaggggagaccgtgtttcctccacatgcttttgcccactccccacatcagttcttggagtaagccttttttcctctccaaggaaagggcttacttgcagacgaattagtttggaagtacagtactagagcaagcacaaccccaaactgagcagactgaaactgaatagggcccagaggatgggtgagagccacattcctgtgattaaaggcagatttgggtggtgtctaagcaatacccttcctagggagttttaaatactgttgctagaatcagggagtcgagttctcaatcctgtttggccttatccagactgagtaccaaggctaaaggcagaaggttctgcgctgcagagtgcccaggtgtcagcggctcgaatcacgtgatcgcagmatatgtggccctgcagggccggccttgctttgtctaaacgctctcctttttcatgtgagtcccggggttcttgcccttgatcaatccagatatgaccagtactgtgggcctggagggccaggttttgttgtcatttgtggccttggactctgctggggcagccttgcctcccctgtacagacccagaacagctgcccctgtgggcgcttctcccagctagaaacctgagggctgatgggcgaaggtggttggcttccgactgcccccgtgggccgcggaagcgggcaggacctcattcaccccaccacctccaccgaggggcttgtctgcagcagaggggctactcaacattgagctcaggaagggaggccaggargctgcatgaacggcccagcctgggcagttgggggcagcggggaatggacagaccaccttggcctggaggtaaccccagcagagacacggccagcagagttccatccttccgcttcccagttcgggcagaaaacccaggttttcccaggaaatctgcaagcacattaagctggtctctcctttaaaaaggtgcaaggatggagacagtcctacctgtcctgagcaggatgggccctgtgccaaggggccaggcagtagcaggctggcactctaggtagggaaggggccaaggatccccaagaggagttgacagcaagataatttaaagagcgtaagtaggccaggcgcagtggctcacacctgtaatgccagcactttgggaggccgaggtgggtggatcacctgagaggtcaggagttcgagaccagcctggccaacatggtgaaaccccgtctctactaaaaatacaaaaattagccaggcgtggtggcatgcgcctgtaatctcagcyactcgggaggccgaggcaggagaatcgcttaaacccgggaggccgaggttgcagtgagccaagatcgcatcactgcactccagcctgggtgacagaacaagagactrtctcaaaaagaaaaataataaagagcgtaatctacctcctgtaacacatcatcccggcatgggagtatatcttggcaaacatccgcaagaaattttgtctttcaggacagggacaagagcccaccatgccctctgggttatgccttgtcttcctcaaaattgaggagaagcccttgagctggagcaagatccaaaaagctggagcaaaaaaagcagtaggtgggaattagggccctcgtaccccggggcctgctatactctccagtcctcaatcttcgaacagtgaaccccgagatgtggagctgggggagctggccctgaaggccgagacaagcctgcagtccacaggcacgggcccgggactgcccacacctgttagatgggcacaaacggggccttcgctgcccggcaccaatctcctcttgcactggggccctgtttccatgcagtgccaggggcctcaatcattagctctttcagtgtaatttgcctcttttggtttaaaatagtctttgggggataaatattcaatttctagattaaactccttgttgaggctctttcctccggaggtccctggtggatcctcatgggacaggctgaggcgggctctctcctcgggcctagggtgtcatgctctttgtcccctgaatggggtcgcaagtactccagggccatcctccagggacatcttgctggcctctgtgatgctcaccygagccccagctggtcggtcagccctgaggctctcagccatggggtcaccctgccctcaccacagcctccctttgtggcactccagcagggccctcagcccttyctgcctctctgagctgctcacctgcacctgagtgagcagcctccaagccacctgccagagcctcccacggggctgggaaatacctagtggcactcaaaagaaaagggaaggaaatgggaacaataagccaagctgccgtggagagtttatcttcagccttaagcatctttttacagagtgaatttcccctggggacagtggtcttcctgccatctgccaagcttctggggtcttcagtttaccctcttataatatttccacaccagcctaaagaggtagatattattagcaccaatgtacatacaaggaaacagactaggaggttaggagactcgcagagtggtactctgaacccaggttgtctggctcaaaggcatcatttaaccaccaactctactgcccattcactgcccctccatcaaaacctcctgtctgagaaaccagagtgtcaagacagaagaaatcatcaataacactgaaggcagcacactaaaggggagaaagaagactgggaagtggtcgttagatgtgaccacctggagatctgccatcctactgcccacacatcctgaagaacaataaactcattcgtactaagatgtgaatgactgataggctaaacacatgacccttccagaagaatttttattttaacaaataccaaaggtgatgcttggtttatatcaaaaggaataaagatcaaaattatggcatttatgtcccagcaaattggggagggtttttttttgtttttttgtttgttttttgttttatttttgttttttgttttttgtttttttgagacrggktctggctctgtcgcccaggctggaggtcagtggcgcgatctcggctcactgcaagctccacctcccrggttcacgccattctcctgcctcagcctcccgagtagctgggaccacaggcgcccgccactatgcccrgctaattttctgcatttttagtagagagggggtttcaccgtgttagccaggatggtcttgatctcctgacctcaagatccacccgcctcggcctcccaaagtgttgggattacaggcgtgagccaccgcgcccagctggggaggtttttgagggtagggggcatacttaagtttacaaaatccactgacgccagtggaatacgggatgccagcacagtgggaaaagacagcctgatctctgggacagccccagtttcagcacttaaaagacactgcactgcctttctggctgccacaggacagaaccccccgcctccctccagcctttcccacaccacaaaacaagcatctaatattttccagggaccttccagggacaacacaaacttccctttgtccaacagaattgaagggtgaagggaccagagactgaggactggattttctactcccaggaactccttgatggagctctgagatgctgaattttttaaagagtttctgttattaaaggattttagatattaagttgtaacatacagtcaygcaccacatagacatctcagtcagcaatggactcccatagacgatggtggacccgtgagatgataatggagctgaaaaattcctgttgcctactcatgttgcctagtgacatcatagcctttgcaacccatcaccctttctatgtttagctacgcttagatgcacaaacccttatcattgtgttacaattgcctgaacagaacagtcacatgctgtacaggcttgtagcctcggagcaataggctggaccatatagcctaggtgtgtagcaggctatgccatccaggtttgtgtgagtacactctgatgtttgcacaaygatgaaatcgcataacaacgcatttctcagaatgtgtcccagttgttaagcaacacatgaacatgactgtatttaatattgtttatagcagaaagttagagtttgggatttgtcttttgaattctagttatgtagctctcttagcaattctaagactctgccactagggtcatcaccctccctcacaacccctctcaccatgacctcaacccccatcctggccccctcttgccttctctgcattctatatttacttagaagatccttgcttgttcatgagttgagattgtcagggggacatgccctccgcaatgtaatgagtgtttaaacaacagtcaggcctttgaaccccaggctccagttaaaaagtaacaggctagatactgaatcaataggaggcaaatattagctacggaggctgagagagaccgagttgggaaacacttgttgctggtgacatgcaaagagcaatggccatacccacctgaggtccaggaagccctgggagccccatgaccttcggcctgtcattgtcctgctctacatgttgtaacattgaagccaccagcccttaattagcttctagacctccctcagtctggacttctgcaatatcccactaaatggtgtccacctgatttttccccttcccagccatcttacactcatgtgagcctgcttccagcaaactctgatcttgtcaatcttctgctggaaaattttccatgactccccattgcattcctgactggtgcgcaagggcatctacctgctctttgggacgtgggcagggggatggcagatctccaggtggtcacatctaaccaccaattcccagtcttctttctcccccgtagtgtgctgccttcagtgttatcgatgatttcttctgtcttgatactgtgtctttggtttccatgacatttcaatcttctggttactctctcactcttcaaatactcctactattttttctcctctcctaaaggtaggtgttccccaataatttgttcttggtgagctctctctctctctctctctctgtgtctctttctccttttcctcctcctcytcctctcatggcttaagttagtacctccatgtggacaattcccaagtgtatctctagccccagcttctctcagggccctcgtctccaaaagcctaatggactcatcgtaggacattcctcaagtcacccaaactctaaatgtcccaatctgaactcacacttttaaacctctcctcctccgtatttccaaatctctgggagttgttctcttgtatcttccaggcatccacactggaacttcctcagtgacctttcacatggttttgctccctaggttgaaagagtgacaaagttcagttttctattcatgcattcactcattcattcaacaaatatgcattgagtgcctgccatgtaccaagcactcgtaggggttaggaatacagcaattaaaacaaaacaaaagaaagatcacttccatcatgagatatttatatgtttctcatttagttgcctccactagaaatatgtttctcatttagttgtctccactagaatatgtaagtacaatatatggtgtgttaaatgttgatgaagccaggggaaaaaataaagcagacgaaggatccaggtagtatgggagggtgcaattttggatggggtgagtcagggtaaagagcaccaggaggtgagtgagcaagccatgaggctttgggcagagaaacagcaaatccagaggtcttaaggaggaacaggaaacaagatagagcccctttgggactataccaaggtgagccatctgttagccaagtgaagggtcaagtagaaagtggaaggatcatggatgtcaaggaggtccaggctggagctaaagcatcatcagcgtgtatatggtctttaaagctgtggcactgaaaaggaggggtccaaggacaggagcatgagatggatccaggaaaggaggagtggccagagaggtgacaggaaaaccaagagacagtggtgaccctggagaaatttggctgggaggagagagtttatttatgaaggacagaccaagcgtggtatggcctgctggtaggtcagcaagatgaggactgagaagcgacaactggaattatcaatgtggatgtcattggtggccttaataggagagattttgctggaatttgggggcaaatgcccccaaaagaaggggaagaggaactggagacagggacacccatcacagctcaggcatctggattcttaccttcatttccaccccctctccaccttgcttgcctctgtaactgctgcccaagttatgacaataatgtcctgactgtacctcccacttgttcccttcccagttcccagtccagtttgcactggtgcagcccaactccaatatctacattctcttgcagaaacccttcaaaggcttgcctgtattgaccaatgaaaatgaaactaaaatctacactccttatgagcaagggcattcaaggtcaggctcataactcaccttttctctacgctcctatagtcacatcaagggaaccgttccatccccatgcagcccttgcattgctaccttctcgcctgtgctcccaccactctctctactcagagtgaccttcccatatatccaaatctagccaaccttcagggcccatctcaaatgtcacctcctccatgaagccctgcctgattcacctcaccaaatgaagttccaaccctcctctgagtttacagcactttgtccctttctgtctcttattgtggttattagtatggctatctccatcctatacatcacccgaagcacctgaaagcgtggggctaaatcaatgctctctgtaccttggatgctcaataaaactgccttacagtaaactagatggtgctggggaatggggatggggyggtgtttctggctatagggaggtttgggattgtctgtagatttctgtttgcggatctttgctgtttcctgcctgtgtgtgttcctgaataaacagtcagacactggccaggctgccgaggattgcccacctcacaaccctgacagaggggccgggttgactacaagacagtcatttggggctgggagtctgaaggagaccgagttgggaaacacttgctgctggtgacatgcaaagagcaacggccatacccacctggagtccaggaagccctgggagccccatgaccttgggcctgtcattgtcgtgctctacaggtgattacagaggctcacacctgtaatcccagcactttgggaggccaaggtgggagtatcacctgagcccaggagttcaagaccagcctgggcaacatagtgagaccccctcaaatctctacaaaaaaattttgaaaactaacagattagccaggcatggtggtacttgcttgtagtcccagttattccagaggctgaggcaggaggattgctcaagcccagaagttggaggctgcagtgggccatgatctcaccactgcactccagctgagggacagagcacgaccttgtttctaaaaacaaaagtcaggtagagtctctgacaagagtgcaaaaggggaggcaacgtgacagtcgtgaagacactgaaactgcaggaaatgatctgagacagtcacgctgccttggcctgagtgttttggtgcctgtcggctctccgacattggaaaggtttccygaaaagtagcaaatgaatgagctgccttttttgctctgcctctcatacttacagacacaatttccaagcctcctggtctcagcaaaaatttagttctccagagatgccagtttccctggaggcctccaggtatccgagccacacttggctgtccgtgcagaggtgcctggcaaatgactcctggtggctgcttagcgatctttaggttttcactgaggatacgattaagggacctagtgtttgggaaaggaggcagccctggaggtgagcctgccctgcttcttggtgtgggactgagaagctgcaaatgagaatagcaacctccacttgggatcctcacagctcagaatggcgggaacatttcaggaactcacaggtggagttcccaaagatcatgaggggaaagcaccgaaaatgtaaggtgggggtggggggggaacggttgcaaaatggctgatgggtcccaactcatctttatttgtctttcctgggattttttaaataggaaaatttcacctcaaaatcaagtcttctgaccttgaagggcagaagatgaatgtaaaaacaacaaaacttagaaggcctggcatccgtcagctggagctgaataggggcttccctctttagatggggcatggacctcccagttaaccacactgcccgtcgctccctattatcacttctggcccacatccctcattatctgcctggcctatgcaagtgtttgagtttgcaacctctctacctggtcataggaaattaggatcaaatcaggaatgtaagttatccaaataatcatcccatttctcttagaatgtgctgttccctctccttgttgcaatacatcctaagggcctggggcctattaactcatacatcaggcactcaacttcttataattttctgagtctccccatcccccttcttctaatagctcagttgggctgggtgcttccaaggtacgtttcccagtttcctgtcctggagttcttgccttcctccagcctagaaaggctgggcctaatggagcattttccccttttgatattggatgagtctagctttatcatacataaggagaagaaaaagaggatcttagagatgaagtcttcaactcattctcccaatctcagaaaattcttttatcaaagacattctaatgccttagaaawtctcctctttttcaaaaccctgcccaaatagctgtttaaaaacatcatcttcccagggggtcctatttaccccaattrggaacagcctacccaaattgcatgcytggttctaaggaggagaaacaaaacagccatgtgaaattaattccacaaatcctacacgaagattatggggtggggttggggaatatgacacagaatggggaagacagacgcagtttcttctgcaagaaagaattcattcgttcaagaaacaatcaagaaacaatcactggtcattgtttgcaccaaggattgtgctaaatccatggtctttgctattaggattttcatttaatgtcaagaaagaaactaatcagagtaaaatgtgccacagatgcgggattcaaaagtcttcggtctagatgtattatgtaatgcaggtttgtttatttttactttaggaaagtgataccttttatatgccatccattatgtaagatcctcagcagagtctggggcagcaccttgtcagcaaacccattaatatttctacagcaaacatatgaagagtcacactaagtggagtaaataaagactatcaatagctgcatgtcagttcaggtcaggtttttgccatcacatatggttcttgccacaagtcaggttgcttcacatttacaaaaaatgagtcttggaacagcagacaagggcttgtgtcccttcccagaggttcaggtccaggtaaagaagggttcatagaggagacgttgctcaagctgaaacttgaaagatcaactggacaagatgcagaagaactttccaggctgatgagccacaacacacaagaccacaatctgcaaggattctagcaacccaccgggcaactagggccaatcctgagggacacaggatcctgctgctcccagagggtggcaggtatccaggtgcaacagtgaccaggtggtactgactacctgtgccagcgtcacacaactctgggccctcactgtaagcatccagggaaccaagtcctgcaaattgcatttaaacaagttctccaggagatttatccctgctaaagtttgagaaccaccaatttatttgacacatcctaagtgtcaggcattgttctacattgttttagaaatacgagcacatttaatcctcctaacagccttactgggtagatggagaaattaagataccaagaggattaaaaaactcatccaagatcgcaaagctgtgagagatagaccaggaagtctggttgcagtttttatgcttttaacctgaatgctgcctttgtactgcttcgggcacccatcccaagtgacagcctccctccacctgcagccacagtgaacctggggccttgcttcctctgcggtcccggctgtgttctctgaaggtgcagatccagccccatgtgccccgacccacagggaccaggacccctgtacagagcagtcctcaggagaaggagtgaaagtttgatctttcacccctggggttggaagcgacagagagaggttgacaagagtttgtgataagcctgttagccttgggttcaaagcccatgttgctctcctttttatctatgttgttgatatctgattcaatagcttctgtttgaggaggaaaagccagaacgcaggggcaggggattggagtctgctgaccggatggtcaggcctggagagcagtgtgctctcttcttgtgtcaattccaaaaggcagggtttggaaacaaagtcaacagagagcttttcttcatctccacataaacagccattcagcagtgtttggggagttgggcaatgctagatggggttgggtcaggggagaagtcaactttgacttataggtctctaggctggcctgggtttccgtgtttctatcagcttgcctccagctcacatcaaaaggaaaatgttccaggcttttgtgcagccccacccacctaccatggaattagtacaggcaagggagaatgttctggaacatcctgtcttctcgactcaccctgggtgcctaccattggtgtgcgcaaactcctctcaccaagcaacctctttttgatggccccagagttctttcttgctcaacgacaactgctttctagcataagccaattctgaaaggactggaattgggcccagggtgaggggtgggcatagcaaccatctactctgagaattttaacaatagagagggaagattagagattatttgctccaaaccccttgcttcatagatgaggaaactaaaactctgaaaggagagatttcttgcccagattacccagttagcaaatagtggggataaatcgaagcccactcactcaacctccagtaccatggtgggttgagtttttcccatcacactatttgacctcttatcatttgtctccagaacttcgcagttcatattcttagtcatccattgaacctcttcttcattcattctggagtttcctctagagccaagcgataggctggaacctgggaggaactgacagcaggatccattccttccttggagaggccccggagggggtgcctcacccctccttcccccctcccttcagagctctctcctggctttggagggaagggagcagaggtgtctgagccctgtcacaatcctcatgtcccctcatctgtcacccacgaaggcagctcctagcaaaagcctttgccgactgaagccactgaagtaaaaagaatgacctctgccatgagcacctctaaaggagaagaagcaaatgggttgaggaagttacagaatctaaagcaggtgcagatgggagcccgttcagtgggaagagcttttcctttaagaggaccggaactcacaatgggttcagtcgcagctctactgataggggtttcactgatctgctgagcgtatgatgtgctgtcagaaagccctagacagcttcctgaatcactgagagggtttccgagagtcaatggaacaaaaaattagaaaaggaatggtgttctgttgagattcttgcaccccttgaaatttaatctgtcattcaaaacgattcactcaccgacaagaaaaactaaaaatatttaagcatgacatttgccttcattaaatagtcattttgtcatacatggctggaaattgagttttctgaaagattactaggaattgtctgcctctgctgctgggtgtttgtggcttcaaaatgaactcgagcatgggggatgcccacatgtgcagaaaggatctcagaactaagtccaagctatcaattcatgcattaggttggtgcagaagtaatcgcggtttttgacattaaaagtaatgtcaaaaaccgcgattacttctgcaccaacctaatattagcagcagcaattggattcaactactttgacaaaaatgcaaagggcctggtggctgtgcctgccctcagcctgctccagggagggcaccctcctgtccctccatgagtgaagctgctctattccaagctctggaaagtaactgagtcattgagtttgtctctaggtgattcaggtgcatcaggtttcacagatggtatcacccaggacccatctgtgaatttagagaccctcattctgtgagtcaaacccacagtgtttccaacccaggtccatttcacaggtaagggctgatcctcccactctgtaatacaagcgcctaaacaacatgggtccaaggatccagaacttgacctgaaagggaacaggcagaaggattctgcccccaaaggatggggaaggaggaggaagccaccaaaaggacaagagcgaggtgctggaagagaggccctatctggagaacagagtgcagagaacacctgtcccccagggtggggtgggcctgaccctcacgaaccatgctgagacagctgagcccagacccccaacaaggcagggcagcctggctactgggcacgcaaattcaaaagagtttgagtttgagggcagaacagcagtcttcaagaggcagaggatgtattcaaactatgaaaatatgaggctcaactctgaataatgtttccccaaattgattcaaacaagagacaagctcaaggtctacgtgggaagctgcctggcagcactgtttttgaactagcaagagactgaaccaatccaaggaacagtttaaaccaatgatggcccctttttagagccggttgccgtggcacctggaaggagttgattgagaagtctcaatccatgaagtgtaaatataaagtttcttttctgccccctaaattgcctttgtgccccctaatttgcctttcaactgccttgtgtctaatctctcctgactgtcctttaatgacaacttgggcagatcctgcaactttctgtagttggagtgtgtccagttctctgtaaatttcaatcttgttaatgttcaaaagcctcccctccccagcagctgccgagcggtggcctgggccgagctctgaggtctctcctgatgttgggggcaaggaaggtagccagatggctgagttcttccacttgctggtggcctgtcggaggcaggagctccctggtatctgctttagcgaagaaggttctgtagttggagtgtgtccagttctctgtaaattccaatcttgttaatgttcaaaagcctcccctccccagcagctgccgaggggtggcctgggctgagctctgaggtctctcctgatgttgggggcaaggaaggtagccagatggctgagttcttccacttgctggtgggcctgtcggaggcaggagctccctggtatctgctttagcgaagaaggttctgtgggatcctggtggtctctgaggtggtgggtgtggctttcatgggagcagtgttcagctccaccccaggccctctgtcactggggacctgccacaggaaggggctttgtccccttttggtccagcctggggaatgccagctcccaaggcccacttttggcactcctggagcactctggaaaagctccagtaggtcctcttggtagtgctgaggccccagaactgggatggcagggctgtctctggcttcccagccatagcgtcctacaccccacagatcccttctgccctctagcacaggcagccagcgggtacccagcctctatggtcacacaagcttcctcttggctgtctcaatgcccttcttccatggcgtgccctcatatggaccctcgattccgcggctcagcgagcatcaggctgaaggcccgttgtctccccttctagcaagctccacaagtgactctccaggatccctttcccatccacctacatgacaggaagctttttgggaggaaaggaagtcacgtctccccaggcagacagaagtccccaaggctgattttccacctcctcccaggcctagtgtgctccccacagaaacctgcctgggtggttgatgcataaggaaggtttccaagtcctcttaagttatttgcagaggcgacggcggcctctggtcagggctctctgtagaatgcaggaacacctagcatcttttgtttacatcatcgacccttggctgtaattccagaacaagtggaaaagtcccacatcacatcctattactcatccaaaaataaagaataaaggaactctatgtgtactgacacaaaatgacctcaacaatagattgtgaaattttaaaagccaggttcggaacaccatatgtaatggccccaatttgtaggaaaatgtaggctacaatctacacatatgtgtccatggtcgtagtctatttctgaaaaggcacaggaaatgggtaacagtggttgctttgggggatggggcctggggtcccacttttcattttaggcttctttcaatggaaggttcagagcaggcaccagctgagacaacaagctgggaaggcagagagaaggaccaattagagttgcctttacattcatgaagcaaaggaaaggaatgggtgatagagggaaaaggtggcatatgtgaagcaaagggagaagggctttggtgcccacaaaggaaacaaagacatattacttttattaaatttactagccaggcgcaatctgcttgcgaagaggatgagaggcagtttaccataaaaggcaccagggacttattagtctaaaaacaggaaaaagaacagccagtggaaaagtagtgaggcgagggaataattgtttctataacaaaggcacagacttcactcttccaccctcatgcaaagcacttgctcacacactgtctcatttcaacatcaccgccacttaaggagatgctatgatcaaccccactttgcagatgaggaaacttcagtcagaagctgccttggttggtgtagatggcacaggggaccagcctccactttttttcattccaagcgtgattcttttttctgcatatgctcccagaagtctagtgccctagataataataataataatggtacttttgcatgtgcatatgagaagcccctgacatgtgtaccatctcaatccgtcctctcaccaaatgttgctcttagtcgtgtttgcaccttcactctacagaaggggaaacaggttcagagatgttcagtgactttgatagggtcacagaatttgagattggttgagcaagaattgagtcctgggttcatagctccacctccctgccctgaaggggccagcacaccctttggcccaccagagaattctgcctagtgacaagtaccgtgaccattggctcagcatcctctctgaagtttctgacttccaatgctgcaagctgaaatgcaaaagggagaatttaagtttaaaacaaagtagctctgacagagtgaagtcttcagatatggaatttacttctaagataaatagtaaaaccctacattgcagcatgggaaagaaggaggttccctgaaagtttcatcagataacgaagtctctcacttcaatagctcagtgtattacgtagaacacgctcctagtttttcttcccaatcacatcggcttgttccacctattacacaaatgtgggaataaaccatgagcatcttgagacctggctttacattcttcatctgcatttttcaacagcccaggacaaggcccggcaaagaagggcctcaaaaatgttggatagatgaatgtatggaggaatggatgcatggttgaatggatggatggacggatccatggatggatggaatggataaatggatggatggatggatggatggatggatggatggatggatgcatggatggatgatgcatggatggatgatgcatggatggatggatgcatggatggatggatgcatggatgagtggacgcatggatggatgaatgaatggatgcatggatggatggaatggaatggatggatgaatggctggatggatggatggatggaggcatggatggatggttggatgcattgatggatggatgcttggatggatagatgcatggatgggtggatgcatggatggacgaatgaatggatgcatggatggatggatggatgcatggatgagtggatgcacggatggatgaatgaatggatgcaaggatggatgtatggatgcatggatggatgcatgcatggatggatggatgcatggatgaatggatgcatggatgtgtggatgcatggatgtatggatgaatgggtgcatggatgaatggatgcatagatggatggatgcatggatgaatggatgcatggatgggtgggtgcatggatgaatggatgcatggatgggtgcattcatggatgtgtggatgtatagatgtatggatgaatgggtgcatggatgaatggatgcatagatggatgcatgaatatgtggatgcatggatggatgcacggatgggtggatgcatggatagatggatgcatggatgaatggatggatggacagagagatggataggtaaatgggtgtatggatgagtaaatgaataaatttttcctgcatgcccacttctatataagcctcattgggaatatagcatcaacgccttgagtgctctgggtaccctcacccatcataaaagctttgagattttcctccccgttatgcccttagggagctgccaagtttaaaagaaatccagttgccaaaaactaaagataaatcctcggctttctttattcttaaaagtgttaacctcttcctggttaatgacccctctggtccatgacattgcagggatcctatctatttggcttactcttgtatatccagcacttagcagaatgactggaacacaagagacacccaatcaatagttactcaatgaatgaatgcactcacgtcaatctcccattgaggacctcctccttcacctgcttatccactctggctcaccaattacagagaacatcagaggtcatcagcaaggtggaatctattcgctgtggttcaactttgtctcccgaactgcatggtaagcatctcctacttctgatgtaccccttgcagcacgggacagtgctgggagcatagctgataatcaatacatacttgtaaatagcatgattggcctccctactggccttagaggcactgaatcaagtagttataaacccacctgtacatgtaaagcagcccctgctcttttcatgagccctggctcctcaccccatctctgtttaagagctctggatgtctctgttctcgtgtgtttaagtgtattggcatctgttctctttctggctgttgctcatataaaatctatttatttcctttactagtgaccactaaacattattgagtgttgtgcctatccaaaaagaatggactatcactcccaatatatgtatatgtttacttataagttatacagatgtttgaatatattgtatacattaacatcacatataagatatagatactaaaaaggattaaataaatactgaggttctaacactttcttctggcaccacagaagaccccctgcatccctccaggagagcttagttctaagctggagactcctggccaagagtccagaaacgcaactcacttatctcctctgtttgcgggacacttgtgcctgcggaagatgaggaagataatagcaataaaaacaacattaaaaacagctgccatttcttaagtatttattatgagccaggcactgggctaagacttttaagccaattattctcatttaagtgggtactgtcatatttcataatatatattatatatataaatatataaatataaatatataataaatatgcaaatatatattcatagattgtagcttacttacctatatggtgcggaaaatggcaatgtttgagaatcctcatatttctttttttttttttaccactgagatggtattttaacttctttctccatctccaaagcctgctgatgcaggagttggggtgcgggatagaactggcactgaacttggaatcaaaagatgtggacttgaatcccaatctggctcctcaggaactaagcaagccccctgaaagcatttcatgttagtgatgtcactcttctcatctgtaaaatgggaatacttttaggtattttgccttgctatcatgaggatttagtgaaaggaaatgctgcaaagcattaaacctgtgtgtagcggagtgttccatccaccccacaatcacttgagccatgacatgcaagagtacccatgtgaaggtgtgcaaagcgaggcgggagaagcctcttggagaaaccccacttttctatggctgatccggggtcttcctggcttcaaccagcgtccctttcacccatcatgcccaagggcaaagtactatcaggttctgggattgccttctctagtatctatcagctatggctaccagttgtcctctacagggaatgtccttcttttggcctgaaatgtcagctcttccttcatttttccttcctcattcttcttccagaatcaaaaaggagacataattttccttgtacaaaacaccaagccttgtccttgctattactcaagcctaaaggagaagcagttccatgtgggcaatattagcaatgatggctgattttttttcttttgagacaggatctcacttgtcacccaggctggagtgcagtggcatgatcatggttcacagcagcctcaacctccccagtctcaggtgatcctcccacctcagcctcccgagtagctaggactacaggtgctcagctaatttttttgtgtttttttgtagagatggggtcttgccatggtgcccaggctggtctggaactcctgggcttaagtgatctacctgccttggcctcttaaagtgctaggattacaggtgtaagccaccacgcctggccaatggctgatctttgaagccccagagaacaacgtagatgaaatttgtagatggagaaagaagttaaaataccatctcagtggcaaaaaaaaaaaaaaaagaaatatgaggattttcaaacattgccatttttctgcaccatataggtaagtaagctacaatatatgaatatatataattatattatgaaatattataggatgcatgaagttgcagaggaagcattgcacttcatctttcattcacaggttcattcatcctttcagccccaagtcaggtgctgggcagatccatgaaataacaatagtatctcttcctcatcactccatggtcaaagctttagaacctgcccagggagctgggctatgtctgaaagtttaaagaacctggtggaggacagagctgcatggcccaggacagttccccatgtataagccgggaggcagatgtccatccaggggggtctgagggagggcctctgtgccaaggcctcatctccaatggcccctgataaaattccagtatgctggctgagagtgtggcccacgaatctattagcactttaatatgagctaacttatcatagtctcagcaggagaacagaatggaaaaggatcagaaagcaaatcaagtaagctttcgtatacttaattttttggattggtattatactaacatggttcaaaattgaaactatgcaaaggagtacagtgagagttgtccataccacttccaaactccaggtcgcccatttcctttctcatggcaactaccatgagcagttctcagatgtccttccagacaaataagcacagtttgctgtccttcttgttttttttttactgaaatggaattgtgttatacatgctgctgggtatcctgcttctttcatttcatagaaatttgagaatgttctgtgtgtttttaaaagtataatagatccttaagattgtttcattggtgtgcaacaacaaaaaaaaccccacacatttcacattatttttgtttgtttgatcttttttctttctttctttctttttttttcatttcacattattttttaatggctccagaatgtttatgagtataccttatgctatttggccggtatctttcaagtagatatctggtgtgtttccaatcttttgctatataagcaatactgcaattttgcacacacttgtacaataaattcctaaaggaggaattgtgtgtcaaaagacatagacatttgtagttttaatagatattaccaaatcgtcttgcaatttgtatgcatctacacttccatcgtcagtatatgaacacgcctgctcctcacactgttgccaacacggtgttaagctagcaaattttgaaaatgggcaaaaggcaggccaggctcagtggctcatgcctgtgccactttgggaggccaaggcaggcagatcacgatgtcaggagatcgagaccattctggctaacatggtgaaaccccgtctctactaaaaataaaaaaaaattagctgggcatgatggcacgcgcctgtagtgccagctacttgggaggctgaagcaagagaatcgcttgaaccagggaggcggaaattgcagtgagccgagatcgcaccactgcgttcccacctgggtgacagagcaagactccatctcaaaaaaaacgaaagaaaatgagcaaaaggcaagaaggtccccagtatagggtggttaggtcctgctccatgtcccgtggaggcttgtggtgcctggggagaagttaaaggccctggaggttgccctggaggagaagtctggctgcctaagggagatgaaaaactcagaccagctccacctgcttcttgatcctgccagagcaaaaccaacaaaataactgacaatccacaatcgctttggggtaggtgccaggatatccctgcatctttctctggggaggtaaaatccaaatgtgtgtctgaacccaaatgcccaaaggcgattaattgccccagtttgctgatcttcatgcactagtggcctctggattggctggtatacagtgcatggggggacagccataattagttctctccctgcaggcagggatttggtttctccaacaagatggtgaagtgtgagaaaggagggctccatctttgcccactccctcctctcactcttttctgcaagggtgatctgattaactggggcctccagtaacggcctctgacctctgtcttttggtcttttggtcagtagaagacaggctcttctttagctttctgaggacaaggctagtcttctttggggcttagatagcagtgtgagtgtcagaggctaaacctagccccctttcccttatctttgttatctgttggtttctcctaagggataggcagatatggtggccctatctccccagcactctcggtacagaaccaaaagcacagataaccctaaataccacaaatgaatggaagaaaagccacatttgtttttaaagaccaagaaaatgaaaccataagaaagttaacggaaaatgtaggtaaaaaacctttaaggtggggagagattttttttaagcatagagcaatagaataagtgacaaagtaagcaattgatagatataattacacatacacacatatttaacctcttaaaattaaaagacaatgagtttggaaattatttgcaacaaaaacatatatcattaatatatccttaatataaacaagcataatatgtcctaatataaaaagagcttttagacagtagttagaaaaaaatactaaactctcagtagaaaaatgggcaaaaacatgaaagataattcacaaaagaaagctggagtgcagtggcatgatctcggctcactgcaacctccacctcccaggttcaagtgattctcatgcctcagcctcccgcatagctgggattacaggcacgtaccactacatccagctaatttttgtatttttagtagagacatggttttgccatgttggccaggctggtcacaaactcctgacctcaagtgatctgcccacctcggcctctcaaagtgctgggattacaggcatgagtcactgcatccagctgccaataaacatttttaaaggtacaattttagtggtaataaaagaaatgaatgataaagcgagatgccacttttgtttatcaaatagaaagatattaaaaagatataataggttgggcacagtgtctcatgcctacagtcccagcactttgggaggctgaggtgggaggatcacttcagcccaggaattcaagaccagcctagagaaacactgcctttaccacattaaaaaataaaagtagcccagcatggtggtgtgcacctgtagtaccagctacttgggaggctgaggggggaggatcattgagctcagcaagttgaggctgtagtgagctatgactgcaccactgcactccagcctgggtgacagagcaaggaccttgtctcaaaataatgacaataataataataataataacaacttagcaagggtgcaaagtggagcacatcattgattaaagtacaaatcagtattgaatttttccatagtaacttatatatacacacatacacatcaatatatgctcataaatatatatatattcttttcatataaaatgaagaagtgactagaaggaaacaccaccgtagtgattgtaagaacagtgtaagtgattgtgattgcttctactttcttctaagcttccagaaatcagaataaaatactttcaaaataggaaatattaaaaagcatttcaaagcaaataaaaagtcctgtatgccagcagccccacaaagagaggttttgagtgccatgctatattttgagtacagctgctcaaagcacattgagggaatttctcaccaaaaaaaaaaaaaaaaagaagattatgggggattcgacttccttttctagaaatgtgtagagaattcccccacaacagtgaaaactttgctgtaaattactctcttttggattaggaggacctaaggcccagaacttgtaggaagtgggtttggtcttggaaatcccagcgtggagtttctctatcttggagtcaagaaaacccagctgtgacctccaggcctggaatgtacgagacacccaatgccactgccatgacatgacatggtgtcccatggacaccagcagccacagagttcactcactgaggtgtcgtctcctcctccaccataatgatggctcagccactctctctgtctggttctgcccccactgccaactgcccaatccctggcatgtttcaacattcaaacccctgggagagaaaggacctgactggttcagctactcatcattgtccaaactaagtgttctcacaaaccagtcttcagtacaaacattagccaatcacctggagctagaggaactgaatgaggccactggggagggctcctatctttccagaaagggactaagatggtttccctcaaaagagattggagagatgagaggtacgctaggccatgtatacaaagagtggctgggtcccacatggagaccatggcttaaggacctttcccctagggtgtgggagtccttgagcaaattacttagcttctcttctggaagtttctactttctcactgataaagtgagaatcttaattcagcctttttcatagtattatgaggatttaatgggtaatgtacattcagcacttatcacaatgcctgcacatatgaggcacacactaaaccctaacggttctcgttatataatgcgtgtgagcaggaagcaggctgagtcggttgtgtcaactgaacctaccagcagatagcgatgcaagttttattcactgtctcctaaaatatgttcattttctcctccagatctttgctaacacctagacagggctaaatatagctgatactttgaaaaaggtgttttaaagtgagaatctgcattatctctgaatgagtgatagctcactcagaagcagcatattctctgaatttaacaggtctcaagtccatctcatccctgctattattaccaactattgttggtaatacttgctgttattagcaactattgatggtagtcctattattcttggtaatattattgttggactctttctctatggttcagtcaggcctgaattccaataattagctaatagccagcaaacactagcatctttccagaccaataaacattattttgacattctaatagtaataaggatgcacttatcagacatatatttttaaatatgtgaaaacaaagtccagaccgggtgtagtggctcacacctgtaatcccaacactttggaaggccaaggtgggaggatggcttgagcctaggagttcaagaccagcctgggcaacatagcaagatcccatttctataaaaaacttaaaacttaatgtatcatcaagggacgcatctgcagtctcagctactcaggaggcagaggatggaggatcacttgagcccaggagttagagattacagtgagctgtgattacactactgcattccagcctaggggacagagcgagactgtctctaacaaacaaacaaaaacaacaacaacaaaaacaatgggctgggtgcagtagctcacccctgtaatcccagcgatttgggaaagtgaggcgggcggattgcttgaggccaagagttcaagaacaacctagacaacagcgaaatcccgtctctactaaaaaaaaaaaattagccaggcatggtggtgcatacctgtaaactcaactactctggaggctgaggcgggagaatcgcttgagcccgggaggcaaaggttgcagtgagcctgtattgcaccactgtactccagcgtgggagaaagcgtgagactttgtctcaaaaaaataaataaataaataaaggctgggcttggtggctcacgcctgtaatcccagcactttgggaggccaagatgggtggatcacctgaagtcaggagttcgagaccagcctggccaacatggagaaactctgtctctacgaaaaatacaaaaattagctgggcatggtgccgcacacctgtaatcccaggaggctactcaggaggctgaggcaggagaattgctggaacctgggaggcggaggttgtagtgagccgaaatcacgccactgcactccaggctgggtgacacagcgagactctgtctcaaaaataaataataaaataaaataaaataaaataaaataaaacaaaaagaaaagaaagtcctgcacacaactgcagcttatagatcagtatcaggtgctaatggttaacacactgatgatattgagtattgacatctttacttggaatcatattttattattttagcaagagttataatttgtcttctaatcaagctatttaaatggctttctgcattctgccaaaatatttcctaaaattccaccagtacaaattaagtcctttgtgttcatatttacccatccagaggctcctctttcaaaatgcctaaagaagggagagcctgatgtttctaggtcttaaaactcaaaccctctgtagccaaacttatcttctactttaaaccagcttttctccagtatctaccaagcagaagcaatgaaatccagaaaccatggcctgcccatctttgtcactccctcttcatcctctacaaccaaggcctgatacgcacccactgcccctccttccttcccatcgccctccccacccccacatctgctaattactgccttgtggcagtcagggagagcctcctaaaacacaaatgtagtcgtggtgctcccctgcttaaacatcttccgtgcttctccttgctcccaggacagagtccaatctgcagcgtggcccgccaggacttgtacgagctctcccagcgtcccagcccagctgtgtgttgtacacttcccactccagccccacactccagtgttatcagctgctctgtctcccatgccacactctcactgcaggcttctggcatcttgtttcctcctcctaggacacagcctccctctcttttcacaggctagcttctacctacttccttgtcttggctcaggcaccatttcctacaggaagccttcttagatctttaagtgccttactatgtgctcccatagtatttatcacatggttggttactaacacctctttatacttcacttgtatttctctctctcagcgggttagggattacatcaatttcattcatgagtatctccagaacttagagtggtaccttgaccacagtaggcacacaattactattgaatgattaacacattaacaacctttgtcctagactagtagttcttaaccataatgaaccgttgtcaacaacaacaacaaaaaaattccgcagacttccccatataatagcagtttgtacttttaaaatcaattgattaagaaaatgcataatgaccaaaagttatattgaattcagtataacattgaaataaatttatattttatcaatggtaacagtacccacatatattcaaaggcttggtacacaagtggaagtttcaggcccttgcagcctctctgaggtgtccctcctccatggtgcagcctgcagggaatgaggttctaaggtgggagacagccttaaaagggtcagggcctcagcttttcctaattcacaattttgcctagtgatggacctgtatttgaggactaatgaaaaccaagaatgacactgaaaaggagagtaagaatgtaattagtatctggaaagtaaattcgttttcccagaacacataggttttattctagtggctagccagtgttaaaaactaatgctgatgcaggaaattagtcatcttcgtgtaccccaattcctgggaatggagggatgcccaggagcctggtgggaataggggctgtaggctgtattcttacagtgtatcgggttctcacgactggtgctcagacctgtggatctttttcatttcttttcactttgggccctcacccccctcccccgaccaacaaacccacattgcaaggcagctcagaatggaagctgtgccagctgatgtggcccttttgaaggagagctcacaagaggcacccatgaacccccatccaacctttctaccagctctcctgtcccgccatggtcatcgctcacgtggacttcgctaaagcctcttcgcttccactcttacccttctccaccctcctcttctcactgatcctttcagaatacaaataacacccttcaatagctcttgggataaagacagaaaccccacccccacctttgtccccaaggtcccacagcatagcaccttccctaccacatggtctcgtcgtgggccttctcccactcctcatctgctccaaccacacagactcacctccggttccccatttcaggccttcacagatgctgtcccctctaccagatatatctccagccctgtccctttgcctagacaattcctatccctcatccagagctcaggcctaaccacacttcttggaggaatcttttcatgattccagtactagctcaggccccctcattgtatccacctggcaccccaggcacctgtactgcagcacttccagctgatccggctccctaccaggatcaagttaaagctcccctaactcccactcagtctggcctctggactgtcgagtgtcaaagccctctgcctccaagtggagatcactcgttggtgcttacagcttcaccacgacctttaacatgaagccagccgggctttaggcagaaattttagtcctttgatgtctcactgcacttgtcctcagctttgggaggagacacaaagtcttcctgcatctgttgctagggtcagaggctgtggagccctgcttctggtcatgctcccaagcaatgaaagaacagtaagataaaaccccaaatgcaaaagcctaccctccccacctcccaaccactagcccactcctcaaaggaactaccagcaattacgctatttgtatccctcaaggaaaaaaaagaaaaagtatgctattcccaccaaataagtacatgtacaaataaacatatgcacataagtatgtattcaattttcttttcttttctttctttttctttctttctttctttttttttttttttttgacagagtctcgctctgttgcccaggcttcagtgcagtggtgtgatctcacctcactgcaacctccacctctcagactcaagtgattctcctgccgcagcctcctgagtagctgggattacaggcacgagccaccacgcccagctaatttttgtatttttagtagagacggggtttcaccatgttggccaggctagtctcgaattcctgacctcgtgattcacctgcttcggcctcccaaagtgttgggattacaggtgtgagccaccgtgcccagcctaattttttatttatatccaatgtattctgatatatttttgactgggaagttatggggttaatcatcatccttcaccccaattcctgatcttgtctttttctttttctgtgtaaatatcggcacagtattacattggatggctgtattatttacttaaccagtctaccatacaaatatttagtttgtttcagttttctcttacaaacaatgtggtaatgaatattcttatgtacatgtttagtgtactattgtgaatatatgtataaattctcagtaacggaattgctgggtcgagaggaatgcacatttccaattttgataggtattgtcaaattgttcatttaaaagtagaccactaccacttctggtaatgttgatagtgttgaagagtggcagattgcccacggcagggccaataccaaatattaacaagcttctaagtttcacttatgtgttaactgagaatcgatatctcatctacacttacataattaggagtgaagttaactatgttttcatgtgtttatttttctgtaaacttcacattcatatcctttccagatttccatcttgaattactcaatgtgattgcattctctattgctaatttttccttggatttttttgtttttttcttttgactttatttatttgaatcatctaatgttcagagttttgttttgtttttttttttttttagacggagtctaactttgttgctcaggggctggagtgtagtggctcgatctcgactcactgcaacctccacctcccaggttcaagtgattctcctgcctcagcctcccgagtagctgggattacaggtgcctgccaccatacccagctaattttttgtattttattagtagagacagggtttcaccacgttggccatgcagatctcgaactcctgacctcatgatttgcctgcctcggcctcccaaagtgctgggattacaggcgtgagccaccgcgctcagcccagaaattcttgattttaggctttgcatgcttaagaatgcattccctggcccaaaattatattcattttaaaatctattttaaagttctacacaattgccacaggctgtcttgaagattaagctgaatttctacagcccctaacccccattgagacatcatagcttcaacaaaatgctgacagttgatctgccttttgtcagtcctagctgaaatttccccctactcacaaattcagccaaaaaaaaaaaaaagccaatatacctgaggttaattcaactgattttcccccctggttccaaagtttttgcctgggttattgattttttttttttttttttttgagacggagtctcgctctgtcgcccaggctggagtgcagtggcgggatctcggctcactgcaagctccgcctcccgggttcacgccattctcctgcctcagcctcccaagtagctgggactacaggcgcccaccactacgcccggctaattttttgtatttttagtagagacggggtttcaccgttttagccgggatggtctcgatctcctgacctcgtgatccgcccgcctcggcctcccaaagtgctgggattacaggcgtgagccaccgcgcccggcctgattttttttttaacatctttatacaatctggattgaagaagacatcccatcaattcagacatccagttctaattaaaatcttgctcttaaaacatgagaatctatttgaatgctttttcgaaagctttcagacacaatgatttccttggtagtctttggccttctgtgtgcagcaccatcagctgacctattcctaagagtagctgggatttttctgatggcttatgaactagcttatactttatgtgtgtgtggtgcaggggagggatgggcaaaatgggggtgagctgcacaggtgactattaaagggaactgcagctgtgtaagcctgaagaaattcagtatttctaaaactcccaacatcatgggacttctctccatgatttttaagtaggagtacaaggaaatcggagaggacaaacaaattgaaaaacattttatgctcatggataagaagaatcaatatcaggaaaatggccatactgcctgatatggtttgactgtgtccccacccaaatctcaacttgaattgtatcccccagaattcccatgtgttgtgggagggacccagggggaagtaattgaatcatgggggccagtctttcccgtgctatattcatgatagtgaataagtctcacgagaactgatgggtttatcaggagtttctgcttttgcttcttcctcacttctctcttgctgctgcatgttagaagtgcctttcacctcccgccataattccgaggcctccccaggtatgtggaactgtaagtccaattaaaccacatgaaaatgaactaataaactgcccaaagccgttatagattcaatgctattctcattaaactaccattgacattctttacagaattagaaaaatctattttaaaattcatatggaaccaaaaaaagagcctgtgtagccaagacaatcctaagcaaaaagaacaaagctggaggcatcacactacccgacttcaaatgatactataaaataaatttacagtaaccaaaacagcatggtactggtacaaaagcagacatatagaaaaatggaacagaatagagaactcagaaataagtccacacgtatacatccatctgatctttgacaaacttgacaaaaacaagcaatgtggaaaggattccctatttaataaatggtgctgggagaactggttagccatatgcagaagattgaatctagaccccttccttacactttatacaaaaaattaactcaagatgaattaaagacttaaatgtaaaacccaaaactataaaaaccctagaagaaaatccaggctatgccattcaggacacagtcaggggcaaagatttcatggccaaaaagttaaaagcagttgcaacaaaagacaaaattgacaaatgggatctaattaaagtaaagagcttctgcacagcaaaagaaactatcatcagagcaaacagacaaactgcagaatgggagaaaaattttgcaatctatccatctgacaaaggtctaatatccacagtctacaaggaatttaaatttacaagattaaaaacaaccccattaaaaagtgggcaaaggacatgaacagacacttctcaaagaagacatttatgcaacaaacatgtgaaaaaaagctcaacatcactgataatcagagaatgtgaatcaaaaccacaataagataccatttcaagccaatcagaatggccattatgaaatagtcaagaaacagcagatactggcgaggctacagagagaggaatgtttttacattgttggtgggaatgtaaattagttcaaccattgtggaagacagtgtggcgattcctcaaagatctagaaccagcaataccatttgacccagcaatcccattactgggtatatatccaaaggattataaatcattcaattgtaaagatacacgcacatgtatatttattgcagcactattcacaatagcaaagacatggaatcaacccaaatgcccgtcaataacagactggataaagaaaatgtggtacatgtacaccatggaatactatgcagccataaaaaggaatgagttcatgtcctttgcagggacatggaaggagctggaagccatcatccttagcaaacacaggaacagaaaaccaaacactgcacgtgtttgggagccgaacaatgagaacacatggacacatagagggaaacaacatacactggggcctatcagtggtggggagggggtgggagggtgatcatcaggaaaaatagctaacgcatgctggacttaatacttaggtgatggcttgatgggtgcagcaaaccaccatgccacacattttcctatataataaacctgaacatcttgcacatgtaccccggaacttaaaatcaaatttcaaaaataaaaaaagaaaagtcctcaaaaaattacactatgattcagcatcaaaatgaaagttatttcataagcaggaaggcatgaaagcaaagtggaaggaactaaatttgattttggtgatacaaattttctttttgtcttggagaaatgatcggttttctattttcttgcaaagcagcaaccaggtgatttatagaacccaagaagaaagacactcacaagtggatgaagggtgctgttttgttactaagaaatgtgcaaaaaaaaaaaattcctataataggccaataaagcaacaaatttgttcctgggtcagttagggagagacggtaggctggggacaaagctagggtggagaggtaacccggctctggggactgagactgccatgtctgctgtactgacttctgatccagtccagtcctgctaaagcaaagggcatggagagatcaagaaggccccataggtgcctgggactctccactgtccctctcaatggccaaagcacctctgagtgacaggaggaggaatggtggttagcgagagggcacaaatgggcagattggtgccaccacttaattagcattttttctgttatctggaacttgccctggtcacttgggagacttgagcagaagagaatccttgtcttggcatttcacaaaatgactttgttttttctgaatgaggtctctggtgatgaagggaaagggatacagtcagaattccttttttaaaaaaatttacatttcagagacggggtctcactctgtcattcaggctggagtgcaattgcatgatcataactcactacagcctcagactcctgggctcaagcaatcctcctgcctcagtctccagagtagctgtgactacaggcactcaccaacatgccagcccagaattccttttacttttaattttgtggagacaaggtttcactgtattgcccaggctggtcttaaactcctggctcaagtgatcctccatcctcagcttcccaaagtgctgggattacagccatgaaccaccctccccaacccagaattcctttaaagtcatgaaggattaaaggaagaactaggattggcccctcttttctatgggctttgactcaaccttcagcctgggtgttgggtctccgtgcatgaaggactccgaattcacaaggcagccctgccttctctttctcctccagctgcattttcccagtgccctctgggctggccccaaatctctgacccaaggggaatctggatgccctctggactggtccaaaatctctgacccagcaaagtgaggaaggggatttttagcaactggagtccacagttccatctgcagagatttttaaggcatgagcctgtggtctctgtgataagaaaccatttcatgccccttcacttaaaatccaattaagtatctctctcaattcttcctgtgtaatatctgcctgatgataataatagtaataatagtatttattgagttcttactatgtgccagggatatgtatttcatgtatatgtctcattgaatacttaccatagtcatggaaggtaagtattattacctgaactttacaaattaggaaacttaggctcaagttcacccatgaaggaaggggcagaaacaggattcaaactccaggttctatggctagaaacctccttttcttacctactactcacggtgcatttctctgaacaaagacccctgactaccatctatccttatctttccaatccttctacttttgttttattcctgttcctagggctggcctcctctgtccccttccaacctatataccacgtagaccatcaaagagctgctgcatggttctccccttgtctcctgtgtgactcctaccatcctgtaaccttttgtcttccataactccctgggtctcccataaccccctgtgtcccccatgatcttctgtgcctcccacatcccctgtgcctctcactattccctggcctacagtagggcattctgctggtctgactctcatgatcccctttgcttcccacaatctcctgtgccacccatgatcctctgtgcctcccacaatctactatgtccacagttagcagatagtgtcccctaagtacccccttggttccactggttctccatggctgactgaattagcccttctccttagcctggccaccaagggacagtgggacctgtgctagtgaactcctgggtagggcctaagctcagaaccgggttctaggactgtcttcagtagaggcatggctaaggtgctgtctcagtccctgctctgtcaccaagtcccatctctggcattcactgtcttgtttgtgtgtgtgtttctcaaacacgccatgagtgaatgattctgaagtcttatctcctcaatcccatgctgagctcctttgggccttgccccttgtctgatgtgagcagtcagcagcatctatgtcttgtgctcagtgtgaacactgccagactggaattgtgtcttaaccacactaatcccccagcttgacatttggaccttaggaggtgatgcagaaattgaagcggggcaagagtaaaagaggggcaaaggggacagcatgctactctctcaggagtcaggtgtgaccttaagaccattgatcaaagaactagtttggcatctggctcagtaaattccagaggaatcagtggctgcatgatggaagacaaactgcacgccgattctattctctgcctgagtctaaaacaaaagtgaaacagaaagcagttgctcccaggacagaaagcaagttaattaagttgatgttcaaacgattctttatactaaacacttttaattcaggataaatcttggctgagtttatcagtggctaagtgtgcaggtaggggacattgaagaggaaatgacaagcgtacagaaagttttgttggaaggagctattggacagatctggggggtacccaggttggaggggagtgcagtaaatgcctctgtgtgtaagacaatgggggggaagataatggcgtgggggacaaggagacaaggggaagaaagtgacctgcaccggaagatgggggagtgcttcttgagagaactctccatcaaagtggggactatgagaattacattcagaatgatgggcacacaagccccaatgcatcagagaaacaatacccaagacttacacctgaacttcccagcctaacactggacttacaggaagacagagggaacattattactgtgatcaaatggctcagaatttcctgccaggtcccatttcaaaaacactaagcaaagagctatgttgctttgcgaattatttcacagagctgaccttagcctgcaagaaaattatagcagagaccaccaacttggggtgtgtttgagattgtccagagtatgtggttcctttaacccttaaacatcccagatgcttttgagattaccctgaaaagcctcatgaggctcctggggaggctggggagtggggagggagaattttgtgatgctagcccaagtcctggtagagagctacctaggatagagcatgaacaaatgaatgaatgtatccactaagtcctttcttcaagtggcttttcacaaaatgactttgctttttccaaatgaggtctctgatgatcagggaagaggggtacagtcagaattcctttattttaaaaaacttgtattttagagacagggtctctcacttgtcacccaggctggagtgcaatggtatgatcacaactcagtacagcctcagactcctgggctcaaacaatcttccttcctcagtctccagagtagctgggactacaggcactcaccaccatgcgcagcccagaattccttttacttttaatttcatagagttgaggtctcactatgttacctaggctggtcttaaactcctgggctcaagtgatctgcccgcctcagcctcccaaagtgctggattacaggcgtgaaccaccctacccaggccagaattcctttaaagtcatgaagagttagaagaagaactaagattggcccctctcttctgaggaactgtgggctgtggctcaatctttggcctaggcgttgggtcttggtgcgtgaaggactccgtattcacaaggtagctctcccttctccttctcaggacaggaggcccagagttttgctgccacagaggtctgttctcaggggtcctgcacaagctctggcagagacctgctctcttcttctgtgttcttatgctcactttgagcaaaaatgctcaaggtgataagatggtgattttagagcacaatgatagaacacctggggaaagaacatggacaagttggaagaggagcgactccaaagtttggcaatggagcccggagttttgaactcctcttggaaaagtgaggtcctgggcattggagcctggcttccttagcatgtatgtggcagggagagctgcagagggcagtgagtcgcctttagaaaagtgtccttcaagtcctggcttgacacatggtaccagctgtgcctttgacctgtttctttattttaaaattgaaataagaataatcaaagatgttttcaggattcaataataataacacttagtagtgtttaccctaggctgggcactattctaagtctatgtatattaattcatataatcctcatagtgaccttaggaagcaggtactactattaacataaatttataaatggaggcacaaataggttaagtaccttgttcaagttcctacagctagtgagtgggagagctggggtctgaacctagacagtctagctccaaggtcgatgctgttaacaactagccagttgtttgtcaaatataaaggggggcagagagtaagaggcattcaaattaaattccttcattttcaaacaaataattttccccacgttttaacatctctataatctgcatacgggttttcaccatgttagccaggctggtctcaaaatcctgaccacaaatgatctgcccatctcagcctcccaaagtgctgggattataggcatgagccaccgcgcctggccagtttactctttaaccttctctcctttcttctcaaatcctccttccatggggcgttgcttaatcacactatctggagtctttccccagacctcgctatctgcttgtctgcttttctttattttgtggattgattgtccgctccttctggatgtgagctctaggagggaaggcattttagtctggttgtgtttcttatttgttagttttgctgctgtacacccggtatctagaatagatatcagacacctcggacatggtggcccccaacaaatagtccttctatgaatgaaagaatgaggaatgaggactcgttggagattcttgcttggtgtttaaagaaggttcagtctgagattatttgctcatccttagaagcaggaggccgtggagagagggaggcgaggtggaaggtccacgggcctgcattctaggccttcgctcattagaaatccaagggcagtggccaatctctggaaaaactatgacagaagaataacatttgacagaatgccagagagcatctagataaattttgtcaattaaaaaaatgaggaaagaaaaaaacaaatgcaagcacaaattttgactaaatcctaggtttaaaaaaaaactgctattaaagagaattgggggataattgggaaatttgaaactaagttcaatggaccgagcatggtggttcacgcctgtaatcccagcactttaggaggccgaggcaggtggatcacttgaggccaggagtttgagaccagcctggccaacatggggaaaccctgtctctactaaaaaaatacaaaaattagccaggcatggtggtgtgcacctgtactcccagatactcaggaggttgaggcaggagaatcacttgaacctggaggaagaggttgcgatgagccaagatcgcgccactgcactccagcctaggtgacagagcgagactctgtctcaaggcaaaaaaagaaagaaaaaggaaataagctaaatagtgctattagagaattactgtaaacttagctctgataatggtacgcaggttaagtagagtactcctaaattctttggggatgtgtgctgaagtgtttaggggagaaatatcaccatgtgcacaatttattttcaactgccttctgagagtgggcaccgctcattcatatgatgactctctcccatgatcactgcaatcaagcccctgcacctatgcaccaccagtgttctgagcctgtctccagccataagaagaggaacttttgtgggagaaggtgatgcgtgtgtaaatgcagagatgaaaccaagactcgctgtcaacactctgttttcacttgggtcctggcttgtgacattgggttgaaagtgattttgattctcttaataacaaatctgaggctgcagcaacccagcttccttccagccccactgggcttggcatggtccctgcacatggcaaattaggatcctttgttctctttactggtaaataaccagttagtccgtacagtccatgccctttgtcatttctctatatctaactttgttttttcctatttacttatttcttatttttagagacagtggactcgctatgttgtccaggctggactcaaactcctgagctcaagggaccctcttgcctcagtctcttgaactagtcatgattaaagatgaattcatctcccgtttcacttaaggtttgagagcaaatgacaagcaagtattctcagctttactacacagagaggaaactaaagcctcagaaatatgaagttatttttgtccaaaggcaaaaatccaaatgacaaagagtcttgaatgagacccaggatccccagtccccaaacttcagcattcctcatggcaaaagtttggcattcttcattggaactgattactttttttccccccatttaacaaagcctgcagctcatggcaggaagatgagaaaaccatggagcgaatcacccacaatgattggagcctgcttccagctgcagctagtggaaagttacctgattttcactgttggtgaagcccagtcttgcagcctgtatctgaatatacacattagggattgagacattctaaattaaacttcaaccttccaagattcacatctaccttattttttaaaaaggcactcatctttatttcttaaaaaataaaaagtcatggacagagtcttattctagtgcccaggctgcagtgcagtggcacgatctcggcttactgcaacccccacctcccaggctcaagcaatcctcctgcctcagcctcccaagtagctgggactacaggtacatgccaccatgtccagctaatttttgtagcttttgtagagacaggaccttgctatgttgctcaggctggtctcaaactcctgagctcaatcaatccgcccacctcggcctaccaaagtgctgggattataggtgtgagccactgtgcctggccaaaaaatcacttttataggcagctgaggtagagttgtgtgatttgccagaagtttgataaacattcatcgtgtctctgaaattcagaatccttgcaagtaccgtggctaggaatgtaaagaaaatcatctgaaagctgaacatgtgtcttcatcctggttttctaaatgaagggaaaaccatatcagcaaaaatgctgatgaaagtgacctggaaaatgtgggacgaggcctgggggtgggaggggtttatcctgccctttgaaagaacgtctttgaaagaacgtctttctttcaaagggcaggacaacggggagccctgaggaatctgtttcactttaaaggagaaaaaacaacagttttttcttctttaaaaaggcactcacctttatttcttaaaaaatgaaaagtcacttttttctttctttcccagacagagtcttattctagtgcccaggctgaaaaaaagcgctgtgcacttttcagaatttcttttcagaattaggatggctgaaatcaggagaagcaactttaaaagtgcacagcaagtttgcaaaggcagtgccaacactgcagcgccagaaatgtgaccataaaaaaaaatcccattgacaccatatttatccaccgacgctgcggagcacagggctttggcgatttccagagagccctcgggatgtttttctcgcctcggggtgcactgtttgggctcttcccataggaactgaaggccagtccctcagccctgtgggagggccctgtcttctgtagggccaagtgtgcaggatctctcaggtagtcataggcaacctgaaggaacttagtccccccaggaccctagggagcatgccaggaacaaacagtggtgcccactcactgggcccatttcttgagttcagctctttgacaagaaaaaaaaaggccattagtatattttttcatttttacctgaaaagaaatatgacaactaacaggaagtatgacactatcaggatgacaatacctgctagtgaaattaaggccacccagctcctcagatcatcatcaactggaatgaccagacctcacttcagcttgcatttgtgtttactagagagagcaacgaggagtttccttttaaagaataagaaggcaaaatagcaatgtggtgtgaaatctcatctctacaaaaaagtacaaaaattagtcaggtgtgggcacctgtatcccagctactggggagactgaggcagggggatcccttgagcccagaaggtcgaggctgcagtgagctgtgatcatgtcactgcactcctgcctgggtaacagattgagaccctgcctcaaaaaaaaaaaaaaaaaaaaaaaaaaagaaaagaaaggaaaggaaggaatgaaggaatgagagagagagagagagacagattgagaaagttgaaagaaagacgaaagaaagaaagaaagaaagaaagaaagaaagacgaaagaaagaaagaaagaaagaaagaaagaaagaaagaaagaaagaaagaaagaaaagaaaagaaaagaaaggagggagggagggaaggaaggaaggaaggaatggaaggaagcaaggaaaagaaagaaagaaaaacaaaataacaaaatgacctgagaaggaaaagaaataatcagagacattaaaaataatcgccggcggatgggtctggtggctcatgcctgtaatcccagcactttgggaggccaaggcgggaggatcacctgaggtcaggagtttgggaccagcctagtcaacatggtgaaaccccgtctctactaaaaatacaaaaattagccgggcgtggtggcgggcacctgtagtcccagctacccaggaggctgaggcaggagaatcgcttgaatccgggaggcggaggttgcagtgagccaagatcacgccactgcactccagcccgggcaactgagcgagactccatttcaaaaaaataagtaaataaaaaataaaaagcaataataatagccgacaacagaatacagctaggccgagcagcagcctcctctgctgtccgtgcggctcgcctgttgcctgcttcactgcctgactgtgggctctgtttgtcttggtccccgtggcattaccagagcttagcagataaggaggagcttcatacataattgttggcgtgaacaaaggaatgcatggttaactacgtcagaaatgaccagttcaagaggagaatgagattggcttccaaatgttggtcaagagctctacgtagcatgagccaaggatctattgaacttagtaggctcctgtgaccggtgactcttctgtctctagaaatctggggaggtgaccaggtcatacatggcagtcttcccgtgaggaacgttaaactggttggaagttggggttctgaggggaagatgtattcactaggtgacctgtcttctctgcctcggtggcctccatggctgcctgctggccgcacacccccactcagcagaggaatggactttccaatcttgctgagtgtgtttgaccaaaggtggtgctgacttagtggcctaaggtcgtgccctccctcccccactgaatcgataaataatgcgacttatcagaaagagaaagaattgtttacttttaaaccctggatcccataaagggagaggggagaggcctaaagccacagaagctgtggaaggcgccatcctgcctgccacaggaagggccttggactgagaggaccggagctgactgggggtaagtgcggctctcccccggcgcctgccgacccccctgagtgatcaggccgttctttggggtggccgctgaccgagaaatgacgggaggctgctgactccggtgttgaaaaagatgccacccagcgcctgagcaacaggaggtgttgaacacaccataactttgtcttccatgattattctgtttcctcagaaagcttgaggaaaactggagactttctttagagagagtaacagatggtttccgtttaaagaaaaataacaaaatggcttaaggaggaaaagaaatgatcaccctgcagagggagagaggatgaggctggggaggagctgagggctcagggacggtgtggggttttatttctgcccttggagtggctggacattaagccagttcttgtttttacgatggcctgattcagcaataacaccaaaccttcaaacaaaatgccggcattagagtcgttcctttggcatgcctctgtccaggtcatattgttccctcaatagcactaaaaatagctggacacctgtgcagaaatgagacagttccttaggaatccccaagcctcagcaattctctttaaaaagagtccgtggaggccccaacttggctaaaaatgtacccagtgattccttcttcaccactgattggtgagaaacacaggcatgaataggtgcatgaatagggaactttccagatttcccttctagatggatttcaatgaggaaagaaatgctgctttgctccctgttgacaagaacattctattttaaaatttccatgcactttcaaaatgacaagactcagaagcataataccaacttcctttgtcatgtagactaacagcctaaaataatcaaatggatgcatttaacacatctattttaaatggcagtaaacgtggattcagagtaaaaagcatctccacttatctttcactttttaagaaatttttttttggtactgatgggttaggtttgcagcaaggtgacacttcacagtccccaaagcacccaaaccccctatggggttggccctagaatgctctcagcccctgggaacaacatcttaaagcaaagacaagctgctcgtgcccagatctgacctgagaaagtgagtgttgcgatattcctggtacttgtgaatctaagacgtcacgctgggagctgtggtgcatacagaatgcgtacagagtggtgaatttgctggagggtctggctttgtaaaagcttcctccttaatgagctttttttctcacttatgaaaagaaatgcagggcattaaaagaggagcaaaccaaatctagcctgtttttcatactcacggatccagtgggaaagctgcattctgaattggccacagcagctagagatgcctggagatttcatcactgttgggaagacgagtgcaggaagatgacagcacacagaaatttcgtgtgtgtgttttctttagaaatgggatctcaaacaactgggctcaagggatcctcctgcctaagactcctgagtagctgagactccaggagaaatttagtattaatagactgccattcaggaatggctagcactctacctttctcagggagatctcaggaagtaaggcataaagagagatggtgggagatttatgtggatgggatcggggcccagggaagctaaacagaatccctcaaggccttttccacactgtagaaaattgtgctggcatttggacaagtcaccctgcttaatatcaaacatctttgccttaagcattattttttcaaaggaaataacgtgttaatacttcccaaccagtgtataatgtttctatttgttattagctcgtactatttaagttcagttgttaagtttgaaaatactagaacattaaaaatctgcagaatgagaaattattttgtgaatgtttaaaatattcaaaagtggatcctgacactaaccacttttaatttattttactagcgatatattattggatgactttttttttttaaaaaaagaaaaccttctgcttgtttgtttaaactgctttgtaaattgacagtttaaccacctctgcagaaacaaagtagtaataaaagatgttggccattttagcaatgtttaaaaattgctcacaagacagaaaatgattggcactcaatatgtgtttagtgattgatgcaataataccataaaattattgtactgcataataaagtatttcactaataatttgctaaaaaattagcctgaggcctgccactcagcacagcactaacttttcatgcttgtgacaagttgtatatgagcaggatgggttccaaccttcccaatttcagaagagtattttgcaagaaggaatttgtattgagagtccagaaagaaaattgcctaaaagtttttaaatcctcatttttctcaataaaaaagtgccatatgaatcataaattaacaaatgcacacaaaaggagaaaatgaaaacaaaccataatttctctactgaaagataaccatggttaacatttgatgttttggcctcaggcatgtatgcattttttcacagaaagggactcatactgtgtatattgttttataaactgttttttaattcaataacatatcttgaatttccaagtctaccagacttttctacagaatcaatttaaataattatggtctatcataaatatattactcttctcctatagctggacatttaggttgtttccaatgtttacccttataaacaatgccactatgagcaaccttataggtaaatctttctacaaatttttgacattttcctggagatagatttctgggccatagaaattgaggttgatttggggtggggggagttggtaagatttacctgtaaaggttgatttggggggtggggagttggtaagatttacctgtaatgcattaacttcctcatctcttttcatcttccatctgttccttcccttttctgtattttgcagattattcaaagccaaaagccaacagagcccccatggagaagtggaggatgctcagatactgctatggagccctgagaagtgaaatgggtccaagcccttgcccaggatagagcgctccaagcgcatcctccggggacccttttaatcagtgaattgttcacctctcactgtttcttcccagcagagctaagagacttctagagcctcttgtggatggtcagcgatagccctggtatgaccaggaggtggcgatttctgttctaggtccctcagcaaagactaagcaggacaagcctggctactgtgttaggaggagctgtagggaaagggaaggacaagatgggccaccacatgcctgtgtccactgctggccacacccagagtgctaggggtttgtggcagtgactggggccacctagagcagttctagggttcgtagtcattctctctgagtcatggaaaactgcccaggaggcgagtcccacctaagagagtatgtgtagcactggcacggcctgctgccttgcaaatgaccacatttcatgaaagaaagccagggccacagacaggaaccaaaggaaatcagtcacttaggggaagataacgaatccacaaagtgaaaaagggaaagaaaaaaagaggcaacttcaacactccaacccatgggagcagaacgactttcagctttcgcagggggataatcactgcaagtccagcttgaagagggtgatttcaggatctacatgagaataaggcgcaattttttttttttttttctgaaaaatacggaagggttcatttacagctgttaaagatgggccggttttagggctaaagcaagactctggtcagatgttaacaactcagttatcctggggaaaaaataactggctcccaaccctttcccttttcagcatttgcaggaaaagaaggagtaggtaaaatgctttatttcctctcattctccatggtgggcaggagttcacataacaattataaaccatctttaacaggaaagccaagtaaatcctgtagggatttatttggagctccctttttgctagaaaatgagtatcatgaactaaaaatggactcgtttcctctctctccatcttcctctctttcttctctcccctcatctcccacccaccgccatggtggaaaatgactgtggtcaagaagattgaacatttgagcaagaccagatgcctttatatccaatagatgccacggagagtagatcacaacacatctaactgctgtatccccatataaaataattttaattttcctagactgcagaattgatcacatttactgatgatggattgggaagtaggtgaagaggtgagagttggagagtatccattcattcggccagattattctcatttataatgtagtcttccaataagtatttatttccagaaatctattccctctagagattctttctctctcagccattttagaaaattgttgcaaacagagttcctgtccattttcacaggaagtttttgcagaaggggtttgctgggtggcagtggaacacaggcagtggacccctctactactctactgttccagaacacagaagcctttcattgagagtgttcagctcttcccattgctcaagatgcttgtacccgtgatgcttcttttctctgcttaggtcacaatatgtggagctgacaaggttcccctattatcagtgacaatggtggaatgtggaggtgaagttaacaccttcgtggctacagagtttccttagcagagctgtggagtgtgacaatggtgtttgtgtctaaactatcaaacgccattatcacactaaatagctactgctaggcaatccttccctcgataaatgtcttggcatcgtttgctttgagcaagaaggttcatctgatatcagtcttctcaatcttgtgtacttactgaataaagtctggctcttttgcactcataaccaatatggttagctgaaccctgcctctcacatgctgttgttacataccttagctggtgattaattttcttgttttcccaagtcaataaaaagattgcagaccaggcacggtggctcacgcctgaaatcccagcactttgggaggccaaggcaggcggatcacttgagctcaggagttcaagtccagcctgggcagcatggtgaaaccgtgtctctacaaaaactacaaaaattagccaggcatggtggcatgtgcctgtaatctcagctacttgagaggctgaggtgggaggatcaattgagcccacgaggttgaggctgtagtgagctgtgatggtaccactgcactccagcctgtgtgacagagcaagatcctgtctcaaaaaatgaaaataaaaagattgcagagttcctcagagcccccaacacaaggccaggcacgaggtaatcatttaacccatgcttatagacttaaaatgaatagttaggaaagtgttagacgcagaaggctaagactgggctaaatctatgttatgcagacagaccgcaagcttataggtacaaaattaaggtgtgtgggtccttctcttttcgtcgttaaaaaatccaactttctaataaacttacacatggtttcactgacgtttcagaaattctagaatatgtttgatttctactgatttcaatcaattactaggctgattactgaattcgtacactaggcctttcttcctcttgcatcagtgaattaccatcagaaaattgtttatgaagcatgtgtgagctgccatagcaaatctgggacccatgcagtttctaggacagttggcccagccaggtgctctggtttggaacccattctgtctctgagaggtgtctaaagtcaggagtaggtttcgtttgtgccagactaaagcttccctccccaggcttggttaaatgaagtaggacatgtttaatcaaatagacagggttagatcaaccatcagaaacaaattcaaccattcaaccattcacttatgaaataaatatgtgtagagactaccgtgtgcctgacactgtcctaggcattgaagacacttttaaattaaatgtgtctgatgttatttccagagatgggcattcactggctcgcattatattttgggaccattgtaattgttccaaacgggagccaaatgagcaaaactttgcgaaataattctgagtcccttgctggaaagcctcacctgaatgcagcccacacatttatgatacactacaaaggcttcaaggtcatgagatgcctctgtccaaagaagaagaagagcacccctgcctgccctgcatctcttaccacctctcatttcttccctcctggcaccatctactgtcaagaagagaatcagactccctgaaataattgagacactgacattcctttttgtgtgtatttttttggcaaaggctctaattgaacaggcattaatagagggctctactgttatacagatcacgctcatgcacactgtattagtctgtgttttcatgctgctgacaaagacatacccgagactgggaagaaaaagaggtttaattggacttacagttccacatggctagggagacctcagaatcatggcgggagatgaaaggcacttcttacgtggcatcagcaatagaaaatgaggaaaaagccaaagtggaaacccctgataaacccatcagatctcgtgagacttattcactatcatgagaatagcaggggaaagactgacccccatgattcaattacctttccctgggtccctcccacagcacgtgggaattctgtgcgatacaattgaagccgagatctggatggggactcagccaaaccatatcacatgccatttcatttgatccatacaacatggggcaaagatgatcggtttgacaaacagagtctaaagggttctggaatcgtctggtcctccagccacaactcaacatggatctcttaagtctaaagttctgtcctgtacctgcagcctcctttggcctagttattttgtgaaatctcatgcttcacagtcgaatctgtgtagaacctgggttaatcacgccagtatgcgatcaatatcctcatctccccatctgctttgtcagtggattctgagggaaaacctgtaaattagagagggatgagccatataagaatgtctccttgtgagtgttcattgtgcagagaaagctgaaaattgcaaaaccctgtaatcatgaaatgaaagagaaggaacatctaagtggtagctttggggtcaggaagagggtagacaaactgtcccaacaccaagcagccatctacatgacccagccacctgatgtggcaccaaatgacccagagtcttgaggttctgaactgttcccagactcggggacaatgtgaggactgggtcttccatgctccttttcactcccactcaccctgagatttttctcaggtggaattaaacagggagccaagtgaatagcattctgtgtcttttctgctaggttggctcatttaatggcttattatgattgctgcctggattcgttttgcattcgggattggagacctgtcatttctgtagatctctaaggaacacacatagaaggcaaagcttccctctcccctttctacctctaattacaatcctgctgctccaaatctctgatgatggcatcttcccagaccagcttttatctccccttccctccccaggatgattactgccagtcatttccaataaagcattcctggggacaggtactgactctgaatatggtttgcaagatgaaagggttcacttggacgtgcagttaaaaatcacactcgtgctggggaggcagcagagaacacagtcaccttgacatgttttcttccccgggagacaagccacttgagtctagctttgctttgtggatcacaccatggagtcctgatgaatcctttcatcttagtacaatgtgtactttgaatgtgaaagttgccacttgcagcctgtccagtgttctatccagccccagaggaagttttgtgaaataacatggcagttagcatgtatcgatggcttatctacatatttttatgaactcttcttaaacctatattttctgattcaatacttcattgaatcagaagacaaaggaatgctagaactggaaagcagtctactctttgttctgatgaggaaatcgaagcctaggtcttctagaatttactagacaggtccacattcacagtcccctcccctgcctcatcagccattccctgagcagacatgggttgtatgtttctatgtgccaggtgttctactgggatctggggatccaaagaagaatgaggtcaggtcctttccctgagctattctcaatgtaggagttgcacagaggcttaaacaaagacatgtatgcctccgcgtactagatgccggcacagaggcagagacagcgtaccaagaggccttacttatgcccttgttttctttccaggtgaagaaacactgagtctttgatgttatgatcctttttgttactgttgggaaaacattccttctggtttattttggtgattcaacttccaacaagttatggataaaaggcgtttctttgttttgggagacaacgctgtcatagcattgtctcccaacgtcttcctgctttcactttgccacttgccagcataatgagcagctcagcatctgttgagggactgggagtggatggtacactttccaggaatgttgtggagaattttaatttctccaaggatctgggagaaatgttagctggttgttcttcaaaatgcaggctgggttaatgctgtttccttcattgctgcctcacaaaaagcctcctccaaggtcacctcactgctcctcagtttcccttcctttgggacaggctcaggaaagccgctcagtgtaaatctgtggcggaagcccccaggccttgtgaagaggtagcagaatgggggcatctgctttcttctctttgatatccaagtttctaaaaggaagaaaagggagaattacaaagcacatgcaagctcacaaaaatgtagatggctactgaggatcctaaagggcctgatcacaattcctcccttaatttagggagccaagtgcttcccaatgtgctctggaaaaaacatgtgacacaaacatgcacttaggatatctaaacactgtgcataggatgcaaaaatgagtcagactctcgcattcactcctgcacgcattcgtctactcaatcaacattcaattgtgcgttcctactgagtgccaggcatcatgctagtcactgacaattcacagaggtgatgctctccccagaacctagttgcttccagctcagtgaggacacacacaggcaaatgagtcatggctgggttgagctgcaggttctttgaagcaggtatggggtgtaccatggggcccaaaggaagaaaacaccgtccatggtttgtgagaaaggcatgaataatactaagaggtgagcactctggcacttgtggtgaccctggcagccctccaatgaaggagaacgttgtgacctcggctagcaaagtgtaaaagttttcactttgacagaggttgagttacattcaagtttctaaagcattccccagcaattccctccagacagcaactgagctatgaatctggaatttatttggtagggacttttctctctcagaaatgcagccaaacaccaaagaaaaagatcaccttttaaataaaagaagcacattgtactatttggcaagtgactgggggcaggtgtgtgtgtctgtgtgttaacgcacatatatgtgaagaattttaatttctcaaaggagctgggtaagatgcctttaatgtttcattcgaccgggactgtctcttctttttctttctttcaaccagggaaaagccaatgctgacctgcagctggggctgaagtgagcattctcctatttacctttcagcctgaggctatactttccttgggagactgccctcggtactaggctaggccccccgcacacaatcacatcaatggttcaaaagggttttaggcctgctccccaagtattccagacagattgaataaagggcttcccctgatagcaaaatccagctttaattctgataaagtgctttattttctgagacaaggtttcgctctgtcgcccaggctggagtgcactggtacgatcttggctcactgcggccttgacctaatttgggctcaagcaatcctcttacctcagcctcctgagtagctgggactacgggcatgcaccgcaagtctgactaatttttaatttttttgtagagacagggtctcaccgtgttgtctaggcttgtcttgaactcctgggcttaagtgatctgcccatctcagcctcccaaagtgctgagattacagttgtgagccaccacgcctggccaaagtacatttttaaaggcttgaggtgagagggaaaggagtggaagtgattgttccgttgagtgtctattgacccattaaatacaccagataagaactaatcttgttctacccagagaacaagtctcttccttttcactttttggcacatttagcgcagtcaagagctaattaaagtccttcccgtttctcagggctgcctgtcttccctgtggcacatcctgttctgttttttggcttggcttccaattgcagctggatacaaagaagtcagaggtgatctcccactcgtttggatgtgccagctactatttttctaaatttctagtccctctcatgagcactgacaatctgtgcctgagatttttctggtctctgcataagttcaggatatctcatatgcggcctctgctcagcaattagtggctaatattgctgggttgggtgaaacatggacacaggagctgtacgtgtccccaaagaaggagctccaaaagccacccccaaatgcggatggtatattaggaaattttgtttgcaagaggcaatttttttcttagattatctcaaataattcattctcatgacagtatttcttaaacacctgctatgtacaaggcactgagctggggtaagctttttggaaggggccacatggcagggggagagtaatcacatagaaactcacaaatagtcataaggcaggaccctgtggaaaatgcacaggcagtcaggattcaggagcatgttagagatgagggcatctggtcaccccaagactgcagcaatcaagctggcctccaccgcgatggtgattcatttgctccatctctctgttctttctgctaccctagctgcctccatccttgccgactatttctgctcactctactgctgcctactcgtgtcctctgctaatcctggggtccatggcccctgctgcctcatggcctctgcctgcctccttttggtgtcctttcagtttcttcttatgaaatcctagcctcccgagtagctaggattacaggctcaacaccatgcctggtcagtgttttgattttttttatagatggggtctcactgtgttgcccaggctagtcttgaactcctggcctcaagcaatcctcctgcctcagccttccaaaggcctgggattacaggcatgagccactggagcccatttttaaaacctaaattagattatgtcactctcctgctcaaaatcttttaatggttcccagctcactgggaataaaattcaaggatcccttcatcctctgagacagacctcacctcctgctcttcctcttgctcaccccatgccaccctcatccctgcagttcctcaaacatgcagagtgcattcctgcctcaggaccttcgtacttgctgttcccgttacctggaccgttttcccagatatatgcatgccacttcagtcatgtttctattcaaagttttcttttcagagaagccttccccagctttgcagcactttttgcctcctgacgtcacttcttagtctattttctgtgtctacactagtaggtcagacataagaggacaaggatgttgctgtatccccagctcacagaacagtgtcaatcacaatatttgttggatacaatgaatggttggaaacggcaggaattttctgcatgtctccaggctatgtccccagtcattggaccatattattgttaatcaatatttcattttagccaatatccatcctgttacaattatgtggctgtctgtctctgtcaccagctggccttgtttcctgccaaacaccttgtccttaattgtctcaacagctgccctgtgcatttctcatgccagataccagcctgaaatgctgccatttctctgcctgaaaaatcctcaggatgattcttcaaacccctgaaatggacaatgacatttcatgcacaggtgcacttttctagggggagggtccagagccgtcactcaatttgcaagagggtcctccaccctctgaaggctgaggagctctgattttaagcatcagcagtccattcgcctaaaccacgctaagctttctatctgtgtggcaggccctcttggggcgccttccactggctgataccttgtgatgcctctgttcttcatacctgagctggtttcaccaggatgttctctgtgcacctctagaagtttcctcccttaggccacattctgaaatcttaagcaaaataccacactcccctacagcgagcagggtccctaatggctgcccccacgcggctgttttattactggcagtgaaatgggctgggtccaaccccctgcaactgaagcagcatcgtttgtctggggtaatacccgaggttggttgtctcatgccaaggaaatcgaagacacagacacacagggagtggctttaagagcggaatgtttatcaggcaaaagagaaaagctcccccgtgcagagggagggggtttctgaatgcatctcccgggtttggggcaagatgctgagaggtgacagcgtgctcacagcccttgcagccctcgctcgctctcggcgcctctgcctgggcgcccactctggcggcgctggaggggcccttcagcccgccgctgcaccgtgggagcccctttctgggctggccgaggccggagccggctccctcggcttgcggggaggtgtggagggagaggcacgggcgggaaccggggcagcgcacggcgcttgcgggccagctagagttccaggtgggcatgggcttggcggcccggcactcggagcggccccgggcagtgaggggcttagcacccgggacagcagctgcggagggtgcaccaggtcccccagcagtgccggcctaccggcgctgcgctcgatttctcgccgggccttagctgcctccccacggggaagggctcaggccctgcagctcgccatgcttgagcccgcccctgcccccgccgtgggctcctgtgcagtccgagcctccccgacaagcgccaccccctgctccagggcacccggtcccatcgacggccaaagggctgaggagtgcgggcgcacggcgggactggcaggcagctccacgtgcagcaccggtgcgggatccactgggtgaagccacctgggctcctgagtctagtggggacttggagaacctttatgtctagctaagagattgtaaatacaccaatcagcactctgtatctagctcaaggtttgtaaacacaccaatcagcaccctgtgtctagctcaaggtttgtggatgcagcaatgagcactctgtatctagctaatctggtggggacttggagaatctttatgtctagctaagggattgtgaatacaccaatcagcactctgtatctagctcaaggtttgtaaatgcaccaatcagcaccctgtgtctagctcagggtttgtaaatataccaatcagcactctgtatctagctaatctagtggagaacttttgtgtctagctcagggtttgtaaatataccaatcagcactctgtatctagctaatctagtggagaacttttgtgtctagctcagggattgtaaacgcaccaatcagcaccctgtcaaaacggaccaataggctctctgtaaaacagaccaatcagctctctgtaaaatggaccaatcagcaggatgtgggtggggccagataagggaataaaagcatgccccccccccccccccccccagccggaagtggcaatctgtttgggtctccttctacagtgtggaggttttattcttttgctctttgctgcaaatcatgctgctcactgttcgggtccaggctgctttaatgagctgtaacactcactgcgaaggtttgtagcttctcttttgaggccagagagaccatgaacccagggggaggaatgaacaactccagacgcgcctctttaagagctgtaacactcaccgcctaggtctgcagctttgctcctgagccagcgagaccaggaacccaccagaaggaagaaactctggacatgccacctttaagaactgtaacactcaccgcgaggatctgcagcttcattcttgaggtcagtgagaccaagaacccaccaattttggacacaatgctattggttttataaatcagcttgaagaggcggtgtctgatttacacagggtatagtgggttggttggaccaggtgtgctacttacatagggcaccaagaggctggccatcccaccctaatcttttattatgtaaatgaggtctttacctgaccagcaccatactgactgcacacatggtgctaaagggaagaggaaacttccgtgttgaatatgcgtggcgtccaggtatcccttttctgttggcatagctgctggtgtcacctgtgtaggcttccagcttgcttatctaggcttgcagtttgagttttcaggctgtttttatgaaaaggaaagccttaccaaggactcccttactctcattaactgcctaaataatttctttttagctactgtgtcacagcgacacttttttgactgttgtatcgcagagacgtttttctgggaagagctgcctgccagctccggacagaatggagtcaagtgcatctgggtgggggagtgaaaaatgcagattacctggcccaccccagacccattaaatcagaagctgtggggatggggcccgcaacctgtgtgttaacaaaccctccaggtgattctgatgcctgctcaagtttagagctgctgggcggtaagcctgggacacggcagttctcgttagtgtgtaatgagagtgatgagggaatcaattagccaattactctaccttggaaaagagaggagcagtgtgttctcagccttggctgcacattaaaagcaccctgagagcttttaaaaatcccaaggcctgggccatgccccagatcaattacataagattctccaagggggacccaggcactgacatgtttacagcacaccaggtgattctaatgtgcagccaacactgagcaccactgcagtaaaagaagacattgggttgggcacagtggcttacacctgtaatcccagcactttgggaggtcgaggcaggtagatcacttgaggttagaagttcgagaccagcctggccaacatggtgaaaccccatctctactaaaaatacaaaaactagccagagatggtggtgcatgcctgtaatcccagcatgcctgtaatcccagctacctgggaggctgaggcaggagaatcgcttgaactcaggaggtggaagttgcagtgagccaaaatcgtgccattgcattccagcctgggcaacagagcaagactgtctcaataaacaaagaattagcctgatgtggtggctactatgcacttgtagtcccagctactcgagaggctgagatgggaggattgcttgagcccagggagattgaggttggactgagccatgatcacactactgcattctagtctgggcgacagaagagaccttgtctccaaaaaaaaagcatcagcaatacgctttgctttgaatggcttagataactttattttttgaaatatatttcaatagcttttggggtacaattggtttttggttatatgaatgaattgtatagtagtgaagtctgagattttagcacaaccatcacctaagtagtgtacgttgtacccaatatgtagttttttctccctcaccctcccaccttccttctgagtctccaaagtctgttaaatcactctgtatgcctttgcttacccatagcttagctcccacttattagtgagaacatatggtatttggttttccactcctgagttacttcacttagaataatggcctccagctccatccaggttgctgcaaaagtcattgtgtttcattctttatggctgagtagtattccttggtgtatatataccacattttctttatctttggttgatgggcacttaggttgcttccatatctttgcaattgtgaattgtacggcagtcaacatacgtgcgcaggtgtctttttgatatagtgacttcttttcctttgggtagatacccagtactgggcttgctggatcgaatggtagatctacttttagagaactttattttaaatggtgtacatagaagtccatatcaagtaacaagtcatttagacaaaatagagcttctttttttatatcctataataaaaaatctgaaggccgagagagagcctagaactggaacagcagcctcacaaagtcttcagcaatccaggctccttctagatggccattctagaagggtggccctcagagtcacagtgtaactactagagctgtcacattcatgtcccaggaaggaaaaacttaaagaatgagggaaaaagagaatagctgctctcttgtttaatcttctgtaaggaatgctcctggaagccccaaccagagagttatgctgagatctcattggtcaggactgtgacacatgactaccctcagctgcaagggagtctgggaaatgcagtattataactgagcatcttgccattgagaggaatatgggttccgttattaaggaagaagtgggaaatggatattgaatagagagaatgaagattgggtaagtagccatcagtccatttccgtattagtcagagttctccagagaaacagaaccaataagatatttctataaatagatgtattataaggcattgtttacatgattgtggaggctgagaagtcctacaatcttctgtctgcaagctggagacccaggaaagcaggttggaaggcctgagaggtgaagagccaatggggtcaattctaatctggtctaaaggcctcagaatcgagggtgctgaagcttgatgtcccagctcacccagtcagacagaaagggaatgttaccttcttctacctttttgttctattcaggccctcagtggattggacgaggcccacccacactggggagggccaactgctttcctcagttcaccaactcaaatgctaacctcttccatgaacagcttcacagacataccagaaataatgtttaagcagatacatgggcatcctgtggccccatcaagttgacacataaaatcaaccatcatagtgtcacaaaaatcttccttggatgttcatggatgaatgatttaggggggtttgtgctacagaaccatattagactcaaaactaggagagaactttcccagaaagctgtggggcatttaattaataaaaactgctgtgtctacactttccttctttgactgggtagtggggttgggtagggagggtggtcaagataagtaggggtggcagagacagaaagagactaatcagagaagtcaccaggattctgaggtgtttgaagttataatgaggtgggcacttgtttcaaggtttcactgtgaatcagtgaattggggggtagaatctggagagaacgagatctgctgtgacaaggaggaatttttttctgcaaacagtgagtggagggttaatcaggactctttgggtcatatggaatagaaacccaacttcaactagatttagcaaaaaggaatttattgtctaacctaattgaatagtatgaggagtatgtagaattcaggcatggctggatctaggtgaaagaacctccaagctgtggcttcagttatcacctctcaggtgatccttggttctgaagagcccttaggcaatctgctgtattccctgtctgtgcttttgtggcccgtcatggtgagcaagtccactggaattctcaggtaacagggaatagagagacacatactatcaatgttttcatgtgaacataatacccttatttaagggaggcagtagtgagggatgttcatttcctatgtatcaggcaagaccagctggattcatatggtgcaggactatttgcccttccctgactctctctggtctcttctctgattgagtcagctaatgtgatttgttagccgttattgatttttttttttttaattgaagtctcgctctgtcacccaggctggagtgcagtggtgccatctcagctcactgcaacctctgcctcccggattcaagtgattctcctgcctcagcctcctgagaagctgggaatacgggtgcacgccaccatgcctggctgatttttttttttttaatatttttgatagagatggggtttccccatgttggccaggctggtcttgaactcctgacctcaagtgatccacctgcctcagcctcccaaagtgctgggattacaggcatgagtcaccatgcctggcctgttgttgatttttatacgttaaaaaaatagaattaaatgttttcagccatgtttccactgatgggatacccagacatggagaaactctaaagataggcttctggagagaggaaaacaacgcatcatctagcaggctttccgcacgtctctcattttggctaatggttccaggcagctattttggtggtgtttgtcctgtcttcgttcttttcatcttataggtacccacagcatatcagggcctcaatggggcaacagaaatgtatatatgaataaacaagcaataatcctggcactgaaaggcaactcatagctcagatgctcgcccatatctgtgtgggctttccccctgcagagctaaggcagcctgactgccccaccaggactggcatctctttgctgaaggcttgctttagcttccagaagcctctttgcctacgcacaggtggcaaaagtgccagatcctcctctggtgatggacaggagtcagcgcatagagcctcactcctggggaaaaaccgtgagatgcatgctctttgctggcatgcacaggtcccaggggcccaccatggtaacagcccctctaggcgctgctggctgcctgctctcttccccacctactgtgcttcctaggatcacctcccaaacagctggcatgcaaacccttgtcaacagctctgcttctgagggaacctaatccaggacaaccccagatgtcttgtggagaccccatgaacggcatggaggcatcataaagcatgcccagggcatgggcaagggagcacggagaaggggacccgagaagggggctggagaaagagagatgtgacctggggcaaagcgaaggcagggcattcccggcagatgcaattgcaagagcagggctgtgaagggctgaactggtgcttgaggcaagacgatgatggcttggaattgtgttatttgtgattttcttttttctctcttcctcatataaactgctctgggactggagagcagagatgtgatgtagccttgaggagcaacggatagtaggcgtggaaaagacagcacaaaacaaagagcagaaggttttaaattatttttcccaaaacaggcttcttggaatcaaggatgaagcagagcacagaagcttctcttctgcccagaggggagacacaggagggtcacagggccaggcgtagcacagagcatggggaaagggtaggacattggaacccttggcggggggatgctggcacaccctggaggcttgggtggttgctgtggagtgtttgttagaattttattgtaatcacagcttttgcaatgaaaagtaatggcaaaaaccgcgattacttttgcaccaatctaataaaagctgcattagctgtttacctgggcactgaggggtgatacttccatggcagcttcactgctcaggcccatggagtgtccaggagacgatgtccagacgccacccgccccccccaccaccatgctgagcctgggcctcttccagtgccacatgtggccctccccttccagtagccgaggcaataatcctctttctcagagctgcattcagggtatgagaggccctggatggtggtggaaaccctcccacacccagaccccaacacaggctaaatctgaagagtgctgataaggtttggctgtgtccccacccaaatctcatcttgaattatagctcccataattgctacatgttgtaggtgggacccagtgggagataattgaatcatgggggtggttttcccctactgttctcatggttgtgaataagtctcatgcaatctgatggttttataaggggaaacccctttcactcggttttcactctctttgccagccaccatgtaagatgtgcctttgttcttccctcaccttctgccatgagtgtgaggcctccccagtcacgtgcaactgtgaatccattaaacctccttttctttataactgacccagtgtcaggtatgtctttaccagtagcatgaaaacagactaatacaagtgccaacctgtctgggcaagaagccagctctgtacaaggtgagggaaatgacaactcacaacatggggagaaagtaacgacctttgaatcacctcctcatgctatgcaccgaggcctgctcattgtatgtgaacctatagatgatataaatatatgcatatatgttatataaaagctctgagattcactttttagttgtctgagcatgaatgtgacaattcaattgagctgctctgcaataaggatgaaaggataaaattagaaccaattaaagttacttgatgaaacataagcaccatggaaaattccatgttaagtgatggggtgacctgacatgtgaagtcttgctgtctcatccccagtgcagagaaaaaaaatgggctggagctctgaggcctgcgaggtcggtggccagctttgagggtagggacacagtaggaccctaggagaaaggagaggtcagcaaaagtggatgggggagtctcttttgggtatctcctcctgtgctttgatatttttcccagaggttgctggggcttatctttggggtgcatcaccaaaaatatccttcctggaagatagagtgatggataagacacccgagagtcagaagatgtgatttcgggtgctggcttggccactgagtcatgaacaactcctggtaaactcactgaacatctctgcatggagttccctcatttggaaaagcaggattaagatgtctgaattactctcctgaattattgtcaagcttttaactgcttaatccacatatatttttttttaagacagagtcttgctctgttgcccaggctgaagtgcagtggcacgatcttggctcactgcaacctccgcctcctgggttcaagtgatccttattcttcagtctctggagtagctgggattacaggcacgtgccaccatgccaggctattttttgtatttttagtaaagactggctttcaccatgttagccaggctggtctcgaactccttacctcaggtgatccgcctgcctcagcctcccaaagttctgggattacaggtctgagccacctcacccggccttaatccacatttggaagaattaacagctccttacaaatggaggaggccagcggtacattatcaacatcaacatctccacctccaccactcttagggccatgctgtctggtaatctatgggaagagatgcaggagtgatcctccctagcaagtctgcatcccaagaggcatatttcttgagatgcaacatttccacccagaagtttgactttctgggtttgtgaccaaaggataaagagtgttttgtgacaggtgagcattttggttccctgacctcaaatcacataggcagcagtttattgtacccgtgagcaggcctggacctgcaaggaatgtacttcctcacatttaaaaggtgatgtttccatttctttgtatcacttgcattttggcagaactggacattgcaggaaaatgagtttgaatgtaggcttcttccctggaatgctttgcatttaaataactgctttaggctgggcacggtgtctcacgtctgtaattccagcactttgggaggctgagacgggcagatcacctgaggtccggagtttaagaccagcttggccaacatggggaaaccctgtctctattaaaaatacaaattttccatgtgtggtggcgcatgcctgtaatcccagctactcaggagactgaggcacaagaatcgcttgaacccgggaggcagaggttgcagtgagccgagatcgcaccactgcactccagcctgggaacagaaagataccctgtctcaaaataaataaataaataatgaaaaactaaataactgccttagatattccttttccagaattcttgacctggagttcttccttggtgacttggtcaaggataagcacttaaacggaggtatccccatgtgtgttgtactggtcgcttatgccaccaaatctcagggaaacattggtgaagatggagacaatacttctgtaagctttggccatagctacgtgtaacttgaatataaaagcaaggggggtccacatgggccagtcccctgtaaacagttgtaccaaatcctagcaccaaatatgattaaaaatcagtccaaaatctctatgtcctggttacatcccagaccaattcaatcagaagctctggggtgagacctagcatcattttcttttctgtttttgtttagtttttgaaacagagtcttgctccatcacacatgctggagtgcatagctcactgaagcctcgaactcctgtgctcaagtgattctcctgcctcagcttcctgagtaactgggactacaggcacacactaccatgcctggctaatgttttgattttttgtagagatgggatcttgctatgctgcccaggctggtctcgaactcctggcctcaaatgatctgccttcctcgacctcccaaagtgctagccacaatgcccgaccctggcatcattattttctgacactccctgatagtccaatgcccagctaagatttagaaagattgatttggtgggttgaggagggaagggctgtttgagaaagtgatatttgaatggagatataaaagataaggagagaaccaagaaaaaagtttctggaaaaatgccaaataaaaggtacaaactgagaggcttattccagtaattgaatgaaattcaaagaaaaatgccatatttgccttttacacttttttttttttctttttgagactgggtctcactctgttgcccaggctggagtgcagtggtgtgatctcagctccctgtagcttcgaactcttgagctcaagccatcctcccacctcagcctcctgagtaactgggactacaaacacatgccaccatgcctggctattttttctgttttgtagagacgggggtcttatcgtgttgtccaggctgatcttgaactcctgggctcaagtgatctacctgtcttggcctcccaaagtgctgggattacagatgtgagccaccatgcctggcctaaaacttcttattctttaggtaatactggcctaaggaccaaagataatgcccagtatccccagacctgacggtgagccttacctcacgattcaaactgagcaggaggatctttctaaggaggagcctcctcttcctccaggatatttaaaatagggcttggtggaagagaattttgcttgatccgggttttcaggatgccacctgctacataaaatgaacatacagggcattgggggctcaaggaggtgaaatcgctagggcagagaagaaggtaggggcaagtagattcatctcattaagttctcccgtgcgaggcagtttttcttcctcgtctgaagtccaccactgggagggagagaggaggaaggtaattcgtggacacagaaccacatctaatttaaactcttggtctggtgtggcaagggatttgtttgaattattgatttcctgtaacacagacttagaaacaatagtaaagactacattgatcttcaagaccatatcatgaggcactattagcaagatgtgcaaatacagacataagtgataagccaaaactctcctgggaagccataacagtgccaagggaaccaactttttagagtgaaaatttctgttgattgttagaaatgtctgaggctacctgcaaacagtggctcctacagttgaaatgcatctgcctgacagagatgcctggattttcctagcacgagctgttctctgccgtcccccttcagccggctgctaccccgtagagccctgaggaggctgtgtcaagaaggaagtttccagatgctggaatggatcagcctagtttgctttctgctttctttctcccttctgtctctgggtatctcagtccattcgggccactataacaaaataccacagactgggtaatttaaattacccaaaaatttgttaccattctggaggctgggaagcccaagatcaaggtgctggcgggtctggtgtctggacagagctggcttcccggtccatagatggtgtcttctcaatgttatctcatatagtgggagagatgaggagtttctctggggccttttttataagggcactaatcctgttcatgaagactccactctcctgacctaatcacctcccagagtccccatctcctaataccatcaccttgggggtgaggatttcaaatatgtactttatgggggacatagacatttagtccattgcactgggtcattcatgccttcccaggatttgctcctgagcccctctagacctgtgccttgctggtgtcccagtgccctctcctgcttgttggtccggagatgcctcacatggtcaggaaccctgctctctgctcctccatcctgcctcctgtctgagcaagcactatgctcttcaggttccagatgttcagcccatgcccatggctgaatcccagtgccccatgaagcccacagaaataagcctggacccctgaccaatcagcaaagcccctgccttatgcatgtccccagcctgctgctcctcctccatggctcaatgtaatatctctcccgtttcaggaatatttgctagttgtttcccaacatcatcttagtcttgcttctgaaccatggttcttgagagtctccccacagggagtacctttctttctttgctgatctctcacctccctttatgccctgttcaaaattcacctttttctgaaagatggaaaaggagcagaaatctggaagagctattgatcaagctgcatttacctaaaaacagcgtggggatgaagtagagagattaactctccaaactcttgtagctggtaattgtcagaaccaagattggagcccagcggttttattcagactaggtaccttagtctcgcaatgctgccgtcctgctttagaaggctcttcaagtccgttatctcatgctaagggatctaaagaagccagagatttttaaccaaaccaaattgccataagcaagaacctctacctctccatcagagaacaccagcatggatgggtcagaggtatccatccagtgaacaaatgttcattagagtgagcaatgtgccaagcatctctaggtactgggctgcagcagtaaataaaccagaaaaaaacataacctgcccacaggaaacttactttctggtgtggggaagatagacaattaaagagtaaaatgtatatgatgtcacatgataataaaggctaaagaaataaaggtggggccaggcacggtggctcatgcttgtaatcccaatactttgggaggccaaggtgggtggatcacgaggtcaagagattgaaaccatcctggccaacacggtgaaaccccatctctactaaaaatacaaaaattagctgggcatggtggtgcatgcctgtggtcccagctactcgggaggctgaggcaggagaatcgcttgaacctgggatgtggaggttgcagtgagctgagatctcaccactgcactccagcctggtgacagagtgagactccatctcaaaaaaaaaaaaaataaaggaaaataaaggtggaagaaggataaagagcctggggagggagcttgtcactttccctatggtttcagggaagaactttctgagaaggtgacttttgagcaaaggccttagaaggtggtggatatctggagaggaatggtccagacagagggaatagcaagtgcaaaggccctgaggcaggagtgttccaagaacagcaggatgatcaatgttgttggaactgagaacagaagtgggaagatgagacgagaggcatttgggatagtatagtgtctcattggcctttgggatgcatttgggcttcatgcagagggagatgagaggctatcagaagttctaagaagacgagcagcatcttctgactctggtttcaacaggatcaccctggctgttcagtggtggatggcctgaaggaggggcaaggacaggattctggacacaagtcgagaggccactgcagaaagccagatggatgtgatggtgcctggatcagcgaagcggggacacaggtggtgctggatataagttgaagcgaagggaacaggacttaatgatggagtagatgtgatgcatgaggaaaacagaagctgccagtgcttgggattggccggctggagggaaggagctgcctgtgataaggaagactggaagcagcagagctgggggaagttcacagctggcatgctgcacagctccaggaggcaacgttctcattctcctatataaagagcagcccctaggattgtgcaaggaggtgactgtacccagattaatcttacccctttctgccctaggcttcttagtaattttagaatcagctgggcaaatatggagaaggaagcaaggctgggtttttgccagtgtattagagttctccagagaaacagagccaagaggatattcatataacaggtctcgttataaatctttttatatataatatatagacatgctcaggtgtgacagttctaacattcatagctggcgtgctgcacaactccagggggcagcattcccattttcgtacatgaagagcagctcctgggattatgcaaggaggacatacatatataatatataatatttaatatataaaaagctttattgtaagaaattggctagtgggcttatggaggctgggaagtctcacaatctgctgtctgcaagctggagacccaggaaagccagtggtgtagttccagtctgagcccaaaggcctgagaatcagagagccaatggtgttaagtccctgtccgaggacaagagaagatcaatgtctgtctcgagcagtcagagaaagtgaattctcccttcctccacctttttttttttttctattcaggccctcaatggataggatgaggccttctcacagtggggagggccacctgctttactgagtcccccaattcaaatgtcagtctcctccaggaacacccccatagacacacccagaataatgtttaatcaaatatccgggcaccccatgacccagtcaagttaacacttaaaactgaccatcacagtcagttacttatagagccaccaaaaaagggtcggggagagtgaagactagaaaagattcttgaaagagatgaggagaagtggagataagtattgtacctcaagtacttcccaaggaaagggaatcggctctgagctaggagagtagcttgaggacaagagacgggagggtgacttcagggtgccacagtcagaagaggggaggccaggtgggttggtgtagggcttctatgttagatgaaataagcaatgggttttcactaatcctcatcctcaaattcaccaatatgaacaaaatgaatgaactttgtggaagtacatgcaatgcacagagaaatgaaaaacagctacaatcccagtcacaagtctgagatgagtatctgcagctaaacatggaccacacatgtgaattggatgggggaggacagagatgacacagcaattgattcaaatattttttgagcacatactatgtgccagacacttctaggtgttagggatgcatcagtaaacaaaagagagaaacatcgctgtcctcatagagcttacatttgaatgtgggagacaaacactaaagaaaataaaccacatagtatatcagaggatggtacagaaaatggtacgaactaagtgtgggaatttagcagggagggaagatgagagctcaaggcagtggtatcatttgttttccatttcaataagctggtccaagtgctacagtttgaaattggccctgagtcagagagcactgaggacagcttttccacttaggatgctgaggtcacaccgtggaagggctgggacagggaaaaggcagcgtggccacctcctgggtcctgggatttggggacagctgtgctacagatgatgatatgtatctttccagcttttgagaaagggagagatttctttaaaactatgggaaaggaagcccaagcatgcagatgattctctttctttgggaatggtgagagctggaggtgtgggtgggctctgagaaagctggggaatatttctgtgagccaggtgcccaccatgatgccaggggaaaaggtggcaccagaggggcagtacagacaccatctctattccactgacctggactttgagcctgaacaaacgcctggaagtggatgtggcagtgaaagatgaggaccctgttatgggctgaatcatctccccctaagactcctctgttgaagcctacacctcagaatgtagcattaattgaagagaggttagttaccaagagaaagtgaggtctgcagggtgggtcttgatccaatatgactgctgttcttataaaagggggaaatttgatctgggcacagtggcttattcctgtaatcccagcactttgggaggctgaggtgggaggatcttttgaggccaggagtttgagaccagcctggggaacatagggaaatcccatctctaccaaaaaaagaaggaagaaagagggaaaggaaaagaaaggaagaaggaagaaagaaagaaagggaaacggaaaggaaaagaaaggaaaggaagaaagagaaaggaaaggaaagaaggaaagagagaaggaaggaagaaaggaagaaaaagattagccaggcatggtggtgagtgcctgtagtcctagcaacttgggaagctgaggtgggaggattggttgagcctgggaggtcagggctgcagtgagtcatgatcacagtgctacactccagcctgggcaacagagcaagaccctgtatcaaaataaaataaggaggggaaatttgaacacagacatgcacacagggagagcgctatgtgaagactagagttatgcggctgcaggcccaggaactcccagaagctcggagagacaggacagaggccccaaacagatgcctccccggcaccttcagtggcagcacggccctgctggcaccttcatctatagggacttctggcctccagaactggaaggcaattcatcctgatgttcaagccacactcccggtgtggtacttcatttcagcagccctgggattattcaatacagacaccaaagaaagtcctgaggggaactgatcactggaaagtagcaagccatgagcttgccattccacacagctgcagagggagaaagaggaaaggccggggcaaagcgggcagtggaggtgagttctctcagccaaatggtctctgatgcttctgggccctgcaacgggagctgatagactggcttttcttgatcgtatgtaatcaaaaccaagtgacttttgaaaaaaagtctctgagatgatttctatctgggactgtgtgggtctcatgaaaaacagaatttttaaaatgactgatgtattggcacaattagtgcttgtaaatatttgttcgtttgaaggctgtgcccagtgatctcacagatgaaactggcttccatctcgcctcgcagcttttacaaaatagcaatagcaggctctcagagggtttcagatctgccgcagcaaagagttggaagatatatcctgtgctgggaagcatgagaggtttttgtgtctctttgattttttttttttttaagtagttaagctcaagcacatctgcagatctaaatgggggagaaatgccatcctgttcactttggcatctgtggtcagaaggagcagaacatacaccaggaaaacaagccaagaccgggttgttggcaggcccctcccagctgcacccagttgagcacatgcctgatacacgcacaaaaccgtatgtctgtttataatagaagagagagcactttataattagaaaataattgttgcttctttgggcattctctttcattagactctattgaaaccccctgctcttaatgaagcttgtcagatgcatggctgagaggcagtacaagaaaagaacacgagatatgaataccagctagccagccacgcatccaaaaccaggacgttccagacaggatacccactggcaagaagtcatcctttccctgccatcctcattcatgagaaacgtgctgttgaaaacacaggccccttgtagtgaagctttcactcgtttttctgatccacccgtcagggagctccatggttgagcccttctggagactaagtcatatatgtaaatgaccaccctgcaggcaccaggaagggacacaatccccagctggatccacggcgcttcctggctcagtccctgggttgagcattcattgtatttagtcttcctaacactgcacatttatgaagacaaatgggaaaatcaagaggactggatgtgttccaaattgaactaaaacaacgtcaatgagcgtgggcatttctgaacccctaggacaacacctttggtgtaagagaacccactccacgcttaccctgttatttgtctgggcaaggaaaacagcactttatctcagaacaggagagggatggctggacagatggccgtggccatacacaaggccatccctatgctctctggctgggacagatccaactgtgagagctccttctgtccctgtcctccaaatgtgtggggaatttttttgtttgtttttgtttttgcttctgagacggagtctcactctgttgcccaggctggagtgcagtggtgcaatctcggcttactgcaacttccacctcccgcattcaagcaattttgctgcctcagcctcccaagtagctgggattacaggtgcctgccaccacgcctggctaatttttgcatttttagtagagacacagtttcgccatgttggccaggctggtcttgaactcctgacctcaggtgattggcctgccttgccctcccaaagtgctgggattacaggagtgagccaccgtgcccgacccaaatgtttttaaagatgaaatcagattacaataaacaaaaaagggacttctaaaacagcatctgtgaaaggaggctaggatggctccatccaagagaggcaccccctgggctgaccgcaaaacatgaaatctgggagtaggaaatccttttcctccactctctctccaaatgaagattcaaggccagctggaggggaagaggggtggctttttcatccttttcacaggatggttttgactttccatttcatacttttctgtaatttgtttttaatttttcagacttgtgttgacattattttgataattacaaatcattacccaagacagtaccctagtctgtcaagaaggccttggtcacacccacactgagatacagctagatgattagacacatagataaatccaatcaaaatgtgcactgtaccttttgctattgtggaactttctagaacttcactgctaaacacatctgtaagatctctgtgggcaaagcaggctataggctgccttgtagaaaaataagcattttataatctgtaagccatgggaaccacttcagcagaaaggctagaaagggcagattttctgaaaaagatgacaggtgactaaatgaagtattttctccttcaaatccctttacaaaagaaaaatcccatttgtggttcctttcttatcaaaatctggtgcctgagagtagtatatagcatgtgtatatatatatatatatatatatacatacacacacacacacacacatactattgtgtatatatatacactaagtatatacactataagtatatataatatatatactatatatgtaagtatatataatataggtacacactacatatatatgtaagtatatatataagtatatataatatatatacttatataatataatactgcatatatacacgatagtatatagtataaatacactatatactatatgtaagtatatatactatatataagatatatatataagatatatcaggtaccagatatatcgtatatatacttatatataatacatacttatatatacttatatactatatatacactatatatactgtatatacactatatactattctcaggtaccagattttgataagaaaggaaacacaagtgggatttttcatgtatgtgtatatatatatatatatatatgtatatatatatatatatatacacacatacgcactattctctaagcataaaaatacaaaaaagtacaaaaatatatatatatatttttttttttttgagacagggtctcattctgttgcccaggctgtagtgcagtggtgcaatctcagctcactgcaacctctgcctcccaggttcaagtgattctcctgcttcagcctcagtaactgattatgggcgcctcccaccacacccagctaatttttgtatttttagtagacacagggtttcaccatgttggctgggctggtctcgaacccctgacctcaagtgatccacccaccttggccttccagagtgctgggattacagacgtgagccactgcggctggctgagaatagtatatgttaaagtagaagaagccaggagtcttccactgagagccaaccacccctccgtaagggggctgcatacagaaatctctgtgttggcagcattgcttgtggtggatgcctcatgtggcacctccgtcctgctgtcaagctgcttcctcacacatcagaacccagaaggagctgggcctttccttggccagactatctgaactccaggaggccaaggtactcctctcagcatttcagggccctcctgcccatagtctagactgcctctttgagtgtgatccccggcagccacaggagatccccagaaagtgtgatagaaacacagaattcaggccccgccacaaacctacccaatcagaacctgcatattcccaagatccagggattcctgtgcacattcaggtttgcgaagcatccatcctcctgctcagaagtggcgctataattctcccagctgtccagcagatgaaatctgtcttaagaaacagcaaactatggaaaaggccacataggattccagctatatgacattcaggaaaaagcaaaactatgaagataatgaaaacatcagtgattgccaggggttggggggttggggaagggagagatgaatcggtgaagtactggggaattttagagcagtgaaggtattctgtttgttactataatggtagatacctgtcatgatacatttgcccaaacccacagcatgtacaacaccaggagtgagccctaatataaactataaactttaattaataacaacatatcgcggttgctcacatctgttatcccaggactttgggaggccgaggcaggtggatcacctgaggtcaggagatcgagactatcctggccaacatggtgaaaccccgtctctactaaaaatacaaaaattagccaggtgtggttgcatgtgcctgtaatcccagctacttgggaggctgaggcaggagaatcgcttgaacctgggaggcagaggttgcagtgagccgagatcgcgccactgcactccagcctgggcaacagagcgagactccatctcaaaaaaaaaaaaaaaaaggtatcgatattatcttatcaattgtaacaaacatactacaataatgcaaaatgtttgtaacgggaaaatcgtagagtggggtgaggagacacataggaaatctccacactttctgctcattttttgtaaatttaaaacaattctgaaaaatagtctattaatgaaacaacattaccattaacattcccattaatgaaacaagaatattgttgttgcaaatagttggggcagcggatattcttaagcattttggggtatataaagtggtccctgagttgctattgtatagtttgctcttgcccaatttcacatttcactgaggcagccatcctgctttacggctgggcatgacccaaactggtagggaaggaggctctgagtgtcaggagactcaagtggaatgagggctgggagtggttagagatgccaggatccctgtgaattggtgcacccccgccaggattagcatgcatcttctggcctacatcttctggcgcgatccaccatgggtcagccctgggtttaggcagctcgggtttaaggaacaaagtagaaagcaatggaacctaagttgtaatgtaagaatgaggggaaaccacagatgcaaatattttgtgctctaggaaacctattaggaaattaccaaatcctgaaacaatgtaaaatacggcacacactctaaagagcaagtgtctataatgatatacacatcttacactttttgtttaaatatgaatttaattaaacagaaaattgtaactggctgttgaatgatgggaaatggcttcacgtcacagaacccacctccggcaacaatagcgtattagacaccagtggaacaacttgatccagtgagcgaattcgtgatttctgtttacatcacagcaggatgtgtctagaaatcccaggttaggaatgacagtgggaagaattttggctgtgaacagactcttctcagcaccaggtcctcgacagcacaaccatgtgcaaatacacaaatatacacatgatgtgaggttggtaaaaatgctaaacatgtatataaagaatggactgtctttgagaccaatcgttgattcaatctccccataaacctggtcgcaaatcctgttctgaaatcatttgagtgaagacagcaggtgatgggtttagaagcatcttggcgcacagtcggctgggagtaaggattgccacgcactctctgcaggctgtatattctctcctgtgtggcctcagattttccctggcgagattgtgtgctgctagccagtggccattaggttacccagggacgttaggttttcttttcgcctggggtctcaggccctgccttctttattgtcatagagtttgtttgaactttgcttttcccaatgctcggctgcttctgtttctggttgttgttttgaagggatttcagtcccagcattttgcaatacttgttacactggtgtagtgctttaaactgatcaatgaaggtcatggaacagttgcctttaaatcccttgtacctgtgagtttgggtggaaggaaacatagcttttaaaaacaggacactttcatcagtttaaaaagaaaaacttgaaagggaaaactaatggtgcatggaacatatatgaatttctgttttagataagaatggctgcaggatagacacaactataagtgaaggtaaaaaacaaagactgtggaaataagtaaaggcaaagatctgctggcacatacagtgatgatcaaaggtcttggagtatccaggggtcccaggtgctcacggttggaatgtaccagcattttattgccctgttcctcatagccacaatgaccagtgctgggctattttgataaaacacagatctcttagtgatcgaaagccactccatcacaccgagaagttctcaataaagaatttcagaactttggaactgaaagaaattattttgtttagacccttcaatttacagttgaagaaattcaggttaagaggtcatgagactaccccaagaaaacaacgcaagttgatgtaagagacaagattaaaatgaagccctctgagtctttctcctacagcagagctcactcccctggcagcccgctttgtccccaggagaagaagaatttttgtctctggcagaacctttgtctccagtaggccctaaaaggctccatgctgactccttggccaggagtagtctcaggggttgttcctcttggttgggacatttaaatactgaaattataaatggccatgttttcatgtcccaattatggtaggttagtgtgctccttgaatggacagctgcccagcccctaagtctccccagctatctgcagatgaacaagatccatcaaaaaattggttgaaggtgcaggcttcctgggttctgggcagaatgtgaaagggtagtaggctattgcagcttgtttagtagctaggaaagtgaccctgcaggtcttcctgccagccaccagaaaatccacaaatcccatgtacacactgaatccagtcacagctcctcacagagtgtggaggaggccaggtgagcatagtgccagccacataccctccccaataagtggcatctccttgagatgtccaagggtcctccttgtcaccgcagatgagctcctttgtcaaaggaatttgccttcaacatgaatcccatggggataaacactttgaagtagcacatatgtaaacctatgaggtccacgttacattcactcagcccctccccatcaatgcattctccacactgccagcagagtaacctctacaaaacataagtcatatctcctgcttaaaatcccattgctgttaaaacgaagacaaaattcctgaaactgcctgtgatcctgcactgtctggctgcatctcccaacccattgacctcttcagccattagaagtgtgtccaagctccctcctcccaaaagtttctgcctgcagtattccccctgcatgggatgctccttcctcctttttctagataagtcctactcactttatttatttatttatttatttatttatttatttattgagacagagtctcattcttgttgcccaggctggagtgcaatggctcaatctcagctcattgcaacctccgcttgctgggttcaagtgattctcctgcctcagcctcccaagtagctgggattacaggcatccaccaccacacccggctaattttttgtatttttttttttttttttaagtagagacagggcttcaccatgttggccaggctggtctcaaactcctgacctcaggtgatccgcccgcctcggcctcccaaagtgctgggattacaaacatgagccaccatgcccggcccttgctcactttaaattctcaggtcatttgacctttccaaccaagtcacatccccctgtcatagactctcctggactgtgcacctcctctttgtggcacggtcacacacacagtctgacatctgtgagtggatgagatggttaatttctgtctctccactcactgtaaattctgtgatagcagaggtcactctttgctcaccactgtaccccaacacctagtccagtgcttagtaaatggcagaagctcaacaaatagaggatgattgaaaaaagagtgggatgcttttattttagtggttgttcagaatgcgttttcatttgtctatttttgtgttgacctgtatcagtgctgtgttctttaaaaatatagtcacatgggaggaagggacagcaactttcctccctcccttctctagagcgcacctagccaagcactgtgcttgaggctacggattcaacagagaacacacaagacattgactcatgttgtccagtgaagaagacagatatcaagtcattacagtgaaatatgatgaatacgatgcaggggaagcattgccggctggtaaacctggacaataattggtgggctaagtttctgtcagtttcctgatctccaaagtgtgaataataataatgcccactgaggcaggtggatcacgaggtcaagagatcgcaaccatcctggccaacatggtaaaaccccaactcttctaaaaatacaaaaattagctgggtgtggtggcatgcgcctgtagtcccagctactcaggaggctgagacaggagaatcatttgaatccaggaggcagaggttgcagtgagacgagatcgcgccactgcactccagtctggcgacagagcgagacttcgtctcaaaaaataatataataataataataataatgcccatagggttgttgaggggatgaaatgagaaaatccatagaaaccatgtagctcagggcataacacagtaaagattcagctgatgttgatcgtgttgttataattatcaacattacaactgatgcaactgatgcgggcttcctgtggaagagactttgaagctgagagtcaaagctgagggattttccaggtaaagggtaggggcagagggtgcctggcattcaggaccagtgacatgtagggcccagtacaaaacgaaaacaggctctttgttcaaaaagtagtaagaatttcaagacaacaagcacagagcattaaaccaaacacagggcccttctgagtgtgaggtcctgtgcacaaattgcacacgcatgaaaccagccctgcccggtgggagagagtgctggccgttgttgcttaatagggccaaaggcaaactggcaaaaagaagtctgtaatgctggcatgttgcggattctgtagctgttatgattcaagaaatcaggcctccttcattggctggtagaaactatagaggtcgacacacctggactgaatggagagagttttttccctgtgcaatccaagctgggttttttaagctcttaagggcgtgaaaggtttccttcctctcggaagctaaagcggcagcctgcagctccaccctgccgtgattgttataaatccagctgcccctcctcctcctggctgggggactgctctgcccctgggagcccacagtccatggccttgggaaaaatgacttggtttctaaaagccaagctttctcgttgaagaaaaggtcaaccaaagaaaggagttgaatctggcagagtgggaaatcgtctactgctaatggtatcatttttacatctctatcttcctctgcaggagctccctgaaaggctgaaatgtcagcttgtcagtgtttcctgtatgcctgagcgctctctccctggtgagacgcagggcctgctccgtcaggatggatggtttaatcccacctgccactggggggggaccccggttgcttcacaccaactcctgagctcctcaaatggggagtgtcacgagtgggcaggggcagcttccctgtctgagcacattggaaacaagtcccggtcatttgcatcaggactgcctcgaggcttttcaaattcagacaacatctggtctctgcagagaaaaataactaattcacactgtgacctcccagaaagatcaccacttcgtcctgaagcactcccttgccggcaggtgttaatgccaggtaaaaagagagcccctgtctaatagtctccacctctggaatggaaaaagctgagctgggtcaaaggagcgtgacttctgggcagcccctgggtagacttctttcaggaatctgcctccttctccacctccacttaacctctttctttagaccctcgcagaaagctggagtcaggcagcagaggctaagatggctgtgcctgggcttggtgaggccagagagcaaaggcatctctgcaccatctcagagaccctttctcagcccttagctaccttcgagccccagctccagtgggctctctccgcaccatgagaggacatctctccaacctcctccctgcatcttcttgagaactagacacccctctcagagttaggggtgtatgcgccccatcttctctgcacagattatgatctctctcaggacactgctttatgcccagaacgcctgtccaggggaggcttttctataaatgttgaaagaacaaaatgaatggggcccagctccatgctcagcactaccttgtctccacgccacatttctgaacatctctttctctaattttcgaccctcaacttggcctgtcagacagtgttgaacttccctttccctgtctttctcaggtgcagacttttctttgctacctagcatttacagaaattacaaatcttcctcctttctcaatttggcctctgtctcagccaggatgttgggctgctgctttgacccgttctcacaaactgacagccatcaccaaggccattgcccttgcccaagaagaaaaatagggcaacatcctttgtgttcttagattgattatcccagattcattcaaaggacatgaattcaataacatcaagctctcctctacccaagcaatgggaagtgcaggtttccctgctagtgacccaccttacatgcgacatgtgccacccgctgccttgagggttgaatctggagctgtaggccatctctccaacaggatcaccattgcagaaactcgctatccttttcatgttggatagatatagggggttgagtagcatccttgcccaccccatccccaaagtcacgtccttcccagaacctcagaatgtgaccttatttggaaatcacatcattacagatggaatttcttaaataaggtcacactggagcaggggaggccctcaatccactgttactggtgtctcataagaagatgacaaaagacagagacacacagggggaatatcatgtgatgttggagacataagttaaagagatgcgtctatcagtcaaggaactccaaggattgccagcaaacccggaagccagaggagaggcatggaacagaccctccctcagagcctgcagaaggagccaaccctgccaaccccttgatttcagtcttccagcccccagaactgtgagacaatcaatttctatcactgtgaggctcttggtttgtggtcatttgttatggcagccctaggaatctaacataatggaataaagaatcttgtatttgagatctttttcaaatattttcatttttaaaaatcttaactctatagaattttactaaatgggtctttttgtccttaacctctaattagtataattttttagcctatctctttatgtgaatctatccatcctctctcacaatgtccagaattggaacactaaatgtactccactgaacagcattcagaccaggcgcactggctcacgcctgtaatcccagcactttgggaggctgaaacaggaggttagctggagcccaggaatacaagaccagcctgggcaacataacgagaccctatctctacaaaacaaaaacaaaaacaaaaaatatgaatagcattcaatatatagtcttttctcaactatattccccctggatgagagtggtccctgcgaatgacctcgagaccctgttaaaatgctgatttggattcagtaggtctggagtgggggtggaattttctgcatttctaccaggctctggggggtattgatgtcactggtccagggaccccctctcctttgagcaacaaggagataaactactcaaaagtggtgatctacactcatctctatttgactttggaaatgcctttatatttaaactggaacacaagtatatcttatgtttatgaagttagaggcaaacaatctaataaagtcacactgaaacatcccacctggagaggagctatggaggctgtttccacagtcctgccctcactcaacaaagatttattcaagatttgctatgtgttagaaactgtgccaggctgatgtcttgcttaagaacgattcctctctcctctcatcctaataatgaatggcatagcctttcagactcacacagaaatcaccaactgatagcagcagggtgactgctttctctctgggatccgctcacaaccgtgctggacaatgtattggctccaaacacacctggagagcaggggtggaggaaagtcacagaaatttccagccccggctgagttagagaaaccaaggttcttggctggcttaataaaggaaatggagacaggcaaggcaaacccactgaaaagttttcctgcactttggtaacccattagatgccaaccagaagctacattgaacagcttgagcttgagatcctttctgaagaagttttaacgcatagggaaaggctacaaggacaaggaattcgaggtcaggatgggggtgaagaattgaaacaaagccatggtctggtgtgtgatgtgtgtgtgtaaaataaagccaggctggacttaggctccggtagaacggattgtcacctgcatggaaagggagggacatggggagccttccacctggaaacagcaagagattcccggagtgccactcatacccttcatttttcatgtgtactcattgatttcttcattgatcaggtatcagctgtgtgccagacactgtaggggaactaaaaggaattaattaataagcggagcggcactttcccaaaagcggccatcttggagcaagctgtcacatctcagcgggaggaagttctgtggaaacgcggagggtgccattttcacactgccgagcagattcctacaagagttcctacaggaaagatggtttggggtttatctggcagagggaacaacatggtaaggttcagaggcacgttgtgagccagagcaggtgttctgaggggagatgccgtcggaggatgtgtgaaaatgtttcaaagccgtgccgtgccatttctcctgtggcatgctggtttccaaaatacgttctcatgagcaacagtcccacaagagtctttgaaattctgtgatgtaaatgctgtgagaaatgctatctgatatctctcctaggcttggtatggtaggtagctcacgcctgtaatcccagcactttgagagtccagggtgagaggactgcttgaacccagcagtttgagactagcctgggcaacatagtgagaccccacccctacaaaaaaaaattaaaaatagctgggtgtggtggtgcatgcctgtagttccagtttcttgggaggctgaggcaggaggattacatgagcccaggagttcgaggcagcagtgagccatgatcaggactctacattccagcctggacaacagagaaaggccctatctcaaaacagtcataataataataatatctttccttgtccctaggacattcaaaatacacatcagctctttaaagaccatatgaagtctcacactaaagaagtctcctggccgggcatggtggcttatgtctgtaatcccagcactttgggagctgtaatcccagcactttgggaggccgaggctggtggatcatgaggtcaggatattgagaccatcctggccccgtctctactaaaaatacaaaaattagctgggtgtggtaccgtgtgcctgtagtcttagctactcaggaggctgaggcaggagaatcgcttgaatgaggttgcagtgagccaggattgtgccactgcactccacccttggtgacagagtgagagtccgtctcaaaaaaaaaagaaagaaaaaaagaaacttcctaaacttattcaacctagggtttcccaaaattacttgacaacagaaatcttgtttcacataattactttgaaaagcacttttaaaaattcatggagcttttgagggcggggacgtggtagtgtaaccagatctgtgttttctagagaagttgtcccccttgaggatgtctacaaggtgaccttctcttggggcaggtaaccttcagcaacttatctgaacaaatgccatctgagccaccactgcccctccctgggccagtcaggggagcctccaggcaattcgcccctgctttccgcctggtccaggtggtgcaggtcagatcttgtcatggccaagcaactgcttggatggccccatctccctctgaacaaagtccagcccctccccttggttcctggcactctctgcctttcttgcccagtgctatggcccctccctcaggcctcagttgaagccacagtcccagctacccccaacagaaaccaagccctggctctatgttccctcatagcctccctggctggagaaaaaaaaaaaagaatacaaaaagttccctctttctgcagaaaaatgtgagaggagggcagaggtgccccaccttcaatgagtctggtctctgcgtctgctggcaacatattctagaatccctgtacatttgcacagtttctactctcattgcttttgatggcaccctcaaccaggaggttctgtgagacaggagtcccgaagaagagagctcagagaagagcccaggggagggggagaagcactcatctactatgggtccgtttttgaggtcgcatgagtcccatccccatgaatatgcaggaagcacacagtccattcgttagtatctgaaatggaaacgaattgaagacaaagaaccgaggagggggcgttgtaggtagacacccaccagataagcagcctgagattcgcccactgtcctaagccccagagctctgatccccaaagggctgtgctggttttatctgcaaatgggagtgaaaccacctttgcagaaattataactgagaaaattgtgacagtgaaagagatctgactgaactgactccgtcttgcttctcacctccaagctctccttgttctttcctgggcagaggccaaactaacttggggaggaacttagtttatagtttgactttgaaacaaagacggtaacagccctttcccaaaacaaactcccttcttgcctgggaactagactgcctttgcaggactaacaaattagccaaaagattagaaattatggtttaggagtcatgcagctggaggctacaaggttctaaacttccccagtttctcctagggatgacatcacaattgtaaaacctaagcctggtgcttgagatgtttttcagaccctgccctcgatggatcaactggcgcctcccagatcaataaactggctcatttagtcttgtggcccccacccaggaactgactcagcacaagaggacagctttgactccctacgatttcgtctcccacctgaccaatcagcactacccccacttcccgacccccaatccccaaattttcagggagactgatttgagtagtaataaaacttcagtcttccatacagctggccctatgtgaattaaactctttctctgttgcagttcccatcttgataaatcggccatgtcctgtctaggcatacaggcaaggagaacttgtggggcggttacaggagcctctgcagggccacagggcaggtaattgaggtgagggagaagcgcgtcagcattcccactaggtacaggctttttgagaattcaccattcagaggagcagctgggctgacgccctgggtggcagtgagggtggatagaggcaaagccacatttccagtgtgctccaagttgcacagcgagggctgcagggccttccgtattgacaaactctgaatcctcacgaggggtgctcaccactctggaacatcactccgccgttagtccctcattgttttcccacaggctccttcccctctgccttcaaacaggcaaggtctctttagacacacacacacacacaacacacagaggcagacacaaaaagacacagacacagatatacacacagacacacatgcacacacatacacagggacacagacacagaaacaaagacaaagacacgcacacagacatatatacgcgcacacacacacgcacacattccccacacctccttttctggctaccttctagacttttccttgtctttagtcgacaaacttgtttagttgctggcatcttggcagcacattccctctctgatctgtcatgaggctcccacctggtgacactacattggcttagaccttcctgaaggcagtgataacctttttcttgtctattctggtcttcaccccatgctgtccactcaggctctgtcaccccaaccctctcagccatccctgtacctgcctcgtgcttctgtctcctactggccaccagtctgtcctgcaggggtgatctcgaatctaccagacttctctagacgttctctctgttcagattcatctctgaagctggatgacaagcgatgcagcacctgtccctgagtcctcaggtcctggggaatggactgggcagagggacaactagggaatagggtcaggagtgggaggaacccatggatcccaattccagacatttcaacagaactgtcctttgtaagacttctgggtagaggccaggatactgctgtgctagtccctccatggagggggcatgtcctggctggctctgttgggcctgggagactcccccatacactgagagcactgctatagtagggtctgccttgccaaaaactgcgaaaatcaccactgttcccttcagacttccctccagcctccaaacttccttaatggcaaagactggccacataaatcagccagcgggccagccagccctactacagaatgggctgaccggatgaagatgggatgcaggtggccttccaggacagatgaccctgtggcaggcggggacaggagctatctggggcataaaattgcctttctcaagctgacaggcctgtgagattggtccgctgatgcctggcattggggactcagctgaaatgtttggtgttctatagtgacatggccctgctatgagacactttaaaggcatcaggaattctgttccaatgtccctttgtttcctctcctggcagactcatgcattgctttaaatagtctgcctggagtcaccactcatgcacataagcctattctcggggcgtgtttcttcggattagattgtttcttcccacctccaagtttgttttggcgcttcctctccaggtacggtggtggctcggccttgtgactgggcaaagcatcccaggtggctgccgtcccctccatctgcttgtgggcattgaaggcagagcctttcttttggaactcagcttggccgagtgtgggagtctattttgatcttttctcctgttcatggccaggaccagagctaggcacgcagaccccaatggagcctgctttctcaaggcaactgtcctcctgctacatgaatgaatcatccaggcttctgtccagggtctcgggaatttggcttccatgtcagggacgcttgacacaagccacacatccttaagcctcgtcgttccttcctccgagggtagaaagatgcaaggctggctggcagccactgcgaggggtgtcctttacggctgtccatattaatcttattttggtctaatgcttactgccagggaagaaatctgctaatggtacttttctttgttttatttcaatctggcaacaggaaattggctttttaggggagactacaaagggcaaagtattggttctggtgccctctggtggttgaactgcaatctcgtcgcctccccgggaactccccgactggctggagagaagcatgagtttgcagttcggctccactgcacgcatggctttagatcggtctggagttggttaggttacgtttccaaatctccagttataaaattaggccttttttccttgtgtaatttccaattagaaatttgttcaacgggttagtatcttgggtctatctagaaaatggattactggatgtcaaaacaatcttacttgccatactttgtaacctgaaatttttgtactcaacatttgccaaaagattgaggtggctgaggcacaggggatgtgtttccagacataattatatctctggctcccaagagaaatatgacatactcctgttaaaaggaacatacaatgaagtaaagttgaattaaaatgagtaagtcatgacaattctctattttattttatgagattagagtaattactcctgaaataggatcatagcctttgacttcattgaacaagacagcaaaacaggttgcatgactggggtgtcagcagccaaatatatggtcctgattgagacatatgggaatttttttttttaaatgacacacggagcactgcttcttatggtggtgctgttcccccagctgaaccctgccaggtaccagcccccccatagaacttgcgactctccctttgcatcatgaatgaactaagctcactcacagttgcttgctaagaatcaagagaacttgctcgatcaacccttattcctccatcttctctcctgctgtctgcagtctgcgatgctcgccttcctttcttccccagctcatttgcctcccacctggactttcctgtctgcagagtgcccttgaacttgagccctttccaagtctgtcctcatgagttatctcccttttgcagctttgacattcactggagaactttttcaattgtgcctcgcctcccagcattgaggatctgccgttcactttggggtgctgacttcaagcaggaaagacttcttgactcctgccagcaagcaggctgccccatgccccatgccccatgccccatgcctcctcacctgtgaagtgaggaggtcgggcttgatcactggtttccactccagaggggttcccaggagcctctaaagaggtctctcaaccacctcttatgctctgtttggagaagttttaccttttcatcagtttttcaaactgtgattgtaagatatatttcttttgggaaaaagactgtggcttaaaaaggtaacgtttaaagaaaagtttttaaaaaacaaaagacaagaagatctaatatccctgccaaagctctcaaacacttcagaatctcctcctctcccagctcctgctccctggcctctccttgggtgggaaggcaatgagtaagtaatactttatagacagcattctgcactgggctccagccgtcagtgcttctaatgggtcttgggcagctgtcccgggccagataagtcacattaaagctgagaacaaaaccaaaggattggatttctttttaaatcaggaggggaaaaaatgtaccacttgaagctcccagtcggtctgggttcctggaagctgttgacttgaatttaaaagatgtcttcaataatcatgaccatcttcatttttgaaacttcttgggcaggtttcttctttgttttggtagagagttgttctaaataacagcacgaaatttgcctactctggtgtcaggctaagacatgaggagcgaagggaaactaatatttatctagctcacttccagtttcaggggctaggtgtagattaactgggggaatactcagggcaagccggagtgtccccatgctgtacatcactgactttaagaacttagtcacatgcccacagtcacacagctggtatgacgagaagccaggattcaaactagggctggcggatgcttgcatctgcaaggttctgcagaacacatggagcctggaaaggaaggctccgtttggaaaatccttctggggtccagaagcctccataaatagggcaccatataatttatcttctaaatgggtacacttgttcaggatcaatgctaaagcgtatgggatgtgaggacatcaggcataaaatggtaccatcatggggaaactgcaatagacgttcatccccctcatcaggtaggctaggcaaattcctacgatgccaagaagcgaggctactatcaggagaaatggaagcagcagcatcagggtatgaactgggtctcgctctaaatccctcgttccttcctccccactacatcataatccctcctaatgcgctgtcttcacaagcccaagaacatacccaattccctgaagtgtatgccagccaggtctctggtgagcacaggggagaagcctggagacagttccaacataaaacttcatcatcactgagccatcccagggaaaaggtccaaaccgcattctggttctaaaacccaactggaagctttgtgcaatcggcgagaacttcatgaatcagacttactgacctggaggttaaaagaaagagcgatccccttcctactttttcagattcctctacttctctctgtcctttattgaagctgaaaattagcatatttgttggatcgtggctgacactgatggtctgaagtaaccagaaagctcccacggataagttgttctcagccttgggaaaggaagctggattcatcccaccactttattttctgtgtttctgatgctttgacatcttgtgccttactggccctggagagactttactcctctcagggctgccatattcctagagagagtaaatgatcaccttccagagagcctttcatatatatgcaaaccaaccaatccagagccacacccctaataccccctctgtggtctctcatactggggccactgtccacctgccctaatcaccccagtgcaggtaccagacactagggccagccctatgtcccagagactgctggaaaatgtcaaattagccaatcctaggactgtttatcctccctcacctattccttcccgaataaaccataatattcttgcctgcattttcccctcacttcctctgcctcccaactggccctgctgcttcttagatggcccctggtggcctggtgccccctcttggcagctgcaagtaacaaactagcttttcaatggcaactatctcctgatctgttgaccttacgatacctcatactaataaaacctacattttgaaatagaagccatcccctccaaaagtcatgagctctcttttcctcccccttacagatggtcttagtacgtaggaagagcaggagtgggcaaaggcgatggtggttccaacacagaattgcatcttcaccaagaacaacaaatggctggctttctcctcagtggcagtcaagtaaagaagtgggaaggggcagcttgttaaaaagatgccccagtaaaatgtgatcatagcatcatctgtgtgtgcctcacactaagcaaagcaccactctgtattagaaaaataaagccatcatcaaaaacaggtaactaatcacagctctgccagagacattgcctcctatgattatcatcatgggggtctgtgagctgcctaaaatactttttggagaaaaattaatttaaaatatacaaattgaattcactgcattcaattgcaaaaaaaattttttttcaaagaagcttttaatagtgaagatattaaatgtaaaagaacggaatattcccagttaaaaggcatccaagtaatgccagcattttctccccgtggtactcctattggttattaatcttgaaatgtgtttgcaagagttctcatttgtttcaaagttaagaaacaaatgtgctcccctgtgagaacaaagtccataaatattttatgtaagtgagagaaatgaattcattccaagaacattcgtcatccacagttaggacaagaaattcactttgcccacctcagcctgacagtgtctgcctggaaggtgtctgtaagcccagtgttaattgatgcacactccattttttcctactcaccctttagccagcgttgctatgccaacgtcagttagcttcattcctacacctacaggaagagaaagcaaagatgggagtttgtgttactcagggcccctcaggaagttgggccatctagccccagggaaggggtaatgacagctcatcctccttctccttcctgcataaacactcgaggcctctttcatatacgcatccagctttaggcagggaccatggggaaggtggcagttagggggaatcaagtctcatgtgagcagacaacccaagccctctcggctctggaaatgaagtcctctgcctgcctggcccacccaccccatgacaaggagggagctggccactctgtgagaaaatctgaggcctgatgcttgtcccgtaagcaatctccccagaaatacggtgactttggcttaggtctggctccccgttcttcaatgaaagtggaaacccttacatgatggaaagaaaagtaggcacggcctgggatagtcaatgccaatagcaagagggtttgatatggtttggccatgtccccacccaaatctcatcttgaatgtagctcccataattcccatgtgtggtgagagggacccagtgggagataattgaatcatgggggcagtttcccccatactgttctcatggtagtgaataagtctcaggagatttgatgatttcataaggggcttctccttttcccttggctctcattctgtctgtggcctgctgccatgtaagacgtgccttccgccttccaccatgattgtgaggcctccccagccacatgggactatgagtccattagcctctttttctttgtaaattacccagtcttgggtatgtctttatcggcagtgtgaaaatggactaacacagggctcaaggggcatgtgtttagttcaaagccaaacttcagacatatgatttctcatttccataaagatcgtttttcaattcaggactgaaggttttctgggtggtcagtgttagaccccgggaaacaatcctgagttctatgtagacactgaaccaatggcctggcgaagcagacatttggaacacgtggtccttggactcatcctaactgctacccactaaaccatggtggggataggtgggggatatcaaaaccaaaacagtagaacagctacctgagcttcccactctggttcagcaaaaagcaataggcacccattgcaagcatatggaacccttttttgcatgtgcctttccagcaggaggggtagggagggtagctagggagccagggaggcaaagggaatagactatcccactgttttccactgtgagggaggataagagctgccatccccttctgtagtggaaagagccaccctctctcactctacccccagtctcagcctgcatcctgaacctctctcaggtctagtggaaagtaaagcacttccctgatgcccagagtgtggattccctcttgacctttccagaatctgcatgccctgaccacgcaccaattccattcctgtctccttagggtgagggttatgggcacttgctccaacgcagtggacctctgccaggaccttacccgtgcaatctagtgatgacattttatcccatggcccatagtgccaccccaccagtgtgtctgcacctgctagatgcctgggtcctgcctcctgtgctcttgcccctgcctcttgggctccatgggccgggctgtgagcactggcattccccacctccagcacgtgacttgcccatggagggccctggcagcctagaaaccagtttgggctgtggaaagaaaaaaactcagcatccccctaaagccagccatgaggatcagatctgctggccacctacttccgtggttccccacccaagtggagtgctgtttctgaggcccaggaaaagacagctaaaggattaatgctcggattcagcgttatctgctgggagcatggcaaaaacaaaggacgtgttgggattcaggctggttaggcagacagaagccatgaggcctgcttttctgcagtgcacctgtgagctaaattagacatggcactttgggagaaccagtgaccattttaaaagtctctttcgcagttggtaactaattcatctcattctttcaaagccgctaataactcaaacatatgtagaaatgcttcacatagcttttattgcagggactatgctttgaaaaaaaaaaaaaaaacccaccaaattgcaaacgctgtctctggacatcttgtttcatggaaaattgtattttaaaattacagctctaagccgtatggaagtccaatttgaaaaagtcatttggcaaaaggtccttgaacttggagaattgctttcccttgtttcccacaattaccagctgtcacttacagtttagaaagacagaatataatttttaaaagaaaacttccccctgtcagtttaatgatttgccagcaattatgtcaaggttactaggaatctctagagtctaaagttaaatcctagtgtgcagctatcaagctgagttggagataacagtaatctacaggttgtttctaacagaagaaaggaaatgaacagcattagaagttcattctccacttggctgggcacagtggctcatgcctgtaatcccggcactttgggaggcccaggcaggtggatcgcttgaggtcaggagttcagaccagcctggccaacatggtgaaaccccgtctctactaaaaaatacaaaaaaattaaaaaaaaaaaaaaagctcattctccagaattcaaggtcttgagttttttgggtgacagcttgttagaaggcgtggtagtctcaccagcatgcaggtctcaggtccaaatcacaggctcatcttttaccccacaaacctgcaggacctggcataatcttctaaatgagcaaatgcagccaggaagaattaacttttaaaagtccaaaagggtggtgatagaatttgagtttaattctaattccagtgtctctgtaaaattataaaaagtggagtttccttagagaatagatgcgctatctcatgccacaatgacaatgacagtaaaaatattttttgtccatcaacagagagtaaataaacaccattacttaatgccacaccaccacgttaaaccacacacgtcatttacagagagatgtgatattccattactgttgtttactagtacctggaagtgaaactaactgtgcatgaagccctgggtgctgcttttcagcatgagagctgaatttaatacaaaattaattcgcaaggagaaaagatgggggacagcagcaattgcacagccagagtctaaatagaacaaacagctgtctgttaagaccatatgttttgtgtgtgtgtggcagcaaagtctcttcaaagagtgaagtctgacttaaatttgcagattggcttcatctgcaaggcggtaatgttgcatttcccagctggcttgcaaggagtccttccaagggcttaggaggaagaaccgtacacataccagagccctctaacatcaggagagacttggaaaggtctggaagtaaatatcttgcaaatttgctaaattgttatttgtggaaagaacttggaattcagagtcagaaaatgcgggttggagtcttggacccctctacttactagctgagtgacagcagacagagacaatcacggtctccaggcctcagttttctcttctgtaaaatggggatcataatatctatcttctctgcagggttattatgaagattaagtaaaaataatagaaaaaaatgaatggatacaaaaactgatgaaatccaagtcaagtttctagtgtagttgattatattctgccaatgtcaatctcttggttttgataatgtactatagttatgtgagatgtcaccattaggtgaagctggtgaagcatacgtgggaatcactccatatatttttacaaatccttgtgagtctataattatttcagaataaaggctggggcacagtggctcatacctctaatcccagcactttgggaggccaaggcaggaagatcacctgagtccaggagttcaagaccagcctgagcaacaaagtgaaaccccatctccacacacacacacacacacacacacacacacacacacacacacacaaagaaaaaaaaaaggaaagaaaaaattagccaagtgtgatggcatactcccgtagtcccagctacatggcaggatgaggcaggagggtcacttgagtccaggaggttgaggctgcagtgagctgtgtttgcgccactgcactccagcctgggtgacagagtgacaccctgtctcaaacaaataaaaaaaaatgggttaaaagaaataggaaccatttattatgtggcaatgctgcaataagcgctttactatctcatttaattctcaaaacaactctgtgtggaagttactgaagcactgagaaaggtaatttgcccacaggctaccaggctggaagtggcagtgcagggaacagaaccccaaggtggtcttgctcttcaacaccatgtaatagctagagcttgagatcctcatctgggacaatatctgacatttggtaggcagaaaataatatagttcagattttcttaacagcaaacagaaataggaaaccccttgcagcagaagctgctggtgccttacctattgcccacaccccaaccacttctgtgcacctggctccacctcttagtgccacaccagcatttctctgcttaagaactttctctgatcatgttttttatccggcttagcttgcccatgtgggcaggtgacaagtgcaagggaggtaatgcccccacccagagcagccgccagctggtgatcctggtagttggtgtatacacactccggctccctcactgagaagtgtgctttgcagggctccctgcagatgtcagctccagcgcccacggcagtcactggctaataatatactctaccagtcgcctttccttccccagttgcacttccctactcctctactggcgtttcctgggatcccctctcaaataagccatttgtatgtgagtacctgtctcaggtctgtcttaggggaaccctaacgatgacatctccattccatagaagaaatggtattcctaaacaattgtgtatacattgaaaacatgctatacattcagcagagaagcttaaaatctaaagcattctaaagactcttttgcctatagagaatgaagtactacatcttaatttaccttatggtagatctggatttgagaatatattgctgagtttaggcctattgaggatagaacagtaaagccaatctctggttacctgttgtaatgggaaggcattattggcatgaattattgaaacgaaatgacctctagacacagtggctgacgcctgtaatcccaacacttttggaggccagtgtgggaggatcgctagagcccagtagttcgagaccagcctgggaaaccgtccaggacgctgtctctacaaaaaaaaaatttttttttaattagccaggtgtggtagaatgcatgtgcagtctcagctactctggaggctgaggtgggaggaatacttgagcccaggagttcaaggctgcagtaagctatgatcgtgccactgtactccagcctgggtgacagagtgagaccctgtccccccctagaatttttttaaataaaaataaaatgaaatggccctctggctggttatttcaggctcctttatcaaatcttgtttctgaggaggcatcagtaacagcttctgcaggtaaaggtgtttcaaggtacccagcaggcctatccttcctctccctcccctccctctccacccacaggaacatctctggcccacagcatccctggagcctgggctaagctgctttcctcaccttgcatgtccgtcaccaggaggcagccacttgttttctggtacacccagtgctggaaggtgcaacatttctgaccagcttctgattctcttctcaagaagtttatttctttcccatccctgatggaatacttcacaaattctccaatcagctcctcctccactgtagcatacgggatattgttctcaggccgatggataagaaaaataggaatgatcctggcagggaagagaacacaggcgcacatcaaggtctctactgggaagagaggctcctgcggcattctactctctcctggagcagcacggagcatagaatttgtccccaattctgctaggtttagactacaaatccatccaatgactttttagtgggtaagatatgtttctgtgttttatttgttgttataaattcctccttgggagggggtttaattgctcatgtagaaatgaatgtcttcattgtagtcatatcttaatgacccatcaatcaatgactataatctgtatatccattcatccattcatctactcacccacccatccatttgtccatccattcatccttccttccttccatctatccttccttcctttcatccatccatccattgatccttctttcctctcattcagtcaaccaatatttattcagtggcctgtatgtgtcagatactcttccagatgctattcctcaaaacagcaataaagaaaacggaggctgtgttgtcagggctctcacctttaaatgagggagactgacaataaacaagtaaatgcatggtgctaagcgctaggtgggaaaactcagcagtgaagaggagacgggcatgcggtggagtggggcagctgtcttatgtagggaggtcagagcagcccttgttcatggataaagagcatttgagtagaggcctataggaagtgaggggagccatgaggacatcgacggtagagcattccaggtcgaaggcaccccaaggagaaatgctcagggcaggagcagcactcctggcgtgcagcgggagtgcagggagccagggagattggcagaggttgggggaggcagaggggacaggaagtcaggccttgggggacctgggagaccatttggaaaactttcccctttgtactgagttggatgagaagccattggaggatttggggcaagtggggaagggacaggaggagatttctgcatgacaaagatcactgcctctctgtggagaataggccaggggcagggcagggagaccggggccaggtaatgatgtccagggagctggagcggtgatcagatatgggatggagtttccagcattatccatttgctgccacatcatcctacatgatgatttcctacctacctctctctcttcaaagcacctacacctcctcccccaaccgcaccctcagcttcctgtttcagtgtgcagactgaaggtttaggaggacctctaagtgctgccacaagcacatccatactctcacctcccggtctgtgcccacacactgcgccctcttcctactacgatgagccatccctgctccatcctgaaccacctcctctacaggtgccctggtccccgcccctctcaagtcctccaggtattgctccagcagtttttcctttctctcctccatcaatattccctctacagaatcattcccaagagcctagcagcattccatgatagctacacagcatggcgaccccacagcccaccccaactactgactcacattcgacatcgaaacgcaaatccgctgtagactcgctgtctccagtacctcccctcccattctctcttaagcatctgaaagaggctttccctcgaaagaagcctctatcaagggcagcacgaccatcatgctgttaagtccagtgttctcttctcggcccccaccccctttgctctcagcagctctgggcacagtggatctctcacttctttctgatacggctttccctggcttcctcaaggcttttctctgcttcactggctacctcttctctgtctcttctgtgagttcctcatcctctcccctttagactctggagggctctggaacagctcttctctctctgcccacaatccctagcgacttccttgctttaaataccgttcagatgccgatggcttccacatttatgtccccagtccagccctgtccctgagttccctgcccaccatctccacgtgatgtctcatgggcatctcaaatttaactctgcattgggcacacatggccataaagatggcaacagtagacaccggggattccaaaagaggggagggagggaggagggtaaggttgaaaaactacctattgggtgccatgttcactatttgggtgatgggtttagttaaagcccaaacctcagcatcacacaatacagccacgtaacacacctgcacatggaccccatgaatctaaaaaaaaaaaaggaaaaataaaaataaaaaccaaccacaataaaaacatttaaatgatatttaaaattttaccatggcagaaactgaagagctcatttgcccccaccccccacatctgcctcctctcagtgactggcagcttgtgaaaactgaaacaatcaattcattcaatgaacatccactgaatagctgtgtcagaatcctgaagactcaccaggagggcagaggtgactaagacacagtccctgccttccagggtcagccgttggggaaggtgcatggagaagcaaagcccagcacatagtaaatgctcctggctcaaaataagtgtttggcaaaatatgaatgaatgaatgaatgaatatatatgtatgtataatatttatatatgtttctcaatttcagcactgttgacatctggacagacagttctctgtgggggtggcagggggccgtcctgtgcacgtagcctgtttagccgcctccctggcttctacttcccagatgccagtagtccttcccgaatcctgatcatcaaaagtgtctccataaccaccactgtcccctgggggttgtgaaccactgacagagaatctgatcttacaaatttgtaaatagccagagaagagatcacctagtttaacattgaccacgtagataccactttcaagggcctaaaatagaaccactgatggcgggccatagaggcaagaggaaaatgtgagatgctgacttttgatgttcattaatttttttttagtacaaaatgtttgtcaaatgagtaaatcaacaaataggctgtaattatctaatgtaggcccctaactatatgtttaatggatcagaagatcgacttctgggagggaccaagtgatcagagtgaaatggcggcggggcagctataacagagacctatgcatgcaaagacgtgaccagctgccctggggtagggatggggcaaaaccccacaaagagcccttaaatgaaaatgcctcaaaaatggcatgggttttgaatcaggatctttaaaggtaattgtgtagaataatcccatataacatagtggccacacaacgtcaggaaaagttgtgggggtagcagagatgggtgagctcctctgctgcccatgtggttcctttctcccttgaatagcgctaggacagacctggtcacttctctcttgagagggaacgtgggcctctagaccccctctcccagtggaatgaacacgtaaggcttgtctttcacaataggaaggaaagctcgagctgggacctcaggttctgtgattgccactcaggaaaccacctttgcaaagactgtaacagtgagaaaattatgacagtgaaagtgatctgacctgactccattttccctttaaccttcaagctgcccttgttcattcctgggcagaggccaaagtaactttgggaggaatttagtttatactttaacaaacacagatggtaacagcccctctccaaaacaaagcacctccttacttggggatcagaccacctttgtaaaaccaacaacttggccacaggattagaaattatggctcaggtgtcatgcagccagaggccatgatattcctacctccccacttgctcccatagataacattactagtgtaaatcctaagactagtgtttgaggtatttttcagaccctgtattctgatggatcagctggtaccacccagactggtaaaactggatcatctggtcttgtggccttcacccaggaacagactcagtgcaagaggacaatttagtctccctgattccatccctgactctactaataataaacaatccctatttcctagccccctgcattctaaactattaaaacaaacaaacaacaaaaaaaacccaggcctccaaattttcagggaggctgatttgagtaataataaaactccagtctcccatttagccagttctgtcagagatgtgtgaaccagagcagctccatcttgaataggagctgggtaaaaataaggctgaaacctactgggctgcattccctgatggttaaggcattctaagtcacaggatgagataggaggttagcacaggatagataggaggttagcacaggatacaggtcataaagaccttgctgataaaacagcctgaaataaagaagccaactaaatcctaccaaaaccaagatggcgacaagaatgacttctggccttcctcactgttacactcccaccagtgccataacagtttacaaatgccatggcaatgtcaggaagttgcctatttatatggtctaaaaaggggagcatggataaccacccccataaaaaggggcaaccagcagcccttggggctgctctgtctatggagtagccattcttttattcttctactttcttaataaacaggctttcactttactctatggacttgccctgtattatttcttgcgtgagatccaagaaccctctgttggggtctggattgggacccctttccggtaacagctctatgtataataaactctttttttttttcaattatactttaagttttagggtacatgtgcacaacctgcaggtttgttacatatgtatacatgtgccatgttggtgtgctgcacccattaactcatcatttaacattagatatatctcctaatgctatccctcccccctccccccaccccacaacaggcccccatgtgtgatgttccccttcctgtgtccatgtgttctcattgttcaattcccaactatgaatgagaacatgtggtgtttggttttttgtccttgtgatagtttgctgagaatgatggtttccagcttcatccatgtccctacaaagacatgaactcatcattttttatggctgcatagtattccatggtatatatgtgccacattttcttaatccagtctatcatcgttggacatttgggttggttccaagtctttgctattgtgaatagtgccgcaataaacatccgtgtgcatgtgtctttatagcagcatgatttataatcctttgggtatatacccagtaatgggatggctgggtcaaatggtatttctagttctagatccctgaggaatcgccacactgacttccacaatggttgaactagtttatagtcccaccaacagtgtaaaagtgttcctgtttctccacatcctctccagcacctgttgtttcctgactttttaatgatcgccattctaactggtgtgagatggtatctcattgtggttttgatttgcatttccctgatggccagtgatgatgaacattttttcatgtgtcttttggctgcataaatgtcttcttttgagaagtgtctgttcatatccttcacccacttgttgatggggttgtttgtttttttcttgtaaatttgtttgagttcattgtagattctggatattagccctttgtcagatgagtagattgcaaaaattttctcccatgctgtaggttgcctgttcactctgatggtagtttcttttgctgtgcagaagctctttagtttaattagatcccatttgtcaattttggcttttgttgccattgcttttggtgttttagacatgaagtctttgcccatgcctatgtcctgaatggtattgctgaggttttcttctagggtttttatggttttaggtctaacatttaagtctttaatccatcttgaattaatttttatataaggtgtaaggaagggatccagtttcagctttctgcatgtggctagccagttttcccagcaccatttattaaatagggaatcctttccccatttcttgtttttgtgaggtttgtcaacgatcagatagttgtagatacgtggcgttatttctgagggctctgttctgttccattggtctacatctctgttttggtaccagtaccatgctgttttgattactgtagccttgtagtattgtttgaagtcaggtagcgcgatgcctccagctttgttcttttggcttaggactgacttggcaatgtgggctcttttttggttccgtatgaactttaaagtagttttttccaattctgtgaagaaagtcattggtagcttgatgaggacggcattgaatctataaattaccttgggcaatatggccattttcatgatattgattcttcctacctatgagcatggaatgttcttccatttgtttgtatcctctttgattacattgagcagtggtttgtagttctccttgaagaggtccttcacatcccttgtaagttggattcctaggtattttattctctttgaagcaattgtgaatgggagttcactcatgatttggctctctgtttttctgttattggtgtataagaatgcttgtgatttttgcacattgattttgtatcctgagacttttctgaagttgcttatcagcttaaggagattttgggctgagatgatggggttttctagatatacaatcatgtcatctgcaaacagggacaatttgactttctcttttcctaattgaataccttttatttccttctcctgcctgattgccctggccaaaacttccaacactatgttgaataggagtggtgagagagggcgtccctgtcttatgccagttttcaaagggaatgcttccagtttttgcccattcagtatgatattggctgtgggtttgtcatagatagctcttattattttgagatacgtcccatcaatacctaatttattgagagtttttagcatgaagtgttgttgaattttgtcaaaggccttttctgcatctattgagataatcatgtggtttttgttgttggttctgtttatatgctggattatgtttattgatttgcatatgttgaaccagccttgcatcccagggatgaagcccacttgatcatggtggataagctttttgatgtgctgctggattcggtttgccagtattttattgaggatttttgcatcgatgttcataagggatattggtctaaaatttaataaactctttattgcaatttccctgtcttgataaatcagctctgtctgtacagcggacaaggtgaacccatccagcggttacatgcacacaccagctggggcacaggtcctgccctgctcacttgctcttgcctctgtgagagctgggagtgttctcccggaacaatgccctgtacttctccacccaggctgtgccttctcccaggaggtaagctgaaggctttacgtggttattaacttgagccaaaggtgcttggaaaaacattattttttattaaaacaaatatagtcataaaggaaggaggacacaacattcaatagaatttaaaagctataaaatattacacttcaaagaaattacacctgcgggccagctaatttggatgaagcccccagaccctttgacgggcacacaggcatcctcctgtgccatttaggagcatttcctggaaactgtgagaatccccttcacttcatgaagaggacacagaggcttgctcatgagcagaatctgagccagaacagtgtccttctagaaccccacccctggacacaaggcccctctaataccagcgtaccctgattactatcatgccagagtctttgagacattctttctaattttaagatagaacctctttgtgtcttgttaaagaaatttcaaatttcagccagatgggagtgggcacattaggacagtggacctttcccgcagccctgaaatcggtgcagccgccaagccaccctctgtcgtgctttgtcacttctgcaggatccagggcaccctgattccctcctgaggaccgaccccctgtggctactgacccttctgccaacaaaaggattcacggtttgcttgggctcttattaattctgcatccctggtggggaaaaaaaccagaaacaagagctgggcattattcagggtcttaattaggcctggcctctgcccagcaggacgccatttgcatagacaatgtgactccattgatattcatgaattcaaaaacagaagctgcccaaatgaggagtgttttatctccaagacctcacatgctccgttaaaaaaggcttcttcaggcctgcttcattgcctggaaataaatatgggggtggccccagcgggggtcagtctaggggctgtggcagtgggggagggggacaggactcctggtcctctctctagacgtgcaggctttcagagaaggttggtaatatacagggtcagctctgtgtgcgtgtgttgtgtgtatgtgttgtgtgtgtggtttgtggttgtgtgatgtgtatacgtatgtgtggtgtgtgtgtgctgtgtgtgtgtgtggtatgtgtgtggtatgttcgtgtggtgtgtatgtgtatgtgtgtattgtctgtggtgtgtgtgttatgtggtgtgtgttgtgtgtatgtgtatgtgtgtggtgtgtgtggtgtgtgggggtgtgtgtgatgtgtgtgaggtgcatgtatgaggtgtgtgtgtgtgtgtatgtggtgtgtgtgtggtgtgttgtatgtgtggtgtgtgtgggggtgtgtaatgcgtatgtgtgtggtgtatgtgtgatgtgtggggtgtgtggggtgtgtggtgtgtgtgttgtatgtgtggtgtgtgtatgtgtggtgtgtgtgtggtgtgtgttgtgtgtttatgtggggtgtgtgtggtgtgtggtttgtgtgtggtgtggtgtgtttgtgcatatggtgagtgttgtgtgtttgtgtgtggtgtgtgtgtggtatgtgtgttgtatgtggtgtgtgtttgtatgtaatctgtgtggtatgtatgtgtggtgtgggggtgtgtgtggggtgtgtgtttgtgttgtgggtgtgtttatgtgtatggtgagtgttgtttgtgtggtatgtgtgtgtgtatggtgagtgttgtttgtgtagggggtgtgtatgtgtgttttttggctgtggagtcctctgatttaggttccataaacatggagtctggcccagaggcccttctgaggccccttactcctcccatgtaccgtcagcattcatgtggtcacaaactgtccccttgtaaggaatgggaaagtggtttagatagaaaaatgtcctaacctatctttaaggcagtggcctatttactgtgatgctaatgcagcaaatgaatcagcctcctgatccttcacttgcatgagccctttccaagtccctagatcaattatttacaattttgtgttcttttctttaaaaaggacccaaatttgccaggcatggtggctcatgcctataacgccagcactctgggaggccgaggcaggaagatcacttgaggccaggagttgtaggccagcctgggcaacatacagagaccctgtctctacgagaaaattttttttaattagccaggtgtggtggtgagcacctgtagtcccagttactttggaggctggatcacttgagcccgggaggtcaaggctgcagtgagccgtgattgcaccactgccctccagcctggacaacagagggagaccatgtctcttaaaaaaaataaaacagaaaggaaagaaagaagcccaaattgcataagagtcaagccacacaaaacttgggtctgtccctgctggagggcactgtggttctgtgtgtggtagggttgacttgtgggttaaatcttttcttttttgaagaaaacttaagaggacagacactgggaagagcggggcttggggaaaaaaggagccagttcccatatcatgaaagcttaactcagtccagatggctgtctgtgtaattaacagaaaagcaattgtaagtgggtactgaagtgtgttaagcatttcttgagaaagagcagaaagtgttatactttacacatggtcttccaaatgtaccacccaagggaaactatttttcccattttgtgagttaacaggtgcaatgcagacaagaatttcttccttcttccttctcccagtttttactcataggtaaatagctgctctgtctgaaagttccaacatgcactagctaagccctttttctgtccatttaagcatgcaaatatgatctcaaccagacaaaacagagctgcaaacacaagctccaggctccccaaaatttgcttgggccagtaaatatttaggcaaagagcagataaaagtgggtgtgatttatctctggaggattccaggaagcaggtactatgttactatgtttctgatcacccaatccactcttccctattacattgccatattttattttcatcatgggactaatcgccttgtgatatctcttgttctgttctatttgcttactgtttagacaatgtaatagctatgagagtagatatcctttcttttctatttaacatggtagattcatttattggctggattaatccatacacccatccatccatccattcatttatttaaagaatatttatcttcttaaatattaaatataatattattatattatataatattaaatatcctacccagcaaggggtaggatagcagccgtgtgagccctcatggagcttacagactgagagatcagctgaaacacttgccctactgttccttctcactctctcgtccctcctagtccccaacgagtcaggagtgtgacacaaggcagggtaaacacacttactcaggtacttctccaaagccttccagaggctgtgcttcagcagcgtagatcttggcataatacctggcagtattttgaacatagcattcctatatcgccaaaatacatagaaagccccagtgactacaggaaattcagacagtattgcccagtaagactattcaggagatttcccagtaaggtaaagccaatgaactgacaagcccatcccctggttggggtcacagaggcaacgattattagaacctagagttggccacttagggaggagctctgagacgtcaaggaactgtccgggtggagatcaagtggtctccaggaccaggtgtccctgaactataaaatttctcgagccggcagggccgaaattcaccccagaactaaggggactggcccctcatcacgtcatcaggtggcacttggggcactactgggtttcctgtgagatctgccattgcaaacccttttcaaaggtgtaattggagtagtcaataatgaacagcacaggatttctgccttaggaaaagctaagtggattctgcatcctatgctgtggggcttttctgagcaagaatccagatgctgggaggttttccaagactgtgtcatatttgagatggagggaatactgagagagaaaagaaaaaagcagagtggattgggagaagaaaggaatacaatgggcagaacactatattcagagagcaaggctgccttcagaagcacaaagtcccacgtggcagtgccgcaggatcacgatgcttaatgcttgactgtacctgagagattcatctaagtttaacctatggattttaatattttaaatgttttaattgttttagatgtttatggtaaacattttaaaggggcacagagctggtgaaagacccaactttcttgacagctacaccagtgccggtgtaaacagtgaaatatgtggaccaggtgtggtgattcatgcctgtaatcccagcactttgggaggcagaggcaggaggatcacttggaaccctccaggaggtcaagaccagcctgggcaacatagggagaccctgtctctgaaaaaaaaaataaaaattagttgggcgtgatggcatgcgcctgtagtcctagctacttgggaggctgaggcaggagggttgcttaaggccaggaggccgagactgctgtggagccgtgatcatgccactgtactccagcctgggggaaagagtgagacactgtctcaaaaaagaaaaaaaaaaaaagacggagtgaaatatatggaccaaatatgtggataggaggaggaaggagcgagagaagctaaggctctcctgccctatcctctcacctcgagttctatgactcaataacacagagaagtgggaactcagctagagacttgggtctgtctctcttcctatattttatacactaccattaaaccaaactcaggaaggcagaaaacaagaccaatgctgacccttctgggtataccccacccctctccctctccacaaaacaaaaccaaacaaaacactccagcaactagtgctgatgttatctgttcctggagaccctggcatctagtgtagcttagaacccccactttccatatcatcctaggtccaagtagactcaaaccgccagggatgtcatagggcttcttagaaacaaaatcaattatatctcgggttagaactggtgaggtgtctctaggcattggctgagtccccagtagctggcataaggccaagaaattactcccgagaattgagaagtgatccccagcattgagattgaattgaaaccccaaaagaggaaaaacacccttttgaagatattcccatcaatcctgagtctgattttcatctcgtcttatcatgggtggttctcacaccagaagtgacagcctttgggcagatggacccacctgggcagcgagtttgtagttcctttggatgagctcatcattatttctggtcccataggcaatggcattgtgcaccttaagcacacaggcatggccaggtttgaagacaggcatgaggccgtgcatcactgtgctgcggaaggctttgcggtgaaccccttctccaaagtgcagctcctccgtggcgatctgaccacgcaggcggcccccaaagtagctgtcatggaggaagtcttctttgaagatgagttggctgaattcaatctcttcacatcctgaaacacagcacagctttggttggaaagaatacctcccagtcctgctccttggctaactccacatggggagggtccccacataaggacaatgacaaggctgacctgcagaaccaagagggggcagacacacttaacccttcaaaagaggcatagctaaaagaagagatgagtggtttggtgaggaggagacaggtcattgaatgagaatgtgggaacatcagggatgggttggagcaaaactggaaagatcaggaaaagaattctagacagatctggaaaatataagtggaaccaagcaaagtaacaaaagtcaagttgaaaagatgggaaaagtgtagaggagggaagaaagaccaatgataagatctgataatatcggaccaacctttctttcattattgccccccaccccccgcaaccacggaatctttgctggaatttgttttaattgcctgccatgaaagtttaataccacaaatatactatctgtttatgtaccatatgtatatttgttctttatacagaaaaagagtaactttttttttgcctcccaagaaccaatgttggtcctcttggtagcaatactgcctccattgagaaagcatgtgataagtataggaaacaggtagcaataaacaaaacaaaaaaataataaaaagaattgcctttgaagagaaatcgaaaaaaaggtagaattattttgcatttatttgtaaaaagaaaagtagaattattttaagttttctaacagctgtttttttttgcagagtggattctacacatgtttgagatgacagtgaatttaatcaggaaggtccactttaaactagagatgacccaatcagacttctcattcactgagagaagaaaattaggtggctttcaatgaaataagattgtttggatttttaaatcctttccacttctcaaaactgatgaaaactgacatctttctgaatgtttacaagaagaaagagatcatgggttgtgtgaaaaatcttacttcacatttctatatacatgcttcaggaaatatttttctcttcttttcaaaatatttaaaatcatacgatttgagactgatggtagctattaaaactataaggagactgaaactattctgatcgggtattgattaaggtctcggcctaattactgccagaaagaaagaaagggagtggggtttggtggattttcaaacagaaaaactaggtgaagagctagaatctgcttgaagaaagaggatattcctaaaggtgctcctagcattttcacaaaggctagcagaagactatgggacccctgaatatgccaccctcaaatctgcctctttggtaaaagcattgttgagctgaaggtaattaagaagaagcagaggcaagaaagctctctgccttccctctatttgcctaaaatcaggacataaatttataaagacaaaaaatattctactcccccttctaccaggaagaacaaaggttaatgactgaagacaactttagaccctgatgggcctggagatggacaccagccattaacaagcattaatgagaatccagatgctgggagattttccagggctgtggaaatgcctttccacaagctactgcccttacctactcaaagtccttccctctgccctgtcacttctctaaaaatgcaccattctttgttgtagatgctgtataagctggaattcaaaccccttcttaaatgagcacttctggagtatctcccatgtatatatgaattatacatgttcataaacttgtttgatttctctcattaatcttttgttacagggatctgttccaactaagaacttatgaggactgaagaataaattatttttcttccccaataactcctactgagtaacctgtcctaggtttctggagagaactgggttggagctgcaggaaaacaggcaaatgggacattttctcagataaagttttaggcaatagctgggtcacagattttactctaagtaacggaaccaggaaaaaaattaattgatggagaaaagcacagttttattttaacagttaaatttaaaaattaggtgagaaaatagagggaatgcttttctgtatcccaaaccttctcagtttcattctagttatatgattaattttaacaatttggcctctaataccactaacagagtataggaaatgttatatgtacatacaccagagcccaataaacatgtattatatctgccatatcctgtcttccttcaaaatcctcacatttctaaaatttaattattaaaagtaaaaagcttgtgcaccctatgctttaaaattcagcaaatctaattaactgaagataaaagttggtccaggccatatgcttagaaagtaggaaggaaaatttgtttgtatagtaccatacgtggtataattaacaaccctgtctataatttccaacagaaatgcttatttgacaaagataaaaacatgaaagaaaaaaaaaatcttagacgtattctttgtctcttgaaaatcctgcagagcaagagctggagttctaggtggaactttccaagctgaaactcatctattgggccttcctttgcagaagcagaaggtatagactctgtagctctgcagaaatctgaaaggacagcctgtccaaaactgtcttcctcagcgatggctgaaatgagcgcgtcctcttggttagagtttgcacctcttttaaagtgagagatggaggcaagacttcatcctttagaccaatctcttccctggtaagagtaatgaaggtaacaggagaactgagcacctgaggggaggcttaggaaaagcacgagtgtagcactgcaagtctcaggttgtgaagaaggtgcaattttctttgcagctttgcagagccatccgttgccaggactcacactccacgctgcccaaagtccctgagaggtggcagttccatgagaaagaatcaagagaggccgggtgtggtggttcacacctgtaatcccagatctctgggaggccaagtcaggtgaatcacctgaggtcaggagttcccgaccagcctggccaacatgatgaaaccccatctctactaaaaatagaaaaaaattagtcaggtgtggtggcaggtgcctgtaatccaactacttgggagactgaggcaggacaactgcttgaacttgggaggtggaggttgcagtgagccgagatcttgccattgcactttagcctgggtgacagaatgagactccgtctcaaaaaaaaaaaaaaaaaaaaaaaaaagaatcaggagagactcattggaatccaccagacagactcgtcagatgagtgttgggagattcaaatgcctcactgaggttccttgctacacccatacattgtgaaatccaaatcctcaactcagagaaaccatgtggatacctgcagccactggttacaaagactgctccgaggtgcagaaaagcaatctacaaatatattcataaaacaaaataacatcattaaattgggcttcatttggtccatcattcatttccaactttctcatgagcttagctttattagttttttaaattagagaccatcttgtaaaagattatttattcctcctatagagaattaaattaataaactgtttagtgagatagtcctctgaatttaaaaaaagtgtgattaaaagtaattttccaaatcagctgggtgcagtggtgagcacctgcagtccaggctactcaggaggcttaggtgggaggatcattagagtccaggaggccgaggctgcagtgagctatgattgtgccactgcactccagcctggatgaaagagtgagaccctgtctcaaagaaataaaataaaagtaattttcagcttctttatctgaaggtacaaggatagggaggggccaggagttacttccccagccgggtgagtcagtgaaactgacacccccagtcacaatggggccagaagctgggagaaggtgatgtcatcagggttcagacccaggctctacggctggagtcactgggctatagcggtggtaccatttccaccaagtggccagtagcttatccccactggggtctctcgcctgactagtaatccttgagaaatgagctcatgcacacctaaaccaatgaaacctaacaagtgtctgagatgtgaatgccaatcaatgctaagaagctgatgaaacagagactcccttctgagagtcttcttattttctgaagtattaggagtaaggggattcttttgcatattttgccttctggggagatgagagcagaaatagaggaaggattttaaattataacacatgtatgctacacactaaagacgggtatttagcatctgagtgggtttgtgaagagcttgtatttaagtttactattttgggttaatatcacaatatttgctaggccatttctttttctttctttctctctctctttttttttttttttttttgagatggagtcttgctgtgtcgccaggctggggggcagtggcgtgatctcagctcactgcaacctccacctccctggttcaagccattctcttgcctcagcctcctgagtagctgggattacaggtgcgtgccaccatgccgcgctaatttttgtatttttagtagagacggggtttcaccatgttggccaggatagtcttgatctcttgacctcgtgatcccactcgcctcggccttccaaagtgctgggattacaggcgtgagccaccgcgcctggcctattgctagaccatttctaagtcgagatctcagtttcttacttttgatacactggatgtgactgcattttgattacttttattacctgtttctgcagagatttcaggcgttctgtttgttttaaaactcagtacatgcagtaaatctttaagatgctagttcaattaactgtcagaatttatccaatttctcctaaaactgaccgtggatcctcccctgtgctgaaagtcatgatcacatggggtgaggctggaccaccgtggtatgtggagctggccttctgcagctcctgagagctgatgacgggcggctcttcccagtcccatgatgtgtgatgtcacactggtggtttaagagtggccacactgagagtatttacatcatggaaattgtaggactcagaacttccccaaccctcagcatgttgttaaatatttaccccagcacaccaccaggcaagggtgggcatgggtgggcgtaggtgggtgagtaattctccttaagagggaagacacggcaaacacagattccaccaaactgtggaaaactcagtgggaggcccggggacatcacgagcattcatgagcagcagtgttaggctgtggctaacaccaggtgccaaaagaaagcagagaaacccatcttttgttttccttaagacacaaacgaatggagtgatccttcagacacctggctgtctttgggaatctgctcagctagtcaaactgaaaggaaaattgaacaaacaaaacaagctgtaataagtcccagtagctgaaaaatcccatgcagaagggctgaatgcaagaccgatgcttaaagggaaaagtcaaatccaaactccccctctacgtgttccccaaaactccactgctacagtgtagcatccaattctggatatctgtagtctaatgaacttacaataggaagtatggccctacattcactttgaattggctcatgaattgtcatttctttctcttttttttttctgatttttttttaattatacttttagggtacatgtgcccaatgtgcaggttagttacatatgtatacatgtgccatgctggtgtgctgcacccattaactcgtcatttagcattaggtatatctcctaatgctaaccctcccccctccccccaccccacaacagtccccagagtgtgatgttccccttcctgtgtccatgtgttctcattgttcaattcccatctatgagtgagaacatgcggtgtttggttttttgtccttgcgatagtttactgagaatgatgatttccaatttcatccatgtccctaacaaaggacatgaactcatcattttttatggttgcatagtattccatggtgtatatgtgccacattttcttaatccagtctatcattgttggatatttgggttggttccaagtctttgctattgtgaatagtgcctcaataaacatacgtgtgcatgtgtctttataacagcatgatctatagtcctttgggtatatacccagtaatgggatggctgggtcaaatggtatttctagttctagatccctgaggaatcaccacaccgacttccacaatggttgaactagtttacagtcccaccaacagtgtaaaagtgtttctatttctccacatcctctccagcacctgttgtttcctgactttttaatgatcgccattctaactggtgtgagatggtatctcattgtggttttgatttgcatttctctgatggcattcatttcttaagtcacgccatagctctccttctcggttggaagagtccagaggattactgcttctactctttcctctgggagctattttatgctttacagtaagcccatttcctctggcaggtcaaccctaactgacttacctttagtatcctggcgacttgacagctgtttgagaactagaagaagacaaagcagagaatggcttcagtacagatgtccattgtgaacgggcaggggccagtggtttttcattgaaaactgtggtttaccttcagctgtgaggttaaattcagcagtcacttttccgtagctgttcttgatgcagcagtaatagagtccctggtccttcggactggcttgcacgatggcaaaggaaacagtggagttgtcccctgcactgcaatgaggaatattcacattgacacacttcatcattctacagttgcattttttcctaatatacttaaggagaaagaagctaagacttccctgctcacatgttttcagccagtgagctgcccaaagggcaaaatcacgatcagctgtttaaataattgatttatccacagaggagagtcattacattttggctaacacgctcactccaataagcagtaggtttaactgccatgagtagagcaaagaattgaaattgtgaattctgggagctgttgttaacatttctgctcagaattcagctcaattatgtgactaatccgggtgtcctgtgcttgaaggaaagtctgataactccaaacccaaacttatacagatacaataagggacaagagaaaacggggttcttagctttatgctacataaggattcgtgactgagggcccctttgtaatagtgtcctgtactcccctagtgaggtaccaaccatcgaaccattcactcacccaaaattattaagttccggtcactgtgctatgaaaactaaaactggtggtggtggtcatattggtggtgatgatgacagtgatgatgatgccaatagctaatgtgcactgagcatttggtatgtaccaggcattgtgccaaatcacataaagatcaatttcatgatgccctcagaacaacctaatgagagaactatgtttactattctcagtttgcagatgaggaaactgaggcatagaaaaatttaagcaaatgattttgacttcattaagctgcctccccaagtaaattatggttcccgccctcaagtctgggataatttgaaacatagggagagccacatatttattccaaagtctcaaacaaaaaacttactctacagcaaaaaaaaaaaaaaaaaaaggatattcagacgttgttctggttttgttctttaaaatgaactttgtttaaacattcaccaagattctgtgtatgtatgtgtatacatgtgtgtggtgtacattttagcttgggttcgtttcatagtttaacaacaaaaattcacctagcttgagtttgtctcagttgcatgttcaaaaacagtgttcattattggttggtttttcaatagacttcaagcctccaatatatacattccttccctggaatataccagtggcttaaaacaaagttcactaaaccattctacttccttcattcctggggtctctgaacatatcccactgtatggttaaaactggatgtgaacaagtccagttataaggggaagacttccggacagggcagtaaaacacagagtgggccacagaggaggcttgtggaaagtccttctccaaggctctaggattggcacagcctttctgtcattgaaaggggaaggcaagggctacccgaagggctgggggctgaactagaactgtcctgtgaacatcttccttccagcctagaaattctctgatacttggcccagaaccacgaagaccgtttttcctggcttggcccatggtccccacccaaggctttcttctagaaggaatacatgtaggagtcagaaaggtctggatcccaaccctgaggccgacctcaggtgtgctatgtagcctgtcaccctcaatttcctcctctgtgaaagcagaatgagcaagatcaccgctcagatgtgtcatgaggagtaacgtgtcatgacaccggcgtgtgaagcttcagcgaaaagcccagtcttgagcgtggtcacgagtcattacttcgtggtgagcagtagtattagtggggaacagtagtattagtgtgctttctccatgatacaaaactacctcggaagtcccaaagagttctatccaacatttgtggagtatctgctctgtgcttagtactgggggattcaatgatgaaaaagaaaaaaaaaaaaaaaaaaaggcacagtccttgcccttgagggtcttctagtctgggaggaaatggacaaacagaaaataccaatacagctgtagaaagcagtaacaagtgatcttgtgccttttttaaccaagagggtaagttcagtttcatatcctcttaccctgtaagggacaaatctttttaccttaggaaatggctacagacagcagaacagcagtggtgattagctgtgcagacaaatgcaaaagaagcccatgtccagagtgtgatcagaagaacacaaagagtgaagttggctgcagggagagggtacttagcatggggacttctctgagagatcccatcatccatcaccagccctaaggagccagggcttggcagcacccccacccaccactcagtctgggctgagaagtcctcgggttgtttctcccagggccatccaaggagatcctcccatcccagcagccagctcctcatccactggttcccagcgggaacaacatgacctgtgctccatgaccttgctcagctatcagtagggccgctctacgtggacagctgccctttcaaaagcccagggaactcagaaggacctctctccccagagtggagaatgggttcctggttaccaagaaggtactgatggccaaatagcaccagagggtgccaccttgaggtctccatgaagccaagacatgccactgctacacagagactcaaaccaagctaccactttcttcttcttggtttcttcgaagtatattagtcttgccctacccacaagaaagtcttctgacacctaatttccacgctttagcctgttaaggaaagtacccaaaacttgcggacaaaggaagaggatcacagtcattgttcaacaggatcattgaggatgatctagtgaaagagaatgctttgctatttcccatttacacagaacccactcagacactttaagttacaggttaacttttaggtttctgtgcagtagaaaagataactcccaaagtttattacctgtcaaacattaaccagttttatatctatttcaaaatgtatttccgcattcctttgcctgatggactatctaaatcttcattcctcaaatgctcctttgaacaactcttgccattgtacaggttccctcatgatttagtaagttcaagaagacctttgctccacgttcatattatatttgagagatttcaactctttgaaaatgatacaagacagtgacatatttcatggaggcacaaatgaagggaaacgctggactggaagtaggcatgagagaaattagcaaacatttgaaaacccacttgaaataatataaatgatctctcaataaacaaatgaattataactcttaaatattctcaagtgttagcatggagaaagcaaatgggttcaactaagccagacactgtcaccaaggagaaatgaagcaaacatcactaggaatcaaaggccttagccacgcgtcatcagtaagtagaatgcttactaatgacatatgctccccaggggaaggttaggtttatcgtaaatacacatcaaatggaaaagggacccgcaaatattcaagtggtaattctgagctcagagcaaggctgatgaatggaaaaacagtgaaaatactggttaattgctcttggctgacagcttcagaaaataatttaaaatgaataattagtacctttttaagtgaagctctagggaacctccttgacttaaaaagcaaaccatttcttttcctttataataattcttaagccatacctaagacaggcagggtaatggtgacattttaggcaaagtggttatgctatcaattacaatccagttagatgctctggagtgatgttagtagaaatgaaatcatagctcaagtattccatgattacatttgagaaatagtttccagacatatgttccaagcagacatatatgatttaattaaacagaaaactcagattttctcactttttcagtctactggtgacaaaattaaggggattggaacccctcccatttcttagggagctaaactgggaaccctttggcagagggttgacttttgaaccaggtgatttgtttctagattgtgtcagatgaagcttgaattcatcagttcacttgaacaagcatttattgccaagaaaagctgcttaaggaagccagtaatcaggtttattccacaggggatattcttggcaatgattctcacgctcatctcttgcctcctcattcttctctcctttattatcttaaggacatggctggacgcagtgggtcactcctgtaatcccagcactttgggaggctgaggcaggtggatcacttgaggccaggagttcaagaccagcctgggcaatgtggcaaaaccctgtctctactaaaaatacaaaagaaaattagccaagcatggtggtgtgctccagtaatcctaggtactcgggaggctgaggtgggaggatcacttaagcccaggaggtggaggctgcagtgagccgtgattgcaccactatactccagcctgggagatgggagtagcaccttgtctcaaaaataaaaataaaaatcatagggacccagaaataaacaggttttcccatcttagtgatggctgctggtcaccctcaatagctgttacttttctgtaacctcatagattgctgttgttgttgtttttattcatctccttagctttgtttgacctttatcagattactgggaatttatgaaacagaaaacacacccaagttaaattcacagacatacagatgagagctctttaatcttaggaccacagaacctcagactagaatatcatttgacatgttccttcccctgatttaaaaaatgtagtgaaaggttgtgtgacttcccaaaaccccagaactcaattctggcaaaacctgggcaagaatcctccatcattttccccatccagacacttgtcttccgatatttagtcttttttaatattgtggatgtggaatctctgcttcaattttccttttcacgtcctataatttattcttttttcttttttacaaccatgttgtgaaataaacaagcaacaactgtgaaaagtaaccagggaaaaacatcgcaccttctctgcacttgggctatggactttgaatcttttgtccagcagatagtagaatcttcatgaatttctgcaaattggcagcttaattttacatttccagagtgttcagggaacatctcagcttggatctttttcagtaatactggagctagaaacaagatatttgaaggtcagtgtaacaaaagactttcccatttcataccatttaattctcataacaatcctgagagacaggaatattaattattatccccaattatggaagtgagaattgagtctctgaggggagaggtggcttgcctaaatagtcggaaaatttacaaatcaatctaatagaaaatgctcacttccattacttaaaattctttaggtgcagcctgtaatgcttaaagtgaaatagaacttgagagattttttctaaaggggatgagaggtgggaggattttagatatctattctataggatctcatccaaataaagatgtttttaaatgattaccagatcatccaggtcgaaatcagagctaggaattagggagtagaataaaatctggattatccaaaaaactacggctaagcccccaaaatgtaaaagacacctcaacaataggttattggctgaataatattcatcttttcccttttatcacacttgtctttgctgaagataacctagtagattggagtgatgtctgatatcaacctcattagcaaaagagaatagaagcaataaggaaacaattcccactggttgggctgagacctttgaaatatcacctcagtatcaatatcagtgaggaacaattagcatgctaatgtgtaattagctagggcagccactgggcggcagcctagacattagaacaagacaaggatgaggcccctgtcccgagtggtcgtaacaattgggtaggaaatgagattactgcagatgtgtgagtctatcacaaattaagtagcataactccacagcgttggtaacacaaaaaagtacatcagtataaaacatatgtaatccgtagccaaaccaagatcaccaatactgagactttgctccactgcctcaaattatactacggtgaaaatatccatgaattcaaggtgcttctcatctctccttggcaccagcagatgctaggatgacagaatgcatatttaaaagctaattctctaccctggaagtgataatgggcctgttgggtagcaaatctttcaaccagagagtaaccaagactgctaacagtatcctgggagccaagtggataattgagagagagagaaaatgtaacaagtacgtattgatggcaaacccgcatcagtgcatttgggcctgctggttcctgcccaagctgagaccgtgttcaggttcacaatgtcaaactcttggtccaggtctcgaccaagcccacctcctcatctgggccatttcctagagggtctttccaacaccatgcagtggccggcttcatgggtgatgtggggacacctaaatattcctaagcctgccagaacctgttgtaccgaacacaaggaaaattggaggatggcgggaagggcatgaaatgggcagcagaactgaatgatggatggtctgtgggagatttgaagcttgtttagccgaggggctttgggctttggataggacccctgactatgtgagacagaggtggaaagtgcagctgaacgagctcaaaggagacctggagtgcagctagttttttcttccgtgtgcaggttgggctagtgttgagggaaaacggtagtaaagtccccggtgaataaaaagtttctgttgtactaagctttggacatcaaaaacgattactcaggcctggcatggtggttcacacctgtaatcccagcacttttggaggccgaggcaggagggtcacctgaggccaggagttggagaccagcctgggcaacatagcaagatcccatctctagaaaaaaaaattagccaggtgcagtgcgcatgcctgtggacctagctacttaggaggctgaggtgggaggatcggttgagcacaggagttcaaggctgcggtgagccatgatctcgccactgcaatccagcctaagtgacagagtgagaccctatctctaaagtaataataataattttttaaaaacattacttagggtttatttcttttataatgatccaagtcactgctcccctcatcctaactcccgccccaccagttaactggtgggaaggcattaaatctgtgctcctttggggatagcagggtgggtaccagactgctgggtagggcacagtcgagatgtcagccaaggggtctgaagtgtaccagccggaaagcagtgacgaggactcaggatcttacaaaagccatcacaagaaggaaggagaacttcctaatctggtgtcttcctggtggcaacttttgttatttttaagcaatgaaattgctgttgcttacactgagaaaacaaaataaaaaacctttgagtgctcaatggtggagtagattcttaaaggaattggcccacggctagaaaaccgtaacgaacaactagaaggtgataagttgaaaaaaaaaaaaaaaaaaggacgggcatgcgggcatggtggctcattttgggaggccaaggcgggcagatcacaaggtcaagagatctagaccatcctggccaacatggtgaaaccccgtctctactaaatatacaaaaattagctgggcatggtggtgcacacctatagtcccagctactcgggaggctgaggctggaggatcgcttgaaccaggaggtggaggttgtagtgagccgagattgcaccactgtgctccagcctagtgacagagcaaggctccgtctcaaaaaaaaaaaaaaaaaaaaaaaaaaaaataggctgttgtcaagggctggccctctgaatgctgccattccaaaaggtaaatgccagaagagaattatttttcctgtctcttgtcatcatctgtgttgattcgtatggattagtgcccacagtggattcatattagataaatattcagtgcattcattatcaaagtcaccatggaaaataacatgtccttaataaatggatgaatatgttggtcaagcagttatttcccatcagtcgatggcccttccagtacaataacctagtgctggtttgtagttagatcagggagctgtgatcctaaagaaaagtgggtgccagtgttccagaaacccgttctaattttctctgcaaagaaaatccccacacgagaggggagaggttggccgccagtggcaactcctccgaagctgggaaaggactgcagggtcagaacctaccccggcatgggcaaaacctgcctgggactcccatttacctgctgactcaagggtaactctggtgaacctccccctcctgctccgtcaccagatgactcctaccttctggccgaggccctgagtttttcagagaggaggagctgtggatgccagcaccactctttctcctaatgctaggttggtatcaactcagacacaatgatcttttgcctgaactaagctctctatttatttcataagcatactgagcataagcattgcctcattttttatttaaaaacactaatttaaaaaaacagtaactaacaaccatgagagctgtgttaggccatgtgccattcaaattgctttgcatttttatacctgagaggagtcttatcattagcacccccattttacaggtggggaaagtgaggcacccagaggctaaggcatttgcccagggctatccaggtactgccagaggccagacttgaacccaagcaatataactcctaatctataccctaaccaccatgatacaacttgccccagatggacccaaacacccgctagtatctctaactgaatctttgcctcttaatggcctctgtgttgtgggtggcatgagtaacaacccttcagtggtctggcctggaaaagtctttggttgtctctaccccgtagtctccggcagggccctctcaggacaaggctggctgccctcgcatctacctgctttgctcagaccagtggctcccagaaggcggcatgctcggtctttgcagcctttagtgcaatggcgaggttgtgctgcagctgaaatcaaagtctttgacggcgattgatttcaacactgcctatctggacagtcctcttacccatgggtaacttgaaaagtcacaggcaagaattccaaaaaggtggttttgcttgtctacctttacctgcaaaggaacccctatccccaaacaagggggttgaggctggtccccagaggcaatctattcagcctctgggctgaaaccaattttgagagcttttgaaacattgcttcattctatttaatttttttttttttttttgagacagsgtcttgctctgttgcccaggctggagtgcagctggagtgtggtggtgtgatcacagctcactgtagcctcgactttctggggtcaggtgattctccttagccgcagagtagctgggactacagacgtgcgccaccatacccagctaattttttgtatttttcgtagagatggggtttcgccatgttgctcaggctggtctcaaactcctgggcttaagcaatcctcctacctcggcctcccaaattgctgggattacaggtgtgagccacaatgccgagccattctctttaaatatgctttaaaatatagatactaataacctgattggatacttccaaactcttcagaaggcagttttgtctttaaacctttctgcaacaggggttaggacccatttgatgggatgggaataacaaacgccagcctcaaaatctaaggactcaggttaagagaggagaaaattcttcccttctgatcagccatccgtagcttttcgctccagagcacacaggccactgtagcttgctgcaatattttctcttctgacttctaccagggtgtgtggggagagaaagaagagctctgaaataaaacaggctaaaatttggtctataaatggaatttgggactgaaatgattcctcagacaaagtagaattaactgcaatttcaggactttttttttttttttaacagcatcataggtagaggttgatcaaggacttttgaggcttgagtggtctgaaacctagaacagagacctcagaggattttagatttagataaatgggaagggtgagttgaaaagaaatgttacactcaaatttggaagaaaaaaccaaggttcaaggaagttatttttaatgaaaaatcagtgattaaagaggagaatcccaatttgtaccaaaatattcatttccacaaatcctgcttagtgcatggtctatttcattatactaattagctacactgattaatgcttctgtttatatttttaaatagattttgtaaaagaggataatgaaacggaaaagcaccttcatcacattcccctccaacagacatgcctacaggcggcctttatcagtggttctcaatcgtggttctcccgatagatcacctgggaacttgttagaagtgcaaatttcacacactgggggaggggagcaatctgggttttaacaagtcctccaggtgattctgatgccacatgctgaagccacttggccacaaccatagcatcaatgcccacctgggggacactggccttaattgcaaaggaccctcgaggacacaggaactggatacctggtctacaagcccaaactttaacaatgatggacagcaacagarcctcacctcttccttctcttttgcaagatggcttttttgggtcttgtttctcttctgtgtgtgataatgatgtttcgagtttgggcatctttttaagaaaggctgagttctttctgatattttccttttcttccagtttcagcctcagtgctgccaccctggacaaaattttcttctttactccctcagctaaatgtccactgcctggggcttctggcttcctcttgacctcctctgaccccgtcactgctgtgagggtccctggcgatttgcctgctcgggcttccagggacttctctctctccctggactttttcgcacagcccagggtgcccttttgacatggatcctgcagtaayttaggggctttctctaactcacgttctcctgaaataaatgccaaggtcttcgctgaggagctagatgagcttgggggtttggtttccccaatttgaagcacctctattttaggttcctccattttgtggcttatcaaaaagtctgtgacatttccttcaggagatgaagtacaagggaacctggtaagatcaggagaagagggcaaaggtttcccacgctcattctcaatagttccccttttctgtgaaacaggaaacacatactgacgctttctgggctcaactatgtcattttcagggacgtcatgaatttggcctgtggagttgtgcgtgtcaaccccaagagaagcgtgagtcattattggaagacaactagaaagaggtgaagtgggggaaatcaattctgctttgtcctttttgctttgctcagcctcccctaagctcccatcactgctttcttgtatttggcctatgctacatccacttggaattc

SEQ ID NO: 42 - DNA, 142303 bp, Homo sapiens
gaattcatcagttcacttgaacaagcatttattgccaagaaaagctgcttaaggaagccagtaatcaggtttattccacaggggatattcttggcaatgattctcacgctcatctcttgcctcctcattcttctctcctttattatcttaaggacatggctggacgcagtgggtcactcctgtaatcccagcactttgggaggctgaggcaggtggatcacttgaggccaggagttcaagaccagcctgggcaatgtggcaaaaccctgtctctactaaaaatacaaaagaaaattagccaagcatggtggtgtgctccagtaatcctaggtactcgggaggctgaggtgggaggatcacttaagcccaggaggtggaggctgcagtgagccgtgattgcaccactatactccagcctgggagatgggagtagcaccttgtctcaaaaataaaaataaaaatcatagggacccagaaataaacaggttttcccatcttagtgatggctgctggtcaccctcaatagctgttacttttctgtaacctcatagattgctgttgttgttgtttttattcatctccttagctttgtttgacctttatcagattactgggaatttatgaaacagaaaacacacccaagttaaattcacagacatacagatgagagctctttaatcttaggaccacagaacctcagactagaatatcatttgacatgttccttcccctgatttaaaaaatgtagtgaaaggttgtgtgacttcccaaaaccccagaactcaattctggcaaaacctgggcaagaatcctccatcattttccccatccagacacttgtcttccgatatttagtcttttttaatattgtggatgtggaatctctgcttcaattttccttttcacgtcctataatttattcttttttcttttttacaaccatgttgtgaaataaacaagcaacaactgtgaaaagtaaccagggaaaaacatcgcaccttctctgcacttgggctatggactttgaatcttttgtccagcagatagtagaatcttcatgaatttctgcaaattggcagcttaattttacatttccagagtgttcagggaacatctcagcttggatctttttcagtaatactggagctagaaacaagatatttgaaggtcagtgtaacaaaagactttcccatttcataccatttaattctcataacaatcctgagagacaggaatattaattattatccccaattatggaagtgagaattgagtctctgaggggagaggtggcttgcctaaatagtcggaaaatttacaaatcaatctaatagaaaatgctcacttccattacttaaaattctttaggtgcagcctgtaatgcttaaagtgaaatagaacttgagagattttttctaaaggggatgagaggtgggaggattttagatatctattctataggatctcatccaaataaagatgtttttaaatgattaccagatcatccaggtcgaaatcagagctaggaattagggagtagaataaaatctggattatccaaaaaactacggctaagcccccaaaatgtaaaagacacctcaacaataggttattggctgaataatattcatcttttcccttttatcacacttgtctttgctgaagataacctagtagattggagtgatgtctgatatcaacctcattagcaaaagagaatagaagcaataaggaaacaattcccactggttgggctgagacctttgaaatatcacctcagtatcaatatcagtgaggaacaattagcatgctaatgtgtaattagctagggcagccactgggcggcagcctagacattagaacaagacaaggatgaggcccctgtcccgagtggtcgtaacaattgggtaggaaatgagattactgcagatgtgtgagtctatcacaaattaagtagcataactccacagcgttggtaacacaaaaaagtacatcagtataaaacatatgtaatccgtagccaaaccaagatcaccaatactgagactttgctccactgcctcaaattatactacggtgaaaatatccatgaattcaaggtgcttctcatctctccttggcaccagcagatgctaggatgacagaatgcatatttaaaagctaattctctaccctggaagtgataatgggcctgttgggtagcaaatctttcaaccagagagtaaccaagactgctaacagtatcctgggagccaagtggataattgagagagagagaaaatgtaacaagtacgtattgatggcaaacccgcatcagtgcatttgggcctgctggttcctgcccaagctgagaccgtgttcaggttcacaatgtcaaactcttggtccaggtctcgaccaagcccacctcctcatctgggccatttcctagagggtctttccaacaccatgcagtggccggcttcatgggtgatgtggggacacctaaatattcctaagcctgccagaacctgttgtaccgaacacaaggaaaattggaggatggcgggaagggcatgaaatgggcagcagaactgaatgatggatggtctgtgggagatttgaagcttgtttagccgaggggctttgggctttggataggacccctgactatgtgagacagaggtggaaagtgcagctgaacgagctcaaaggagacctggagtgcagctagttttttcttccgtgtgcaggttgggctagtgttgagggaaaacggtagtaaagtccccggtgaataaaaagtttctgttgtactaagctttggacatcaaaaacgattactcaggcctggcatggtggttcacacctgtaatcccagcacttttggaggccgaggcaggagggtcacctgaggccaggagttggagaccagcctgggcaacatagcaagatcccatctctagaaaaaaaaattagccaggtgcagtgcgcatgcctgtggacctagctacttaggaggctgaggtgggaggatcggttgagcacaggagttcaaggctgcggtgagccatgatctcgccactgcaatccagcctaagtgacagagtgagaccctatctctaaagtaataataataattttttaaaaacattacttagggtttatttcttttataatgatccaagtcactgctcccctcatcctaactcccgccccaccagttaactggtgggaaggcattaaatctgtgctcctttggggatagcagggtgggtaccagactgctgggtagggcacagtcgagatgtcagccaaggggtctgaagtgtaccagccggaaagcagtgacgaggactcaggatcttacaaaagccatcacaagaaggaaggagaacttcctaatctggtgtcttcctggtggcaacttttgttatttttaagcaatgaaattgctgttgcttacactgagaaaacaaaataaaaaacctttgagtgctcaatggtggagtagattcttaaaggaattggcccacggctagaaaaccgtaacgaacaactagaaggtgataagttgaaaaaaaaaaaaaaaaaaggacgggcatgcgggcatggtggctcattttgggaggccaaggcgggcagatcacaaggtcaagagatctagaccatcctggccaacatggtgaaaccccgtctctactaaatatacaaaaattagctgggcatggtggtgcacacctatagtcccagctactcgggaggctgaggctggaggatcgcttgaaccaggaggtggaggttgtagtgagccgagattgcaccactgtgctccagcctagtgacagagcaaggctccgtctcaaaaaaaaaaaaaaaaaaaaaaaaaaaaataggctgttgtcaagggctggccctctgaatgctgccattccaaaaggtaaatgccagaagagaattatttttcctgtctcttgtcatcatctgtgttgattcgtatggattagtgcccacagtggattcatattagataaatattcagtgcattcattatcaaagtcaccatggaaaataacatgtccttaataaatggatgaatatgttggtcaagcagttatttcccatcagtcgatggcccttccagtacaataacctagtgctggtttgtagttagatcagggagctgtgatcctaaagaaaagtgggtgccagtgttccagaaacccgttctaattttctctgcaaagaaaatccccacacgagaggggagaggttggccgccagtggcaactcctccgaagctgggaaaggactgcagggtcagaacctaccccggcatgggcaaaacctgcctgggactcccatttacctgctgactcaagggtaactctggtgaacctccccctcctgctccgtcaccagatgactcctaccttctggccgaggccctgagtttttcagagaggaggagctgtggatgccagcaccactctttctcctaatgctaggttggtatcaactcagacacaatgatcttttgcctgaactaagctctctatttatttcataagcatactgagcataagcattgcctcattttttatttaaaaacactaatttaaaaaaacagtaactaacaaccatgagagctgtgttaggccatgtgccattcaaattgctttgcatttttatacctgagaggagtcttatcattagcacccccattttacaggtggggaaagtgaggcacccagaggctaaggcatttgcccagggctatccaggtactgccagaggccagacttgaacccaagcaatataactcctaatctataccctaaccaccatgatacaacttgccccagatggacccaaacacccgctagtatctctaactgaatctttgcctcttaatggcctctgtgttgtgggtggcatgagtaacaacccttcagtggtctggcctggaaaagtctttggttgtctctaccccgtagtctccggcagggccctctcaggacaaggctggctgccctcgcatctacctgctttgctcagaccagtggctcccagaaggcggcatgctcggtctttgcagcctttagtgcaatggcgaggttgtgctgcagctgaaatcaaagtctttgacggcgattgatttcaacactgcctatctggacagtcctcttacccatgggtaacttgaaaagtcacaggcaagaattccaaaaaggtggttttgcttgtctacctttacctgcaaaggaacccctatccccaaacaagggggttgaggctggtccccagaggcaatctattcagcctctgggctgaaaccaattttgagagcttttgaaacattgcttcattctatttaatttttttttttttttttgagacagsgtcttgctctgttgcccaggctggagtgcagctggagtgtggtggtgtgatcacagctcactgtagcctcgactttctggggtcaggtgattctccttagccgcagagtagctgggactacagacgtgcgccaccatacccagctaattttttgtatttttcgtagagatggggtttcgccatgttgctcaggctggtctcaaactcctgggcttaagcaatcctcctacctcggcctcccaaattgctgggattacaggtgtgagccacaatgccgagccattctctttaaatatgctttaaaatatagatactaataacctgattggatacttccaaactcttcagaaggcagttttgtctttaaacctttctgcaacaggggttaggacccatttgatgggatgggaataacaaacgccagcctcaaaatctaaggactcaggttaagagaggagaaaattcttcccttctgatcagccatccgtagcttttcgctccagagcacacaggccactgtagcttgctgcaatattttctcttctgacttctaccagggtgtgtggggagagaaagaagagctctgaaataaaacaggctaaaatttggtctataaatggaatttgggactgaaatgattcctcagacaaagtagaattaactgcaatttcaggactttttttttttttttaacagcatcataggtagaggttgatcaaggacttttgaggcttgagtggtctgaaacctagaacagagacctcagaggattttagatttagataaatgggaagggtgagttgaaaagaaatgttacactcaaatttggaagaaaaaaccaaggttcaaggaagttatttttaatgaaaaatcagtgattaaagaggagaatcccaatttgtaccaaaatattcatttccacaaatcctgcttagtgcatggtctatttcattatactaattagctacactgattaatgcttctgtttatatttttaaatagattttgtaaaagaggataatgaaacggaaaagcaccttcatcacattcccctccaacagacatgcctacaggcggcctttatcagtggttctcaatcgtggttctcccgatagatcacctgggaacttgttagaagtgcaaatttcacacactgggggaggggagcaatctgggttttaacaagtcctccaggtgattctgatgccacatgctgaagccacttggccacaaccatagcatcaatgcccacctgggggacactggccttaattgcaaaggaccctcgaggacacaggaactggatacctggtctacaagcccaaactttaacaatgatggacagcaacagarcctcacctcttccttctcttttgcaagatggcttttttgggtcttgtttctcttctgtgtgtgataatgatgtttcgagtttgggcatctttttaagaaaggctgagttctttctgatattttccttttcttccagtttcagcctcagtgctgccaccctggacaaaattttcttctttactccctcagctaaatgtccactgcctggggcttctggcttcctcttgacctcctctgaccccgtcactgctgtgagggtccctggcgatttgcctgctcgggcttccagggacttctctctctccctggactttttcgcacagcccagggtgcccttttgacatggatcctgcagtaayttaggggctttctctaactcacgttctcctgaaataaatgccaaggtcttcgctgaggagctagatgagcttgggggtttggtttccccaatttgaagcacctctattttaggttcctccattttgtggcttatcaaaaagtctgtgacatttccttcaggagatgaagtacaagggaacctggtaagatcaggagaagagggcaaaggtttcccacgctcattctcaatagttccccttttctgtgaaacaggaaacacatactgacgctttctgggctcaactatgtcattttcagggacgtcatgaatttggcctgtggagttgtgcgtgtcaaccccaagagaagcgtgagtcattattggaagacaactagaaagaggtgaagtgggggaaatcaattctgctttgtcctttttgctttgctcagcctcccctaagctcccatcactgctttcttgtatttggcctatgctacatccacttggaattctttcaccgccttcgctgggttgcaggacttgccaaatggcagtttttgcctcctcaggttgaatttgttcwgcctcctgcttcatactgccttcttggcttctgctgattctattttcactcagaatggttccctggagacatggaacttgcaaaatggccgrctggatttccgcttcgtggcccatgtttccgtcatttgattgaccyccttctctggcgccctgtggtgtggtttcagagggctctggttttccagccctggtgtactctatcacacttatctcatcaatgggatctacagaggactctaggattttagggcaggtcagaaactttttaaagaaggcagtgtgatccatcttgagttgtttttcctcctggtcttgactcacattgttaacattttccttccctccagtttcagaagccgctgacagtgaatctgtgacagataactccttttcatctacagggtccacggatgactccaggagtctsggttggctgaaaccccgggaagaaagacttctccartgtacactgatggtgggctcttcgcctttatggctttctctgctatcagcaagggctgactcagcatcctctggactgtgagccaatgctgctatttcagagggggccaattcaggcacaacagcatctgcctttagactatcaggtacagcccagaccttgtcaggaattatgagaccaccgtctgatgccttgctctcagaatttgtcagttgtcgtggtggccagatttcagaagcggaagcctctagagttataatcttcagcttgttgcctgcctcccaatttccaggtctatattctttagactcttccaaaaggatatcagagagagatggaacgttgctcagagcctgactgtcttcttccccagcagtttcagccaccacggagaccctcgtcccccaacctgagcgctgccctgctccttccctagagcttgckggtgagkgggccgtgggcaccaagtttctttcctcttgtgcagcagatgtcgtaggcaaactttgttggaaatcaggtgcagaaagagaaccctgctgggacaggctctgctgctggaccccctgctttgtttcacttcctctttcttggaaattctcttcatagctcctaaagtctgctctgtccacagtctggctcttatctccagacaggttatcaacctgaagaggggaattactgcagaaaccctctccctctgggagctgcaggacatggtgtgggactcctggcacactgggtgccctgcaaagtagctcttttgtagatttgatggtagcaccacttaaaatatgatccamctgcacttgggaaggaaattgggaaaccttttcatgggatgcacgagggaacctctcctcagtgccacctgcatgcttgtcctcaggaattgacacagcaaggtatttggctgggtggacttcggtggcaatggtaacagttgatgtgtcctcagtctccctggtcgcttgaaagcactcattattagcagttaatgttgttggcttctcccaaggaaaactcacaattgaactataactggctggtgtggctgtggtgtctgcggcactaggactggggctcttgtcacctccttctttaaattgcactaaaggattgttctcagaagaaaggagctgtgtttcatcaagccctcctgagttgctggggcttggctgctcctggccagcatgtactgtggaggccagtgggtaggtggawttctccaccttggctagattttctcctgtggcaccttcactagctgtgtgtgaaatgttcaaggtgaaagtactgrtaaaaagaggggacatgactgagttgccgtccttgctgcttttgcacgtagacactgaagtctcagacacttgtgtctgaaaaaagacttccagtgtcttgtcattagaagaacataaatcagatactttgttttgaccttctgccagttccgtatctacagagcaaatttcttgaggcgaatakttatcaactggtstcccaacaagagaatctatggtatcaaaacaygttccttggtcacyagcctcaaaacactccattgcacacactgcttctctgtcccttggctcatcacacacattttccagggtgagggcagtatctgtgggttcaggggaagcaacagagacagccacaggctccctgaagtcagcacgagcatccttggggagatgccttgagaacacacctggggacatagtctcatcattggcttctgagatgctctgctcatattttaggtcttccctgaaattgtcaggtatgttgccatctctgtcttgtttttcttcmtgctgtggaccacaggtacagggtttgacctccgagtgttgagctaatgatgcattttccttgtggacccctcctaagtttgagaaggaaattgttgtggtcccagtgaatggggactcctccccagcaggctctgagaaagctggcatctggctgcaagagattgtctctctgactgtttcctgaacttgtacctaggaagatgaaaagtgatattartagaattgttcatgggagagcccacaatagggcataactgcaatcccaagagtgttaatcctcaatgacygtaataatggacaagaatgattgaaatctaaacattaatcccccaactccctctagctattagagatttcctagaaaactgcaaatttaarcaactctgtgttccagggggccctttgtcaaattcatcattataagcaaaaagcctcctgacaaccatcatttatttaatgatttctttctctcttaggaaatagatggaaataaatcgaatgttaactgttttgatcaagtaagtcacaacaagagctgtgcgcatctttccagaaagatgaatctcacatgatcataataaatgaaataaacagtacttgcaaaacagcaataagcaatctttgtccccaaaatataacagcttgctggttaataattgctatggtttggatatttgccccctccaaacctcatgttgaaatttgatcctcagggttgaaggtggggcctaatgggaagtgtttgggttatgggggtggatctcttacgaatagatttatgccatccctcaggggtkgggggaatgagtgagttctcaatctattacttcctcgttgttaaaaagagtctggcaccatccccacccccaccctgcttcctctctgtccatactatctctgaaaatgccagctcccctctgcctcccatcgtgagttggaagcagactgaggccctcaccagatgcagatgcctaatgttgaactttctagccaccagaatcatgaaccaaataggcctcatttcttgataaactacccaatctcwggtattctgttatagcaacatgaagtgcactaagataacaatgttactaaaaaacagagagaaggctgcctttgaacccacctctaatgaataaatggacttatgattggccaccagcactgccaatcatttctttcctagagaagcttataaacatcccagaatgtatcccagactttaaaatagatgcccagtggcaggcagaccacctctacaggaaatagaagattcaggactgcttaggtttttgagaaaaggggagagggggagggagggaggaagagaggaaggcagagaaaaagaaacctcacattctgaggattgagcctttcatggtactatatgaacgttccatgatattggatattgttcaaggaagcagcaaactctttgactaaatccttgtctcatgaaacttttagctcattgattatttcaaaacaaagaaaacttatgtccagccaaggagaagaaaattacttctaatttctgaagcaactcagtctttgctcccaggactcctgccttggacagccacattcagatgtgcagggaacagatgactggccttggcgggatggggttcaggggtggggatgaagtctgtctcccagcgtatgacaaaacagagctgaaatgttcatgggcatattatggctccaatgtcatgagattgattctcataaatcatacatgacagtcagtcttactaccttgtggtcaatccctgtatgtactgcccgtgggaagcaggacaacagcataatcacacctctttccacacttcccccaggctgcttacagcctgtcagtcatgcatctctcattttctcttttaaagctactttgaggttcatttaactcatatttgatgggcataaaaatgctaactaaacaagaaagaaatttaatataaactccatgagggctaggactacttaatcttttcaacaaatatttagtgaatgcctccaaagtactagggagtgttttagataatggggatacaagacaggcaaatgctcatctacaaggagctcccattctgtgttctagtgaaggcctgttatagcgattagcatgcggtagatgcttactaagtgtttgttgagagaatgaataaatgaatgaaccatgtaccagttgagacagctgtagccaacttcacccattaaagctctacacttgaaagggtttgaactttcatctgctcctgactttgcaacaaccccattttaaaagagactttgaaccctaagcactactggttatcctggtgttcccggaaagaaaagtatatttattccctttctatatccctttttcttctttattaaaaagaagaaatatcatttctgggaaataagggataaggtatttttttaaaagagtttgatgtgcatatgctttcctctctatacctcaatatctgtaacacatgtaaagagtacttttctggtttggtattttggttcagccttttaagaatatgctatagcacaaatagactgagtcattaagcacagaaaacatggggaacttcctggtcattatgtgaaatgtatagagagactgccccatcaaaagcaccaccacccctctctccggcctttctatcctgcctgcatttccactacctatgtcagtcccttattttaaggtcctggtattatcacagtatcatcagtgtcaacagacatttatggagtagctgtcatgtgcagaattctctgtcaggcactgggcaattttttccaaagggcttcagttaaaaagttactatgatatttactgggatggtacctttattcttccgtgattgattactattacatcagcaaagtaataagcgggtacctagaagagactgacctctgaagagaattaaacacaggacaagttttcattaggatgagcttggtcactggaatagatcatcatagtatcatgccgtgatttacaaaataatcatattccattgagatttatttgcacctttcctcttgtattagtcagttcttgcactgctataaatacctgagactgggtaatttataaatgaaagaggtgtaattggctcacggttccaccggctatacaggaagtatggtggcaactgcttctggagaggcctcagggaactttactcatggcagatggcaaagctgaagcccacatcttgcccgacaggagcaggaccaagagcgagcaagggggaggtgccgcacacttttaaacaaccagatctcacaagaactcactcattgtcacgagaccagtaccaggagatggcgctaagccattcatgaggaaccacccgcatcatccaatcacctcccactgggccccacctccaacattggggattacatctcagtgcaagatttggtagagacacagatccaaaccatatcgcccctcttacttttaaattaaaattctacttcaaaataccctagtgaatctccacatgtaaaaaaattggttgaatccttgaccgtgtaaattcatacatttgacacacatttagtgaccatctactttataccaggcactgttctaggcagctgggaaacatcaatgaacataacagagattgctggcctgtggaagttacgttgaagcaacaaaccgtacaactggcccgctgctgataagcaattccataaatttgattttaaccaatggggttttttttgaagtgaagcctttaacagcccagttcatatttgtacttgcttacggcatcagtttcaagagcaggctcctcggttctcatccagaggccagctcacagagaaagggaaaccacagactcacaccttcccaatgagtcagacctttcttttaggaggagatttcttagttaagtcattacaaaagaatgctagcaaatgattcttctgctgtgcacctattctcagcatagaatgagtgctgaaacttcgagtgagtgctgacacaatttccttatgtagggaaattgtactcattcaagtgaaaaaaggagtgtttggggctctaggagtaagcccaacatagtgtgtggtgcgtggacttggaggactagcaaccagcgtttgtagcccagcttaattggatatagcatgcatgaccacgggtaacctctttagcttctctgaccctctgtctcctcctctaagactaaccacatgcatgtctgcaccatcttgtcaagtgcctgacatattgcctggtgcccagaaggcactcactcactgatactaattttccttcttctctgtgaaaaaacagcagtagctcaggaaaagaggaagttggggagctctgacaggcagagccttgagctatgagctttatgagggttttctcatctgatccgtaaaataaatctgagaaaaagatgttatcatctcttctttactgatgagatgaatagcctaggtccaatcatagaaaccacacagtaggttatataagagaagttcaatataaagaactattgactgtgatagaagagtgctataaggtataaggaaactgtctatagtactctaggtaagggaaagtaccaaggaaggacaaagttggaagaggtttagacctacttggagaaggtgtggttaggccaccagatagcacagaagttcactggtgcatccagaccagagctggcctggaattgccgagaaaagcaatagacctcccttccaagtgcaggccaggagtaggtggtcagcatgcagtggcgtgggtgtgcaggggagtctgggcatgggtggtcacaggggctgaagccttcagagcttgtgggctacatgtggtgtgggtcaggagtttgcagagtgctagtttgaatgtccactcaaaactcatattgaaacttaatccccagtgtggcaatactgatgggtggggcctttaagaggcgattgaatcatgggagctctgccctcatagagggattaatccatttatggattaatgaattaatgggctgaaggattgatacgttatcaagggaggggacctggaggcttcataagaagaggaacagagacctgaggtggcatagagcgtgcttagccccctcgccatgtgatgccctgctctgccttgggactctgcagagagtccccagcagcaataaggcctgcacaagatgcaggccctctgcctgggacttctcagtctccagagctgtaagaaatacatttcttttctttataaatttcccagtttcaggtattttgttacaagtaaagaaaacggactaagtcacagagggaacaagtgctctgtgcaccagacctcaggcggctatgtgtagaccacacaggagcttgtggaggcagtctgtgcgttgatacaggcaggaggctttaagagctgggggccatgcggggctctgggttccaaagagagagggcagcagaaagggtatcactacactaaggctacaaggttgcagatgaccacgttctggggcccatggctgaggcaggatgaccacaggctctccaactccaccaatgctgaaatgacaggaattctcttcctcctgcagtgtccttccagtgccttctgctgagaaagcgtaatactgtgcttactttaaagaagaataatggaatttcgttagtacagggcacatattaaagggtgaattcagagctgagaggaatgaattaaaaaccgacacatgaggtcaatgatgtttggggatgagaagtctccccagggtcccacagtcaaaggcagagccaggatttaaagccaagtctgtgaggctacagagccctttccaacccagcatttctaatcaggtaagttggaataaacctcacctcaccaagggctgggaacttcccctaatttaagtccagaacttctaarctcctgaaacactttggatatgaaactgcaaatgtccttcttaggtgcaacatggccatctctcaatttctctacttccctacaaggtctaagggtagggactcagttattcatttctgagtctccagagcctagcacatagggactcaaataattttgctgaatgaataagcagatgaatgaatacaggaggggaaagggtaaaccaaatttagtaatgtttccaagcctctttttgaaagcagcattaagcttggaaacttaacgcttgaatagcatttttcaattgaaaccccattcaacatgcctctgattccacaaacatattattttcacttattggcctttccaaagttctgcctcctaggaatgtctgccatggatttaatggaaaggtgtgtttsctctttgtgcaccccaggatgttcaaggttatgcttttcatcattaatgagtgtctttcatgccagccaagtgcatgacactaatttgagtcactaacaatagaaggttgtatgagataagatccctctcctcaaatagcttataatccagttgaagagacaagatgtacatggaaaacaagatgtacatagataacaattcttgacaagttgtgctaatagccaagtggatgaaacttaactaacaacgctgctccaggacagagtgtggaaggtcaccactgtatcatcctcttccatttcaacgataaaattcctgcagtgcagaaatcagaggttgtaatcttacgtcatatgtttcaattctaagatacttcttgaacatttccatgcagtctaagggacttctctactgattggaatgggcagatgtggtagatactgttggctgactaattcaacagtaccgccaatccccttgtctcttgctacctccaactaagaaggctggaaaaccacacactctcccagcctcttacatagctagatggggcaaaggggtcagtctgcctaatgagatgttcaaggaatcccaccaagggacttctggggaagctttgctttccttgtgtaaggtatagacatggtgggtaccttgcctatcccctccttcttccttcaatcaggatgtaatgcctggtgctgcagctctcatcttccagtcctggggcatgaaaatgaaaagccagcacactatgactggtgcagcagaaagagagaaggaagttggagatttgcagtcatcgtcgagctactggaatgacacacagactttcactagccccagacttcttgtgaactacaaaaaaaaaaaaacacacacacacacacacactattagctagctgactattctgttaactgcagcttctcagcagcctaatggatagaagagaaaaatatatggctgagggaagaaggggaagccaggtgagggtcaccttggaaccctctggaggctctgggcagctcctggtagggattagctggaaggggacagtgtcccgtagagcaaggggtgtggtccctggaagggagctcaaggtgctggtcaaaatgccaagggatcaaagggccttaggcaaggtgaacttgaagtagagtgggggagggagaatgggaaatatgagaagattgattgtcaaaggagagaggccacagttctaaagccaatcagaagccccggggccaggagggccaagccactcggtccctagcttcaactggtcagtcttccgtgtgccaacatgccctaccatgcataattttcattctccaacttctttttttttcaaagttcttttagtgttctttccttcttatctggatgaggtaagtagaaatagcactgtgtccttcaacagttgtctacacatcatcaattttcccttgtggttccaggaaactttaaatgagaccttcccctctctccagccattctgggctgttgtagcctcccccacggataacctttcctaaatatctgctgagctgtcacaacaggcagagcgtcattcggccatttgtcattcgatagatcaaatccataccacctggggctgcaaaactgaaaatagatagcccggtccccagccaaagaaagcttaaaggcaagctagaatatttcaggaacttgagtttatttttaggagttgcctgattgcccagaaagaagcttctcttgaaggctttgaatattaggataacacgtaatagactggaggactgtaacttccttgatattcatctaaaacctccagtcctgaaacagatcctaaacacccctrtatctgaccagctcttcttcattccattccctcctaagggacaagaaatcctcagccaactggtgttacaattctgtcttcatttcttgagagtcatagagtttgtaaaatactgatttgatcttttgctgggagaggcctgggtttccatggttcacacccttcctaggagctctgtgmgttcagtgggagtctttgcctggtgacatggtacgagtggaagggcactagagcatgagccatgagcatatgaatttattgtacatctcaggtgaggtgagctaagtagtaacgctactattagtagtaataattgctaatccctacagcctttttaacacacggcaggcactgttctaactgctttacttacattaatgcagttaatgttggtaaaatggcatagaaatttatgacttgaggattttgggttgtacattgcaaacgaagggatataccaactattccaacacaggcggggaccatgtaayggcaaactcatgtgaaatgggtcacaaaaacggctgtcttcttttcctgcatgcatctgtgttttcctgcatagatgatgggagatttctgggaaatgagagagacagagtgagccataatttccataaagtgcaactgtatgcaaacataagaaaagatggtgctatgaagccccatgatttctcttgaattccactaggcatttctgaatagtctctggggggttttttggttttgttttgtctttttgcttttttatttgctgtgtcttaaaaagacacaggagatgagagaaaaatggagtagggtgatggaaaaatgatttgagtctcagaaaactggggtttggtcttggatctgctactatacaggaagtggctgtagagaagtcaccaggtctctcagagtctttcttccacagtaaagtaagagttagataacacctcttgcttcccaacagctttggtgttctgtgacctgctgccaagtaaatggggcctaagcttcacccctcatttgcaatcagaggttccgtggactcctatggcttctagatctaatcttctctattaacaatgagaattgttagggaaaaggatacagcatgtcaccatgtcaccataggtagaccgattgaagattgagccagtgggaccccagagaggggcaggaaagagacagtgggctggagaacggctcaccatgaacatgcactctctggattccaagttcctctgcctccctggtctctttccttctccctcctctaggcattaagtgccttgtgtctttggtagactgcactgtgttggcgtatagaccctatggttcatcctgcagagtcctagaggcttacagacctagtccaagccagtgaaaatcatcacagccacagaatgcaacaccagtggcctaagcctccaaccttgttagccctttgtaagatacaggctgctttgaagagccaagaaaagttatggcttcttcccagaaagtcttgttttacccacacaatgttgcacataatttccggggggtttcagacccccttgggcctatggatatcctgttaagggctcgttgagcctcagaatgaatccctgctgtatgtagaccatgagcctggggtgagtgggatggtattgtttacgtcccacaaactgaaactttcctgcagatttcagacaaaatgataaggggaaaaaattaattcttagtcaggttctaggagagtattttcaaatcaatatctctctttatagtttttagaatttgtgagtaaaagcaaaaccaaggtagtagcaattaccacactgcaatgacaataatacattacataaagcaagttcttgtaaactttagaagcaggaaatacttgtcacgattactacactagtactttgcctcttcagtgtgggcttcaaagtgtacagcagtgatggtattcggctattggaaaatctgaatataaacataaatattaagccagtcacctgcctcagatgctcataccaaaaaatggcgagaaaatgcaggtttggggattgaggattctttatatcctatatctcttctctagtaagtcagcaggatagtgataggacctcgggtttggtttcctgtgttttgttttttttttttctttgagatggagtctcactatgttgtccatatcacagtggtgcgatctcggcttatagcaacatctgccatccaggttcaagtgattctcctgcctcagcctcccaagtagctggacttacaagcgagtgccaccatggccagctaatttttgtatttttagtagagatggggttttgccctgttagccaggcaggtcttgaacttctgacttcaagtgatccacccacctcggcctcccaaagtgctgggattacaggcgtgagtcaccgcgcccagccaggcttggtttcttgattggcagaaaataacccctctggcagtacaatcacaggtgacgcagcaggcaacaacgattacctgctaagactgagagacagcttcattccaaaaaagagacaaaatttcctgggatattgagatcgctgagagggacaacaacattaatgttgttctacttggtgcaatgagcatggtaaatgctcagaaattatgtcaaatgagtgaacatctatccagtctgatctttgtccaacatccctttgccaacatatgtaggaaggttttgcctcttcagtctggttctcttctcatgtcagatctcagcatctctctgttgagacattgatctcctacctgaaaattgctccaggctcctgcgttttggttaatatgtagcttctactaaactaaatctcttattcatcactaatagtttggtgcctggtttgttggggtcttttttagatctaaaccgaagctttatgttctcttttgagtagagagagagaagcatcttttgttttaaccacaaataattgaggtttcaagtatgtaccacttagaagacatcagcataactgtaccgactatagccaggcaccatgcactgaaagtgaggatgtccagtttaccctgggcacagagctataaattgcaaggtacaacagcagggttgcatttaaagatgagggaaatcaaaggtaagatgtgaactgaggaggactatggtgcagattacaccagaaattcaggggcccctttggatggatccatcgaaacaaactttccccttgtagatggaaggaaaaataacaattcacagaaaagtttctgggaagctgaagttggtagggaaatgcctggagaaccaaggaggaggaaacatctggaattcaatgttgtgatttgagctaggaaggcaaaatatacactgagctgatatttgtgcatatggtggcttgaaaattcacacaccttacttctcaggtgcctgagtaaatgcaatccctttattttgtctctgaaaccgatcctgtcttcctcatgggcccccaatcagggatgtgggagatgagtggaaaataacaaaattttctttctgattaagcctrttctggtccaatcccttgggcagtcctctagggaatgctcactttctagtactgctggccccaccctctggaagacagtgtctgagctgccctgcatgggtaggtggaagggtggctagttcctgtgtcctgaaagggaagcaggcaaagctctcctgtcctctcagtttcccttagcttgctccaccacaatcccggcattgcaaaacgtgragtcaggacctacgtgcccctctcaccctgactctgtctccgtcaccttcctcctcccagtagctctgagcagggaaggctgtgtccacttgtccacaccctcacacctgtttgctttcagattgtgcagagataagattctctgatctaagaagaaaggaacatagaaaactctctcaacaaagccagactgtaaggttattgtcctgcttaaacaaatacaaaacctatttattttcatctgtttgctttccacagcacaacccttatctatgcctctctcacagtacaacccacattctggtgtctatgacatacaacctccttcccctcctccatcacgtacaaccccatccccatctccatcacgtaaaaccctatccctgccttcatcatgaacaaccccatctctgtctctatcacatacaaccccatccccatctccatcacctacaaccccatcccatttccatcatatatgactctacccccatctatatcatatacaaccccatccccatctccatcatatatgactctacccccatctatatcatatacaaccccatccccatctccatcacctacaatcccatccccatctctatcatatatgactctaccctcatctatatcagatacaacccatccccatctatatcacatacaaccacatccccatctccatcacgtacaaccccatccccgtctccatcatgtacaaccccatccccacctccatcgtgtacaaccccatccccgcttccatcacgtacaaccccatccccacctccatcacatacaaccccatccctatctctatcatgtacaaccccatccacatctccatcacatacaacctcatccctatctccatcatatacaactccatcctcatctccaaaacatacaaccccatccccacctccatcacatacaaccccatccccacctccatcacatgcaaccccatccccacctccattacatacaatcccatccccacctccatcacatacaaccccatccctacctctatcatatacaaccccttcctcatctctgttgcatacaattctcttcaccttatcaccatctcacccccgagatggaggtaaccctagtttcctgggcttctttagaaggtcccagaaacaaaaatggaaaaaaaaaaacccacattttttttcttaataattcactgtatctacactattggcaactgtacctgtttcctagggctgcaaatgaccacaaactgggcagcttaaaacaccacagctttactccctcagttctggaggccagaagtgtgcattcaaggtgtcgccagggctgcactcctctggaggtcctcccttgcctcttccagcttctggtggctcctggccatccttgccattccctgacctgtagatgcatcactccagtctctccctccgtcttcatgtggccatcttccctctatatctttccgtgtgtcctctcctcttcttataaggacaccagtcactggatttagggcccactctagtccagtatgaccttatcttagctaattatatctgcagtttccatgtgcacaaaattgcagggaacacgattcaacccactaaagcaatccattctttttccagcctgtccttttggccccccactccatggtctcccatttactgtccacaatcagcagtgaagcatagtcacttgactgggtgggtggtgtacacttgagaagagaaaggtttcaaatgagattttagtggcaggacaatgatagggaggttgtccctctcctggaagttatgcctacttctgtgctaagcaaaatctgtccagagagtggaattcagtgcagccaagtctattccttgtcaccagcccaggcttccagaccctgcagtcagcaccagccacttcagaatgttctgatgaagaccaacccatgcctgagtggaatgttctgctatctccttatgaagaggcagggactgaagagttccttaagtttatggtcagatttagaccctgaactagaaatttaagagatgaaggagtaaatggttctcatgatggttattttcccacccaaccccatcagtttgatggtaaatgtgaaagcacttgtttttaaatcatcactttaaaaaaaaatgccccaaatcgcaaggcagtatcaaaatacctgtgctgactcagaaagataatttttcaagcatcagcagaaaggggaacttacagaatttgcaattttacctcctgccctacctcccaccccaaccccagttctgcaaatgtggtagaggcagtcaattggagggggcgggggaatataatttttcacgtttctgtcttgcctcattaatctaattcctttcaacaaatattgacagacactgtgtttcttctgcgcattccaagatgaatcagacctagtgtctgtcccaacccagctcacagaataacaccccagctgggcaaacaaatgactatatgtaaaggctagcacagagacagaaataacttgctacagtagaaataatctacttgggggagaagagaagggacaagtgtatcaaggaaagatacagaatcaatatatttgctgctgatgcatgtacattcattaattcctttattcaacaaatacttgttgaaagccgtctatgttcctggccttgtcctagcttctaaggaaaacatcgccagacaaagtctctgtcttcttgaaacttacattctgtgtagggaggtggtcaagacttagggtcggcaggtgttctataaggagacaaggttgttaatgatctagaaagaaagctatggcagtggcccagatgaaattatgaagcctgggctaccgtggtggctgggggaatggagagtgggttgattgtgtcccgcaaaaataggttcaagttctaacccttggtacctgagaatgtgactttacttgggagtaggtttttacaaatataatcacattaaaatgaggtcatactggattacagtgggcccgaatccagtgactgttgtcttcatgggaagagaaaaatttgaacacagagacacagagggaagaaggccatgtgatgatggaggcagagattggattaatgttggctccaaaccaaggaacccccaagggcttctggccaccactggagctaggccagaagtatgggatggcttctctctcagacctccagggaaaaccaatactgccaactgtctgctgatttcagactgtgcctcctcaattgtgagaaaataaatgtctgatgcttgaaggcaccccggttttgggtgctttgttatggcagcccttggaatttaatacagagaggaaagttccattgcagaagacactgcggaattagaacagacaggatttgggaatgggttagacacagggcctgaagaatgcttcagcaaccaccctcaggactccagctcagggaatttcactacaaataggctcagtgagggatggagactgcttgctccagtacttgatacaccaagtaagtgcttaataaatgttgatatgtttaggctttgtgtccccacccaaatctcatcttgaattgtaatccctataatccccacgcatcaagggagagaccaggtggaggtaattgaacaatgggggcggtttctcccaagctgttctcatgatagtgacttctcacgagatctgatggttttctaagggcctgttccctgcttcacttggcatttctccttcctgctgccttgtgaagaaggtgccttgcttccccttcaccttctgccgtgattgtaagctttctgaggcttccccagccatgctgaactgtgagtcatattaaatcctttcctttataaattacccagtctcgagcagttggggttttttttttggtttttttttttttttttttttttttttttgagacagagtctcactctgtcactcaggctagagtgcagtggcatgatcttggctcactgaaacctctgcctcccaggttcaagcgattctcctgcctcagcctcctgagtacctgggaatacaggtgtgcgccacaaagcctggctaattttgtattttcagtaaaggcgggatttccccatgttggccaggctggtctcaaactcctgacctcaagtgatccgctgcctcggcctcccaaaatgctgggattacaggcatgagcctctgtgcccaccctcaggcagttctttacggcagtatgaaaacagactaatacaaacgtgttagctcagctatcgtctttggggctggaatgatggacattcgtgtggatgcttctcagggtagatctatgtggaagacaaaggcagtctgcccagcacagagttggttcagaatggtaagaaatctgccactcttgtctctctgactgcaggggtttggagaagaaaactaggcaccatggttgctggtagtgtgatgggcttcagagttcatttctcattccctgtcactaaaggccacatcctgatccaccagccctgatcataagacagacagtagcatcgcggagtgggcactgacctgcaggtgctcctccttccaccccatgggggatgtcccctccctggcagcctgccaagggtccccagcctctaattctcttgaggatcttgcctaggatccccgagatcagtgtgtcttgtgcttcagttggtcctttcgaccagccgtgaagtaacaggcttctctgccctcccttttctcaggtctggagattcaaaggatctggcctgggggttaacaagcctgtttatgcccatcattggaaccagcttgatatggtttggctgtgtccccacccaaatcttatcttgaattgtagctcccataatccccatgtattgtgggagggaccccatgggaggtaattgaatcatgggggcgggttttcctgtgctgttctcatgatagtgaataagtctcacaagatctaatggttttataaaggggagttctttgcacaccctctcttattgccgccatgtaacatatggctttgctcctccttcgccttctgccataattgtgaggtcttcttagccatgtgtaacagtgagtccattaaacccagtctcgggtatctgttcatagcagtatgaaaatggactaatacacagctcaacaggcatatggcagggtctgcctggtacaatcttaacacacaacacttcaagagggtgggaacacagaaaactgcaagttcgagttgttcgagtaacaactggttaagccagagcctcttcttaacaattagattcattccatatgtggatttggaagtaattaacctgcacttctttaaaatatgttaaaattcacattttcaggagtacagtaactagcttaggtgagataacactgagattcgaatcatatctaggtacccacaatggctaagtctaatcatttcttggttattatcctgattttctcttctttgtcaatgtataatatcacaaaagagcaaaggtaagcactgagcaattcagacttgttccaagctgtccgaagggaaagaattctcatgtctgactttgaatagcaccattattaaccaatattactatttattgaattgttataaagtctacctactctggaaatgtccttgccaaccaggtgctaagtgtaccctttatcatctggtgggaagttgcaggccagctttgccttgcacactcctggagaatgggaggggcatgcatgaggcccgaagaaccccaaccatttcagtggagatgctggtggcccaacatggtgaacactgtctcatccccctgccctgagagtaggctctgctacttgtacatggttctaactgtgaaggccctgggccttttaaaaactttttttgagacagagtcttgctctgtcacccaggctggagtgcagtggcacaatctcgtctcactgcaacctctgcctccccggttcaagcgattctcctgcctcagcctcccaagtagctgggattacaggcacccgacaccacgcctggctaatttttgtatttttagtagagacgaggtttcaccatgttagccaggctggtctcaaactcctgacctcaagtgatccaccagcctcggcctcccaaagtgctgggattacaggtttgagccaccacgcccagccttaaaaactgtcttttaaagctattcattaatttattggactagatctcacacacacacacacacgcacacacaattcatgaggtatgcagtgaacaggtatatagtaaaaattgtgtctctccacccagttactcagtcaccttcaccagaggccaccactgttatcgacagttattttagttttgaggagagctaaggaactcagacctaaaatggaattagggaagctatttaacctcatcgatagagacagagcctggagtcagcagcctgcattcaaagcaaggcttcgccgcttcctgacgtagagcctggctgacaggctttatctcacagggctgttgagataatgaaatgagccagccgctgcaaagtgcttagcccaggcaccgtgcatttctaccttcaatacgtgtcagctgttattagctacggggtggtggagctggtggaggaaggtgggagggaagggtggggcatatttaatcctttctggggaaagccctaagccctcattataccaagggtagaaatccctaggaatctgttagaaatgcatggtctcaggctcctccccagactcgctgaatcttgacaaactccccagaagagaagcactgtcctgtatgaacctagagcccctgagggctgggccactgtcctgtgtgaacctggagtccctgagggctgggctgtggcatccctgccccaggggagacggtgctgctgtctcttcattgcagacatgagcccttagactttgcatgatgaaagctcatgacaaacgctacctactcccgagcccccagcttcctattccacataagatctcctaagcccaataacctgtgacctcacagatgaatggaacatgtcctctttcgtcctgtagctccacggtaacctgagagatggcctggaggcagggtggcatgttgtttttaaagtgatacaagagacacagtggagaccgtccaatgagtggcatggctgccaggatgccaactgggacactaaagccctggcagtgggggctgcccagcagggctggccactagaaataaggtctgtgagggttgagggccgagaggctggaggggctcatgggtgaccagtgctgctgtttgccacttgttctaaaccagcagaccatggctaagaacactgccatacaggaagccgcccttcctctagggcagaatcacacatgatggtgggggaggcgtgtcattagacatcgtccaaacccacagaatgggcaccaccgagagggaaccctcatgtaaatcatgggctttgggtgatggtgatgtgtcaatgtaggtttaccgattgtgacaaatgcagtctctgatgccgtgtagatagtaggggaggctgtgcatttgtgggagcaggacatatatgggaaatctctgtacttcctgctcaatttctctgtgaacctaaaagtgctctaaaaaagtctattaaagagaaaaagaattatatataagaattacgtataaactatagtgtgtgtgtatatatatacacatatatatacgtgtgtgtgtgtgtgtgtgtatatatatatatttatattttgtcattggattgtatttatagtttgtcattggatcagctgtaaaagaggaaagaaaaccaacattgaggcccagggcaatagcttttaaaaaattacaatagagctgagtacatgcagtcccagctactggggaggctgaggtgggaggattccttgagctcaggagcttccaggctgcagtgagctatgatcacaccactgcactgcagcctggatgacaaaacgagatcccgtctctaaaatatataaaaataatcacaatgacaacagaaatcacttagagctggactatccaacctgggagctttgagccacatgtggttagtgaggcttgaaatatgcctagtttgaaggaggaactgaatttttaattttaattaatgtgcatgtaaatttaaaagctgatatatgtgatattgttagggagaaattttaataggtttggaacaatttggatatgtgaatctacccttccaaattaatttcatgaactctaaatacagatcaagtatttccaaagaataattagcatccaaattgagatatgctatgaatggaaaatatacaccagagtttggagacttaataccaaaaaaatgtaaaatatctcattaacaatttttatatttacatattgaaatatttggttatactgagttagtaaaatatattattaaagttcacttcacctgtatctttgtactttttaaaaatttggcttccaaaaaaagtaaaagacgtaagtgtcttaccatcatacactgctggtaggaatgtaaaatggcatagctgctttgaaaaccagtgtgatgattcctcaaaaggttacacatcgagttacccagcaattccactcttaggtacttacccaagataatttgaaaacatatgcccacaaaatgatctcgcacataaatgttcatagcagcattactcgtaatggccacacagtggaaaccacccaaatgtccattaactgatacatgactaaaaccaaacctggtgtgcccataaaatggaatattatctggccataaaaaggagtattgatagattctcccacatgggtgacccttggaaacattacactaaatgaaagaagccagacacacaaaagccatctactgtatgattacgtttatacaaaatgtccagaacaggcaaatctattcaagacagaaagtatagtaggatttgccaggggctgggggaagaaggggagaggaagtgactgttaataagtatgggtttctttcaggtataatgaaagtgttctgaaattaaatagtggtaatggttggttgcacaatttgtgattgtacttacaaaaaattacatacttggcttgcattaaatttctattggacagcactaattttaatgagataactattttctttcccaactgtgattagtgatggtatataatctagccaaagctaatcaacgtggggtgatttttgcccccatccccaccccatgggacctgtggcagtgtctggagacatttttgatagccacaactggggttggggtgaggggaagagatcgctactggccggggatgctgctaaacatcctacaacccacaggcagctgcccggaacaaagaattatctggcccacaatattgtagtgtggaggttgagaaaccctgcactaaaggctgctcagaggatccctgccccagctacaacatcctttgccccagctacaacatcctttgctccatctctgctgctttgacttcccaggggtctgattcagggtgtggccttctcagaagactttctcctggagtccaccccatcacagtcctcaggccaggaactcctagtgattctgtggacttggaaacttcctaagaagaatcctgaaagggcccggggattctatagttgattggctatggagtctctgactcaggcctgaccttctgaggcttcttgagtccccaagtgtgatactctccacaaagctggcttcatgccaggtagattgccatttttcttgttgttttctcttccacgtcagattttctaagccaaagacaactggaatttgcacagtctgcgtgaggaatgggctgcttctctgacacctgaagtaaaaacccaaccagggatatccagacttgccttcaagcatgttattttgaaattacctactctgtctgtttctgataactgctgtaacaaatgaccacaaatttagtggctcagaacaacatagatttattactttacagttcgggaggtcagaagtccaacatgaatctcactgggctacaattaaggtgtcaggagggccatgtccttctggaggctacagaggagtgacgtggtttggctgtgtccccacccaaatctcatcttgaattgtaactcccacaattcccacatgtcatgggagggacccagtgggaggtgactgaattatgggggcagttctttcccgcaccgttctcatgatagtgaatgagtctcacaagatctgatggttttgaaaacaggagtttccctgcagaagcactccctttgcctgctgccatccatgtaagacataacttgctcctccttgccttctcccatgattgtgaggcctgctcagccatgtggaactatgtatccattaaacctcttttcttcccattcttgggtatgtctttatcagcagcatgaaaactaatacagggagagaatcccctctgtccagcttctgcagttggcctgcatcccttggcacatggtcctttctcgaccttcaaagccagcacagtagcatcttcaaatccttctctgaccgatgctcctgtctccctcttccacttataaggacccttgagaccaagtgggaccacctgggtcaaagataatttccccatgtcagggttgataacctcaatcacatctgcaaagtcccttttgccataattcacttcagtaacatattcacaggttctgagaatcaggatgtggatgtctttggagggaattattctgcataccatactgttacgtgggcatgggcagtctacttcaggggggcagggtcacttaggcacactctgctgcctttgttccatagggaaaagaaatagggtatttttgtttttccagagttggagaatttgcccaatctgagttctcaggtagttagatgctgactttccagatctaattctcagcaggcctatgccccagaatggccagtgagagatttacttttccatttttatatctttgaatagcttcaagtgaattactgtgattgagattttttttattatttgggattacaatgcttctgaagttgtcacacttgctgagtttaaatcccctctaacaggtaaacctatcagattacatgacagtgttcaacttaacatttattgagatctgtcagataccgtatgtgcccaagaaagctcagcagtgacccacaaggaatataaaatctagcaggggagataaagaagtatactgccaatctaaccccagtgtgatgtgcagcaaaggctctaaagtcagtaaaatagctttaggactctactggggagggtgtgaggaagggctggatggttatgcgaggatgctgaaatattgaaagggtgatgaaataagccacattggaacactgggccttcaggaatgggccagaatcctttaaggtcaaatctaaaaaggggttgtcctcagtgtcctggaggacaggaaaacaaaccttaatggtaggcattaggaaattgtcttaaagatcccgcccccaaaagcagaccctgagacaagaaagtggatgcagttagtttattcaggagatgatcccagaaaacatggggagaaagggggaatataagatggaagcaaaaaccaccaggaaatgggaatgaatgaatgactgtgggctgctgtggacaacaggggcctgatcactggggatcctctaaagaatcgtgtgatgaatgtcttagactcactccacaggaagctacggagtctgggacactgtctaccaactcccacccccattggtggaggactttcctgacttccagatccactttctggtgtggccaagcaacctcccagctcatgaagttctcaggctgtgggagctgtcaggtggtggaaacttcacctgcagctgcagggaacctaggtggactgagtagctatggggcagggcattatcagcacctgccttgggagtaattgagtactttcaacaatctggatgctggggccaatccatggggttctttcccctgagttattctgactacactcagtcagcattcagtgatcatcctcaccttcacccgcttcaatttgtgctgtgttgatctgattttcttatggagcttgagttccagttttgtcacttacagatagaggtgccctgggcatgttaattaacctctttgagcgttatgggccagctcacagttttgttacatggactaccagaaatgccaaatgttggacattaatatagtacttggaacacacaaatattcaataaacagttatgattttgtggatgatggcaacacttctgtttctctctaccatcagtgcagacttttgacctatagaagttgagatgatgatctaaaaatttacctccaagatggtttcattttcagtctttttaactatagaactgactgatgtaatttgtgacatactgcttatttttggtaagtaacaattccatttcagaaaaatgccttactgaagtgtcagttggtgtcgtgccataagcacaatatcagcatcattcaaaagaacctagagcctcccagtgaataggctaacctctggtataaattaggtacacatggaagctatttttgactacagggatgccctttagtggttcactacatttatgtaccaaatggctcccaaattacctggagctgtggatgtaatttctgagggtgaatttatgtctcagctcaggctgctatcacaaagggccgtatattgggtggcttaaataagagacatttatttcttctagttatggaagctgggaagtccaagacaaggtgctgctgattgagttcttggtgagggttctcttcctgacttgcaggtggctgccttctcgttgtgtcctcagatggcagaaagaagagaggaagcaagctctctggtgtctctccttacaagggttctaatctggtcatggggccccagcctcatgacctcatctaaacccgattacttcccacagactccacctgctaatagtatcacattggaggttaggacttggacatataaatttttaggggttacaaacattagcccatagcaccttaggattacagagtgatgctccccctgggggaatttggcagctcatataatacagtcttaccatatatggtcctagaaatataagaaaggaaatgatatccatatctattggctcaattttttttacaacactcatttttagagcccttggacttttgaggggctcctatctagcatctaactttcaatatctgctcatgatcacactattccctcagtgatcaaagaaaaacattctcttgctggcttttcgtctcttaaaggatttttaaaagctgtagtattataatatgcatcctatttttccagtaaaacagagtggagctcatgttgtgaaacagctagaaagggggaacagagacattttgtttttaaaaccatgaaatgtattgtcagttaccttaggtaagagtgaaagaagtgactttgagactgactcatttaggctagaattggtgtgaggtataagggcattaagctgagaaaatgaccaggactgtagctttggttctgccaataaacaaatggtgtgaccacaggcaaagagattactctttctctcatgaacctgtaagtttctcaagggaagaaacaacatatatattgctttgtaaattgtttccaagcatttaaaaaatatctttaaatattttcaaggcatgatttttaatgcctgcatagtccaaagaatattgtaccataatatattttaccattcctccattgttagattgttctcagtgtttcattattgtgaaccatgctacaatgaaaagactcttgtcccgatggctctatttatacttctgataattttattaggctaattacagggccaaaatttacatgttaaaggattagtaaatatcaccaatttgacatccagaagggttgtactaatttgcactcttgccagcagtgtaagagaaaaatctgtttccatacagtcttattagcatgaagtatcatcacattaagaacaatctctgaaaattgagaaaggaaggaaaggaggaaggcagaaaggaatggagttgataagtttatgatgaatttcatgaattgcgtatttgatgtctttgttcttttttttttttttttgagatggagtttcgctcttgtcgcccaggctggagtgcagtggtgcgatctcagctcgctgcagcctctgcctccctggttcaagcgattctcctgcctcagcctcccacatagctgggattacagacatgcgctaccacacccagctaattttgtatttttagtagagatggggtttctccatgttggtcaggctggtctccaactcccgacctcaggtgattcgcccacctcggcctctcaaagtgctgggattacaggcatgacccaccacacctggccctgttcattttttattaagctattcatcttttcttacatcactttctttgtacatcacaagtgcttttctaagtttttatttgtttttaatatcagtttatggtgggggtttttgtgcaaaattcttacatcatcaggttttttttttttcctttttgcttagacagactttccttaccatgaaagccacagtctcttccactttgtttgatatttattttggcagctgatgtaaaattagggattcacaggacctcactgcctcggaaattaacagatcttcatgtttgaccccttcagtttacactgaggaaagaggcccaaagagaggaaaggaaattacccaaggatatacagttggttaatggcagaaccagaactaaaatctagctcccagtttatgtcttccttttttaaaaaaaatttttttaaaagttttcaatattatcagtaaaaataatttccttaaacatttaaaaacattaatcacccctccaaatgttaggttccttgcttccctctccagagttaatcctatcatttgaatgtattcttccagatctaaaaaataattttatgtgtttatatatgtatatacaaataacatatactactatggaatggttggggggcataaattgtatcgtattgtatgtattattcttcagtgtacctttctaattctatgttgttttgaagcatccatcatttgagcaggccacattttatttagccagttacccatgaacatttccttagaaacgtttccttagaaataattctacaacacacatgatgtcacatgcttccttgggccttcatgcaagcttctctcaagagtcgatattgagaagtgaaactgctgcatcatggctaatgcccttttcagttttaagagattttaagagatttttaaagagattttgccaaattaatcttactggcaatgtacccatttccttataatatcagcttggtactgtacttttaatttttttatctatctgatgaaagatgttatatctttaaaatttgtattttcctaattactcataaggttgagcaacttcttgcatatttattgaccatttatctcttccataaactttgtatatatttaccttttaaaaataattcaattgttacggatgttttatctatttgatttttatataccctggaaattaatctttgtctattacaatgtcctacataaaaagtgtatcactttaattttcttagtggtatttttgttctatagaaaaattttaatttgatgtaatcaaaattattgatatttctcttttttgttccttccttccttccttccttccttccttccttccttcctttctttctttctttcttcctttcttcctttctttctcttttttgagatggagtcttgctctgtcacccaggctggagtgcagtggtgcaacctctgcctcccggattcaagcaattcttctgcctcagcctcccgagtagctgggactacaggcgtgcaccaccacgccccggctaatttttgtatttttagtagagatgggatttcaccatattggccaggctggtctaggactcctgacctcatgatccacctgcctcgggctcccaaagtgctgggattataggcgtgagccactgcaccaggcctattattttcccaagaagatcttatatctctcaagatcatgaaaatcattttgaaaaattttttcagtactttatagttttttaaaaattttaactcagagatcaaataacatcagtttattgggggtccattgtaaggtactgatatcttttccatatggtggctaattgtgtcagcattgaagcacttgtctcttccctacaagttgaaagactatttctatccataaaccaaattccagtattggattctgtactctttcctcagtttggtttatctacttatgtacggcaactcccacactatctcatgaccacagctttatcatttgtcttgatatatgattgggttagttcaatgctttttccatctcctttcagagatgcaaattcatcttctatcatagccaaagaagaccaacaaagaccaacagaggccatgtctcgcattcagctccaacagcaggcagtagatttgttacagagactaaaacccaccttattgccaagtgaccctcctctcaccagcctcccctgctgccacccaaattcctgccactgaactactcctcaaaataaaacacagctgtaaaatgcacacctgttttggattagttacaataaatcaggatctgtacttatttcagttccccagacaggtgaagaacaagctgcgtttatagcaagccaactagaaagcagaagaaaattccagtcacgagtttttgtttttcctcttagggcaaaggaggttacacttgaggagcctaaatttcttgttgtttccaaactcctgtgagtctttacagaaatgcctctaaaagttgtagtattctctctctagatccatctaactgagcccatggtttccaaactttaatgcccaagagaatcctcagaccgcatattaaaaatgcaggttcaggcctgcatttatttctcagacagcatattaaaaatgcaggttcaggcctgcatttatttctcagacagcatattaaaaatgcaggttcaggcctgcatattttttcacggtggctcatgtctataatcccagcactttgggaggccgaagcaggcagatcacctgaggtcaggagttcgagaccagtgtggccaacatgacgaaaccctgtctctacttaaaaaaaaaaaaggccgggcgtgatggcaggcccctgaggtcccaactactcggaaggctgagacaagagaatcgcttgaacctgggaggcggaggttgcagtgagccgagattgcgccactgcagtccagcctgggtgacagagcaagactctgcctcaaaattaataaaaatgcaggttcagcaagtctgtggtaaaacttagggacctatgttgtttttttaaacacgcacctcatcaggtgattccaatgcaaatagtccaggccctcactttaagacactgccctggggactccaagcagagtagaaccacctgaacacgagacatccaaatccttagtgcaggctgtttgccaggacatgtttctgtaatgagttagctctgtgagatcggtctacaagagaatgatgtcagtataaccaacacgtggcattggttcatacgcagtttttctttggcaaagggaaccagaatagctggaataaattacagaaaattgagcaggaaaacaagcctttgactcagcctctgcattggcagcaggggccctattaagttgtattttaacagaatttcaaatgcagcctgccctcagtggtcctctctcctaagaagcaaactccaagcccgtgtgtctaagggcaggttgagtggcgcccccagacccactttaacagcagctttgctggctcagagacccacttctgtctttgaggtctccgcaccctcaagctggctccatctgaaagatctccagcatctccactctgttgtgtgtttttaatatctgccatggtggcctcctgccagcctgggccacctccctgggcagtccaagtgagtttcccgggcacatgttttgattttattagtttctggtttcaaaatggtctgtttcctaagtgacctcttggggatgctaattttccccaaagcccttacactttaagggtgtgatttttcagaatgtgaggtgtttctgggatgcatatatggcactaggacaggaacgccttatgtgtgaagaatacccattgcctctgtttgaaaagtgctattgaataacctgatgctgtgttccttggctaagattgtgggaaatcacgggcaaggactcccgaatccccaagaaagtacatcacaagctgtatagcctttagctctctgcagccctactcaggggaggtggaacttggaaccccccaggatttagctccatatgggctccaggactctcaaccacagctgtgcctcagttacccagggtcagctggagcttccataaggcacgcacgcctgagctctaccctcgatctattgaaataaggacctccggggtggggcttgtatgtctgtatacagttagcctctgtatccgtgggttttaaatttgtggattcaaccaatcatggacccaagagatttggggaaaaattgcatctttactgaatgtgtacagacttttaaaattgttactctcagcaatagagtataacaactattcacgtagcatttacattgtattaggtgttataagtaattggagatgatttgaagtgaacaggaggatgtatataagttatttgcaaatactatgccattttatatcagagacatgagcatcctcagattttggtatctgaggggggtcctggaaccaatcccctacagataccaagagacaagtctatttagaagttacaggctgggcacagtggctcacacctgtaatcccagcactttgggaggccaaggcaagagaatcacttggggccaggagttcgagaccatcctgggcaacatggcaaaaccccatctctactaaaaatagaaaaattagccaggtgtagtggcatgtgcctgtagtctcagctgctcgtgagcctgaggtgggaggatcacctgaggtccaggctgtagtaagcagtaaccaggccactgcactccaacctgggtgacagagacccagtcttgggggggagaaaaagtttccatatgattgtgtagctcagccaaggctctcaaccttggaagtatagagaatcacctgggagcttttagagcttccaacgcccacactgcagaccaaatcacatcagaatgtctgagggcaaaacccaggcagctgaatgttctaaagctcccaggtgattccatgcatagctagggttgagggcttggctttggggtcttttctaatctgagaaggatcctatactctgtggactggggctattggaacttcagtgtgtgtatgaatctcctacgagtctggttgagaatgcagattctgattcagtaggactggaacagggcttctgagcctgcatttctaaccagctggtccgcggactacaccaagagttgcacaactgcaggcactaatgactctttattgattatttaaccctgactgaggataataactgtagtaagccaggacattaaactgcaggtccaggacagttaatggtatttggcagaagtggcacagcaggctttgtgattaaaaagaaaacaaatgtttgtgttcctccctgggtcagctaaggaatggtactgacaagaggcatgctggccacactctaagagatgagtgactagaaacctccgcccttctggctgggcgcggtggctcatgcctgtaatcccagcgctttgggaggctgaggtgggcggatcacaatgtcaggaggtcaagaccgtcctggctaacatggtgaaaccccgtctctactaaaaatacaaaaaattagccgggtgtggtggcgggtgcctgtaatcccagctactcggaaggccgaggcaggagaattgcttgaacccaggaggcggaggttgcagtgagccgagattgcgccattgcactccagcctgggtgacagagcgagactccgtctcaaaaaaaaaaaaaaaaagaaaagaaaaacctccgcccttcccatcatcggctaagatctggcttatcagccctctggagtcattgttttaatagtttttattttgggagaatacaattgagtatgcaaatgaactcaagatctcaggtggttcttaaatccgagcactgtattacaagatggtttagatcagctgccttgtatttttctatgccctaaaaacatttactagagccctgtgatgtgccctgcctgttactggatggccatgcagattttcaggctgctgcatactctgcctgtaccacctgcctagtaactagcctgaacttagattaacatgaagtttcataccacatcagctcaaatctgcttagcatagaagaagtaaattttctgctgatacttaaaacacaactgggaattagtgggctatggtggcagtttgccacctttgaaggcatgaactctcaaggtgtgaatacatacatcatttagtaggaactattggacttgcacgtcaaggcctctgtctctaggtctctctctcacccccggctttctgtttaaatcagtcaatcctcatattgtgggcaaatccaggaaagacggcacatctagacttgctcattctttccaaatagcacataatagtcctattgattaactaaatgcctcttagaaaccaaaacacccttggtttcttcaacctttagttcagctgggtttgatcatctgttcagtcctacaggctgatgggggcacctctttcctggctatacgcccagctcgtggctgcaaggctgatgttttcctggccactggtaaaatccctggcaagaaagtgaccagaagctttcctctgacctcaaagaggagatgagaccctgacatctttctttttttttctttttttgagacagagtctcgctctgtggcccatgctggagtggtgcgatatcagctcactgcaacctccacctcccacgttcaagcaattctcctacctcagcctcccaagtagctgggattacaggcaagcgccaccatgcctggctaatttttgtatttttagtagagacagggattcaccatgttggccaggctggtcttgaactcctggctcaagtgattcacccacctcagcctcccaaaatgctgcgactacaggtgtgagccaccgcacttggcaaaccttgagaacttactgggtgcctggcactatgctaagttctctttttaaacatagttacaaagtcttatcaataagtcgtgctagaaaaattgaacatccacaggaaaaaaaaaaaaaaaaagaaccttaacctaaacctcatactttctacaaaaatcaactcaaaatggatcattggcttcaaatctaaaacataaagctataaaacctagaaaaagaccatagcagaaagaaaatcttcaggatccagggaaaggcaaagagttttagacttgacaccaaaagcaaaatccataaaaggaaaaactgaccattagacctcatcaatatgaaaagttttgctttgtgagagcccacgtaaagaagataaaaagacaaattacagactaggagaaaatatttggaaatctttaggaggccgaggtgggcagatcacaaggtcaggagttcgagaccagcctggccaaaacagtgaaaccccgtctctactaaaaatccaaaaattagccaggtgtggtggcaggcgcctgtaatcccagctacttgggaggctgaggcaggagaatcgcttgaacctgggaggcggaggttgcagtcagccaagatcgtgccactgtactccagcctaggtgacagaggtagactccatctcaaaaaaaaaaaaaaaaaaaaaaaggtgtgtaaaccaacaaaggactagtctctagaatgcatatagaagtctcaaaattcaaccataaaataacagtccagttaggaaatggacttaacagacatttccccaaagaaaatatacaactggcaaataaatacatttaaaaatgttcaaaattgttaaccattagggaaatgcaaattaaaagctacaatgggatatcaccacacacatatcagaaagtccagaatcaaaaataatgacaataccaaatgctggtgcagatgtggcgtaactgggccctcatacattgctgatgggaatgtaaaaaggtacagcatctctggaaaacagctggacagtttcattacaaactaaatatgcaagccccatatgactcagcaatgactgtcctgggcatgggtcccatagaaatgaagacttatgttcacataaaagtctgtatataaatgttttagccatgagagcaaaaaactggaatcagcccaaatgttcttcaaccagtgaaagactaagcgaactgcgtggaatactactcagcaataagaaggaatgaacttttgatacacacaagttgaatgaatctccgggaattctgctgaaaaaaaaactcaaaaacttgtatactgtatgattccatttatgtaacatgtttgaaatgacaaaattttagaattggaggacaaagtagtggttgccaggggctaccaaagggagagggcaggaaggaggtatgcatggttattaagggtaatgcaagggatctttgtggtaatggaattgttccgtatcttgactctggtagtggatacaggaacctacgtaggtgataaatgtctgtagatcttaatacacacatacgagtacaactggggaaatccaaattacatcagtagattgtatcaatgtcaatatcctggttatgacattataccattgttttgtaaaatgtcaccattgagggaacctgggcaaagtgtactgtcatctctctctatttcttacaactgcatgtgaatgtacaattatctcagtaaacatttcaattaaaaaacatgtaataaaaccgtttgtaaatggtatctagatctgctaatgaattctcttaaaaacattatacttagtgtattctgttgctttatgtttaattttaaattgagcattaagggaatgcagcattatatatgtatatgtgtatatatatgtgtatatatgtatatatatgtgtatatgtgtgtatatatgtgtatatatgtatatatgtgtatatatatgtatatatgtgtatatatgtatatatgtgtgtatatatatgtgtgtatatatgtatatatgtgtatatatatgtatatatatatgtgtgtgtatatatatatgtgtgtgtatatatatatatgtgtgtatatatatatgttttttttttttcagagacagggtcttgctatgttgcccaggctggtcttgaactcctgggctcaagcgagtccaacggccttggattcccaaagtactgggattacaggcatgagcccctgcacctagccaggaatgcagtattttaattggaactctgccaacacttttatctagaggcatgttgccatttttgtcttcttttttttttttttttttttttttagtatttattgatcattcttgggtgtttctcagagagggggatgtggcagggtcataggataatagtggagagaaggtcagcagataaacatttttgtcttctataaaacttttgtcccaagaaagtcaggattacaaagaatgaggatgagaatgtcatgcgttgctctgaaagaagaaattgtagttagggatgagaaaagcaacttgaagcaccatgcaagatctcagtcttgaagcagcaggtaggctgagctagaaacaaggtgggcaaaggaattccagacagaaagatggaccatccaccacatgttttccaggtgaggaaaccagcttgtactcctgctttgcctctcagagatagacagaggcaaaaggcagaaaatcctgagtgctaggtgaatatgatagtatcttccttgatctaattagcaattttttggagataatgaagcactaataaagcaaagttatatgtaaatctccagcattcacaagagaacccaagtgcaagatttggatggtgctggttgcggcagctcacgcctataatcccagcacgttgggaggctgaggcggggcggatcacaaggtcaggagttcgagaccagcctgaccaacatggtgaaaccctgtctctactaaaaaaaaaaaaacaaaaatcagccgggtgtggtggggcgcacctgtaatcccagctactcaggaggctgaggcaggagaaccgcttgaacccaggaggcggaggttgcagtgagccaagatcatgccagtctgggcaacagagtgagactccatctcaaaaaaaaaaaaaaaaaaaaaagatttggatggtttagaacaggggtccccaacccccagccccaggccatggaccggtaactgtctgtctcctgttaggaactgggccacgcagcaggaggtgggtggcaggacatgaacccagttgtgaatggtgcatacaagggatctaggttgcacagtccttacgagaatctaatgcctgatgatctgaagtggaacagtttcatcctgaaaccatccccgccccgttccggctgtggaaaaattgtcttccgcaaaaccagtccctggtgccaaaatgtttggggactgctggtttgaaacaaaccaacccattcccagagccaaaagagtaactaataggaagcacgtcctattagcagagagttggcctcagcatcttttatgtgaaggcaaccaaagaatgtgctcaggaaaataaaggccataaagtggtggagaccaacgatcattagaatcacacctaactggctgggcatggtggctcacgcctgtaatcccagcactttgggaggccgaggcaggtggatcacctgaggtcgggagtttgagaccagcctgatcaacatggagaaaccccatgtctactaagaatacaaaattagccaggcatggtggcccatgtctgtcatcccagctaatcaggaggctgaggcaggagaatcacttgaacctggggggcagaggttgcggtgggccgagatcacaccattggcctgggcaacaagagtgaaacctcgtttcaaaaaaaaaaaaagaagaagaagaaagaaaatcacacctaactatacttggcatttactctagtattgtatggctacttatccagtcaataattgattgtctattacacggcaggcactactctagggacttgggttatatcagcgaacagaatacactgaacaaattcccttccatcacggagctcaattctgtgcttagtgctgattcctgatcaggaagattcttaattaccagagcccaagaacacatttccttactgtacacttgtgatcccatgaccccatacagaaatgcaactccctctggggcgaacctgggcagctgtgcaggagcacagacgcagcacttctgatttaagggtgaggatgatcttaccctagtgtggctgccgagaaacttaagatgggcaggctgtcaggccttgcctctgagttggatgaggaaagtgagctcaaaaccaaggtgaagagttggcagtgtgacccttgaagatgattcaagttagcctggggtaccctctctgttttccactcccaaactgggattaactttataatcttccataaatatagagaaactgggggctttccaatattagcctgggtaggtactatttcaagacaacagcaagatggccttgcattctaaaagagagaaagggagacaggaagtgaacatacctagagatgcatgtttaggcaggagatagtctacaatatggccttgttcttagaacattagagagatggagtttttctcagcatgctaaaaacggtatgcagatgaagagaaaatactaggaagtaaactgctggtcactgtttctgcaaaaaggcacctaaaggtaagtgaatcaggcaagactcaagaatgggcaaatttgaccgagcgtggtggctcatgcctgtaatcccagcactttgggaggctgaggtgggtggatcacctgaggtcaggagttcgagaccagcctgatcaatatggtgaaaccctgtctctactaaaaatatgaaaattagccaggtgtggtggcgggtgcctgtaatctcagctactcaggaggctgaggcaggagaatctcttgaatctgagaggcggaggttgcagtgagccgagatcgtaccattgctccagcccaggcaacaatagcaagactctgtctcaaaaaagataaaaggaaaaagagtgggcaaatttattgctatgactaccaacccaggattttaaccatttcaaatttttaggtccccataaacctcaaatgtctgagaataaatatttaaaatgtcttttgaatttgttatggagagagtcacctatctttttgtgaacagtattatttttaaaagttgaatttaattcccagtgacccccagtgcttctgtgtcatatctgtgatgatagttagccacttgctgtaaatttggctacattgtatacgtgtgtagaaaatacaggtatctcctacaactaaatagaaactttttgcgtgggtaaaagaatctcaaatatgccagtccctgtggcaaaattttcctgctttactcaaaggaaaataaacaccacagatagaaagatcgtatttctaactccaggctgcacggaactgctcttaaatgtacagcttccattcacatttctggttatcccttgagtgagaggtcagctctgctactgaccacagcaaagtgagaaaaggtctctccacttgcagaaaatgcaagcccttcggtttgctttctgaacaacagtgttcacggttctgaggtaattgccttagtcacaccacagcgcacaggttggaccttcagctgatacctggtggagtgggtatatagtgatgaatgtgtgtgtgagtgtgtaagcgagaccttccatagagtacatgagatagatgacctgggtcccagaaatggcccattttacttgactgacttgctagtaaacaagtgagccagggctctcgatctcagaattcagtttaggtcacaagctgaggatgacagagggggctcttccctccagctctttgaaatttggggcagatggatgagacagcaattgccttccacaatggtggatctaaaaccaatatcgtcagtaaataggtaaatagcccccttcccttccacttcttttgagctactttatcaccttcccccaccttcaataataaagtaatttgtccagtgaaacactttgagtggataaatgactgtaaaaaaagcacttagctgagcacggaagagcattttatgactagaaaaggaaatgccatgtttatcaacatgaaaaaattaacattgtcactttattttgtattaacatatggtcaaagcacctccctaagcttatcttgggcatgaaactgtggtcattggtgtgtgagctgctaagagacatgtgttaaataactggataggagaatctggttctcctgtgaaaagtaaaatataaatgtggcttttacctggccagtttggccagcagaacagaacaatttgctcaatcaacagttacctaaaatctggagatttttagattggcttttttatgactgggtctatagaaattcatgtgtcaatttttaatattttcacagagttaagtcactttgcattgggaatattttatctttggagtgtatctagtcttctataaaaataatactagttttctagtacaaaattgggaaaaaggggaatacaaagtatagtaaaaataacagacaaataagttttcttaggtatttatttacaaaactcaaatcttgcccatattacagcgtaagtccaaagctcatttgggaccctttgaaactgaaaatatcattaaaaatataagttatgtatcaagcacaacatcttttgtgcattgattattcctataaatttaattccatctctttacactcccaaatcagtaataagggaaaacaaatttatttcttggcagctttttttctcttagcctcttttatactctgttttaaacaaaataagacaaacatccaatcaaaaacatcccaccagtgaggcaacagttaatctgcctgctttccctagcatcacaaaaaaagtgaagtctacaagtctttcagacacactgaagtctttcattcataccacaaattctgattaaagccaagacctatcattttcaaagcacttccctgcaaatgactaaaaacaatgtttttttcccccttcttcctttaaaggctacacccaaaacatttgcttgagaaactttctgaatagtggcattgcctggtaaaacacatgcagcagacaaaatatcagatttctttttccagctgtccagaatcccattagtgcctcttaacttctatcagtcttttgctataattaggatggcttagggtttatctgggcctttttttcaaaaccagatttccttccgagcagcagcagctgtcatgcacaagtaccctgatggtgttgggaaacttattttgatttacattatggtatagcaattgtgaatgtgaagtaaaggaagagacacacacacacacacacacacacacacacacacacacggttctttttatctcgtaatttctttaaaagaaaagtcttacctgaggaggatcactccagtctggaacctggcttgtttcaaatagagtattaacttgcatgccttctcccttgcaatttgtgttgccttctttggagactgagtctgttgaagtttgaagggtttttgcttcttgctctgcctgggttgaaatagcacattctcttgcatcagcatgggaactccgaccagtcgctgctgctgtggtgtgagaagtctctcttttatcactctgggttagtgggggctcagcagattctttggcagagcagagatgaagggtaccttctgttgtactttctctcaggttggcattcggcttcttgggatttcccttcattcccggctgcctcaccctggcagatttccttgaacccctcttgctccataagtcctttccccccactctcttgtcagctgccgtctcccaacactggctcatccctgagttttctgactcaccagacaagagcttcatctctgtctctcttactgattcatccatgttgagcagattgtcactggcaaattcctctcttgcttggtggctgtctctggtttctccttgaattcctggataatcattttcagcagcctcgggagcagtggggagtttatatctcccctgttctgtcactgaagacgttccatcctggtgaggtcccaaaatgagagtcatccctgtttgtggggatgagggaccgtgcttggagactctgctgctcctcaccccaacttcttggggttgtgagtgatgaccacagaagccagcagtggcaaccataggcccagcgtcacccgacacccgagacccacaacccattccactgaggaaatgctcacacccacccaggcaatgctcaccgaattccatctcttcgtcatcgctttctaataaaaaaacatgctcagtccccagcaggttcctttgccaaactgcattagagtaatccgtcataacatcagaacattccagatactccaggtcatcatctgaaaactcctcggtgtaggttagggttatctctgggcaaagttcatagtcactgtcagagtcttcactggaaagctgtgggctgggttgtttgttggccacggcactgtcacctgggtaaatgtgtgcagttgcctcagatagcgggaggctgaagctaatgtatttctgtactttgggattttgctgactagagcgtaagccttcatcatgaggaccatcattgttcaggtcaccatccgtgaactttgatgccatggaatgcactgtcttgtggcaacatctgtcttgtttttcataaatatgacttgaattaagaaaaagcaacccatttgcaatttcttctgtgttacttggatcataagcctctccagtgtgccttgttcctttaacacccaaaggattttcagaactggacacactaatgtcaagattgcccaatgactggagggagagtgaatggttggatttggagggggaggagtcagctgacctgggagtgcccggggagatgctttcttcttccttataaggatgttccttctcatcaatctgatttgccctttcttcttcatgtgtccctgtttcatgtttccaacccctgtccctgtcatcttccaggttaggagacaattgtgggttctctgatgagcactcaacctcaacggaagcagaacaacagatcattccaaaagagtttttagccgagatttgatagacagcagcatcatttttggtacagctaggatgaagagaatatatagataagtttgccacatttggacatgcatgccaacattttcacaccatggcacacagagaaaatgaccatcattttactgcatgttcaaggagatctgtgatctccctggaaaagagtttgtggccaaaggcaactgacctctgggctccggtgcccctagtgctgagaatcctaggcaatcagcatcctcccttgaaactttcctcaacgctgcctcaaatggaaaatgctgaggattgcaccatgacagtttacaaatgccatggcagggtcaggacattaccttatatggtctaagagggggagaaaccctcagttccaagaattgcccacccctttcttggaaaactcatgaataattccaccccttatttagcatatcatcaagaaacaatcataaaaatgagcaaccagcagccctcaaggctgctctgcctatggagcagccattcttttattccttcactttcttaataaacttgttttcactttaaaaaaaaaaaaagaataaaatgctgagaattacttagatgaatggggaaaatgttttatattctaattttttcttcttgccttttacatcatttttatgttacgggaatttgaaaaagcatttttctagagtgagacattgtacacaaataagtaaaatacaattcttcatgtactggaatggcatagagaaccctcaaatcttttgaagaccttgctaagagggtgtcattcttgctagaggccgtaaagataataccatgataggactacgtatatgaaggacagtgctgtttcctttttaattgaatgtgactaaaagtctaaaccacagcccgtgagctccactggctggaaacccatgtccacaggccattctgactcacatagatcaagccaggttttcagctttggcccagcaggggaggaacagaatgctggatggaacgaagcctgctctctcagttcaggatggacgctgctcctgtggctcctcccatcattgttcagcatcacaaggagcctgcagcctgacatactttactgggtcctttcccactggaactcttctccagacactgcaatcccagtaaaaacttgttacctgtgttttgtatgttgcacccttattaatctcatttgaccgcattgtaattgtaatattgctgacctcactataagtatcagccagcccagaagtcaacaatcatttttagaaggcaggagctgtgggtctggcttggtctgagaggcaatgcttaggtctttattcactgttctttgtgtgaaatacacacaaatatctaacccaggaagggtcagtgtgagacacagatataatatggtcatcctttctcttccccactgaagggaccccttgcctccacaatcctatatgtcctcataaaccctcaagtgttgagtcccagctcacatatgtctcattttcagaaggcaaagacatctaatcccaatttcaataatgtcttgttgagttggcaatctggctcttgggtagaagccattcaggagcggctgagattggccaagcttgacccatggctgatactgggctttgccttggccaagagcacacatagaataaaatttaaggcaactttctggagaaaacaatacctgcgctcctgtctatttcactaagttattctgactttgcaaagaagaaatgttataccagacgaattcttcaagaagggggcagtaccgagacaaagatatctctggtgctgaagaatcatgcagaagaatcatcagagaactctgtttaaaattcttgaatcagaatccctaggtcaagggcctgagaatctgcttttaaagatctcaaagccattctgatgcaaattgtccttggcctacccttggagacagcctcatcctcatcactgtcaatcaggcttagggctccgccattcaagcggactcttctcagatgaagaaaaatgtctattgctgcagtttcatgtcatccagattgttggcgaaaaaaaaaaaaaactgtgaaatatttaaagagatttactttgagccaaatatgagtgaccatggctggggcacatcctcaaggggtcctgagaacaagtgcccgaggtagtcagttttacagtttggttttatacattttagggagacagaagttacaggcaaagcataaatcaatacgtataaggtgtacgttgattcagcccagaaagatgggacattttgaagtggggggtgggggcaagattataggtcataggtagattccaagattttctgattggtaattggtcagaagagttaagctttccctaaagagttgaagccagcagaaagaaattgttgagttaagataagtgggttgtggaagccaaggttcttgtatgtagaggcagcccctaagtagcaggcttcagagggaataaatggtaaatgtcctctctggaccttagaaggtgtcagattctctcctgaatcgggaaaagacctggaaagggaaggagaatcactacagaatgcagatttcctcccacaagagtatggctttgcagggccatttaaaaatatatcaaagaaatatatttttagagtcaaatactctgattttctttaggacctgctctttgtgatgtgatgctataccagaatcaggttggagttgggtatcttcctgctacagagtctgctgtgagtcttatgatctctattttaatgtcagtggtggtcagttatgcctaaactacaaagagaggagggtataatgaggcgcgtccaacacccttcctgtcatggcctgaactagttttttaggtttcttagggatccccttggccaaggggtgtgggggcagtggtgcagcttagaatttaatttttggtttacaacactgtcttcttcatgaaccttttcaattaattcttggagatttggcctccattaagcactgacagcataaaaaagcactacaagctgagcacagtggctcacacctgtaatcccagcacttcaggaggctgaagtgggagaatcagttgagcctatgagttcaagacctgcctgggaaacatggcaagactccatctctgtaaaaaatttaaaaattagccaggcatggtgatacacaccagtagtcccagctactccagcctggatggcagagcaagactttgtctcaaaaaaaaaaaaaaaaagaaagaaagaaaaaggcgggggggctgtggcagggtgggcaatagggactactgggaaatcccaagtaattttgatatcctgacctatccagtccatgagccctctgcagagaaaccacctcccctgaaggtaccatgacttgtgtagaagagagagaaaggaagaaaagaaaagaaggctgagaggcacaaggggcagtaaagcagtaagaaatcaggagaggtggggagcagagatgattctcaagaatcaaggagagaaaacaaaaagacttttagaaaaacatggagaaaatcattgagttaaatacactctatttaaattcttaacaactaaataaacagatgggagattgtcataattttgtgatgtataattttatgaaacatgttttagttgataagagatttataatccatcctaagtacagtcaatgaagagaaaagggaactggattaagtataattaacttctcactggctaatgagtgcctttgaaagagttatgatttgtggctgacacgtctttgctaattatctcgaagcatcctaaagaagaggggaagaaaatcgggcaaggaagccagcatctgctgggtgactcctacattaaacaatgtctgcctcctccctgtgggcaaaactgaggttgaaaggagttatttccccaaagtgacaaagctggaaagccatagagccgggataagaaagagccttctgccctggctgcctggctctgtggttgctgttagaaaactaacattaccagaaaggaaacgacacagtgtagagatcattctgcaaataaagtgtttctgtcctaagtcttcaatcttgatcagccaaatggcagacttgcatagagtaatgggcaccgtggtgcccagcattatgttaggagctgcagtggagtgaaggagacgcctgaaacatcatgtccagcccccaaatgactaaaaattgactgaaggaaatagtattactttcccagagaaccttgtagatcaggtctgtgctaaggtgtacagaacagactggatgggaaaaaggagttcagagaagggactccaatggtagcagttaaaatggtgttagtagggtcagggtgtagaatctttgcagcatgctggcagagagacctgtgtgccccacagtgatttgacaggaatgcaaaaccatccaggaagaaattccctgaacaattaattgaattccctccttgcatgtcttttcttttggcggagggaagcagtaacattcctctcccctgctgtgaaagtcttgcttgaattctctaggttctttataaattaatcatttccttattaaagaaaaagaggtccatgttaccttgaatgaagcttctgagtttgaacccccagaagtggtctaaaccagaatttctgaaaacattttggtttcaagactctttaacactcttaaaaataattgaggacttcaaagaacttttgtttatatgggttatatctgtcaatatttaccacattacaataaaaaatttttaactatttagttcattttaaaataacaagaataaattcattgcacattagcataaataatgtttttatggaaaacaaatatatttttccaaggcaaagcaacatttcataagagtagttttaaattttttcatatatctttaatatcaagcttaacagaagatggttggatttttgtatctgtgcattcagtgtgatacaatacatggttttgattaatatatgtagaaaaactggcctgacacatcaatgtattgggaaagaaggaatattttaataatcttttcatctgattgaaaatattcttatttgatatatacgaagattagttacaatgtggaatctgaaaccacatcagtgaactttccatacttgttatgtaaaatccaccattctatgttgctttttttttttttttttttttgagacggagtcttgctctgtctcccaggctggagtacagtggcaccaccttggctcactgcaacctccacctccagggttcaagtgattcttctgcctcagcctcccaagtagctgggactataggcatgcaccaccatggctggctaatttttgtatttttagtagagacgggatttcaccatgttggccaggctggtctcaaactcctgacctcaggtgatctgcctgccttggcctcccaaagtgctgggattacgggcatgagccacaatgcccagccctatattgcattttaagtgcatcttttacccatgcatgattttgtaacatcacacattggtcatttggaaaaacttggctcatgatatcttccaaatattaatacattttattaaataatactttttaaaaccacgttgtttaatattatcactgatcttatcagaataatttttaaatattataaactgttaagcttttgatgaagggcacaagctttccaaaattctacttagggaaataatatgaatgttaatttatcagagaacagtgtaaatcaaatctgtgctaagttgtatggtagaaagtagaagcatggaggatatgagctagaagttcagaggaaggatccctgaaaattctcacctctgtaaatgcaacaagaacactggcaaaacttgtctgaatcaactttttcagggctctgaaaattaaaggcaatctggggagcctttattcgagaaaaatggctgaatctcagtaagaacagttttctggtgctttaacctgccctagttctattcccccataaccagctccacagtagtcttgaaaaccaagactccacaaccacagtgaaaaccagtagcctggcagcagctggagggggcaggacccagttggggctccttcaaagccccatacccagagagttgtcattatttgacctgcctagtaattccctggaagaccccactcacaagactgtttttgtgtgatctgacttagagttcacccagcaaaaatatctttttccctaggggcatttgtaaaaaaaaaaaaaaattatacagacaattgtttaacaccatggctgcttgaggcagtagattacaattgggttaaacaatagggtaaccaaaaagcttaaaagggaaagctgggaatgagatgcccatggggtcattgaaaagctgagacattctcctggggatctaggaggccatgcacatgcataaggctgtgagcagccttcctaagcatgtccagtgcatgtgcttacgaaagacctgagaaaattctgagctcgcagctctaactgaccttaaggctctctactagcaggaagtgaaggctaaggcagagttgtcaattgcctggctgagtgtgaaagcatgcttcatacctcaacatgcacacacagcccctcaataaactgggagacccattggttccaggcatctaaggaaatctctgtccagtcattagctgaccactaagctaactcagtagaaacttcaggggtcacagacaacaaagaattagttcagaaaagtcactaagcaagcaaacaacaacaataagccctgggaatgtgggagaatctcatttccagagttgccacgttacattgtttaaaatgtccagttttcaacaaaaattatgtgacatgcaaagaaacataaagtattgcccatacacagaaaaagcaatcaatagaaactgtccctagacttgctaaacacaaactttatctattttaaatatgctgaaagaactaaagaaaaccatgtctaaagagctgaaaaaaagtatgagaatggtgtttcaataaagacatagaaattatacatacaaaccaaatagaaatttagagatttaaaattacagtaactgaaataaaaaattcacaaaagggctctacagcagatttgggcagatggaataagaatcagtgaacttgaagttggtcaattgagattatccaattttaggaacacaaagagaaaagaatgtagaaaattaaagagttctggagcctgatggtataccagcttacaatatatatataatgagagtccccataggagagaagatagagaaaaaaacagaaggaatattggaaaaaactggaagtccctagttcagagaagggactgcaatgatagcttgaaagtttggattttatcactggcaacaaatacttttagttttccttgaagtggcaggcttgttttgttcatttttcagaaaatgtctgccaaatacccaaggctgaataaccatcatttgtctgttattcttttgagtaaaaatgataatccataaaaacagtggctagttcagcttgcaacttaatcatgcaaaagcttgtcctcaagatgttcaccatctgaggaaatccagcagaggtgctgtgtgtatatttcccattttattacatggggtattaacagggctactgagttatcaagatttaataaaattaccccatttttactgatgcatcaagggcattattaagtaaaactttttgtttgttgtttttaactgtggctgtatggaaatgcagaattctatggcaactaatacggttcgggaccactgccatgattcatgctaagccaccaacagacttacccttcattactttttatcatgagtgtacacgtcaacacagtgaaaagggcaaataatgtttgaatttttttttaatttttattttaacttctggggtacatgtgcaggatgtgcaggtttcttacataggtaacgtgtgccatggtggttttctgcacctattaacccatcacttagatattaagcccagcatgcattagctatttttcctaatgttctaccccttacactgctccccctcaaaccctgtccaccgacaggccccagtgtgtgttgttcccctccctgtgtccatgtattctcatttttttagctcccacttctaagtgagaacatgtggtttttggttttctgttcctgtattagtttgctgaggataatggcttccagctccatccatgtccctgcagaggacatgatcttgttcctttttatggctgtgtagtattccgtggtgtatatgtaccacatttactttatccagtctattgttgatgggcatttgggttgattccatgtctttgctattgtgaatggtgctgcaatgaacatatgcgtgcatatatctttgtaatagaatgatttatattcctttgggtttatatctggtaatgggattgctgggtatgtttgaatatttttaggataacagttttgaccctgaggatccctaaaaaggtgttagggacttccagaagtccaaggaacacactttgagaatcattgatttaagctattcaccaagggaagcctggatacactgtcacagcagaacagctggctgttgcaccctggaagatgggcattagcatggagggggtcactgctttgcttggtttgttcacttgtgtatcctcttaggctgatgatataatttctgtggtttttcttatttgcaaaggggaaagaagacctatgtctgggctccatttccagagattctgattcaatgcttaatacatgggcctatgtaatttagttttgggcaggaggaggccggttccatcaattctggaagggctaatcctaaaagttcttcaggattcagccaacttagcatgattttgtgctttgggaacaagggttaaaaatatgagtaagaactaagcaggacaagaatccacaggactagtaaccctatcaaagaggaatatgaagacacgagtttggggaacaggatgaaacaagtagaaaaggaagacataaacgaacgatttatttttttctagctaccagcacaatatacccatcaaaatgatatactcttcagtccctacatttcaatcatcatcatcttcttcatccttattctcatgctcatcctaccctaagggtcacatgcattatttcatacatctacctattgaccactaaggtgggtgattccaccagcaaaaataaaaataaaatcagtaatcttgtgtggcctgaaaaatggataatcctttattgcctgccctgaggtcacttccctgctcccaacaatattaaaattgctgaaactcaaactgcaactcgaccaggtgccctgaagacagggttcatagaagaagaagctgaagtattggctagaggtaagatttggaattctcagccaggtgcattggctcatgcctgtaatcccagcactttgggaggctgaggcaggtggatcacttgaggtcaggagtttgagaccagcctaggcaacatgttgaaacctcgtctttactaaaaaaaatacaaaaattagccaggtgtggtggcacgtgcctgtaatcccagctacttgggaggctgaggcaggagagtcgcttgaacccaggggcggagattgcagtgagctgagattgcaccactgcactccaacctgggcgacagagcgaggctccatctaaaaaaaaaaaaaaaaaaaaaagatttggaattatctctggaatttagatactatacaaccactatcttgcaccacaggcattccattttattatgcattccactttccagtgaaagaaaacaagatctggaaacacgaggtctgtagtgtcttcaccccttcagccaggaatgcagggggagggaggcctctgaagctccccctccagtggctgcgaatgttttgagccttccctcccattgcagcagggagggggaagagggctccactcaataaataatcacatgatgacatccgtgtcctttccttggccatagcaccaggtgaaagtcatcattattttcttaagccaagtgtctgtattttattagctgcctaacaactgctatcaataatcatttttataactgaaggaataggaaagactttggtctttcccaagccccaaaactatgtttgtcctggagatggaagaattctctgaatttcttgatcatattttctataagtaacttgatacctttcaaaacaatgaggagattcctcatacatttaccaatttattcagttatttattcaacagattgattgaaccacacacctaaagagccgaaacggacctcagagctgtgtctctcccaggccggttctcacccacctgccttcttccccggttctgctctctatcaccagggctgacccctgaggctgcaacacccggctcccatgactgctggcttcttgctgtgtttgaccaaagagagacagtagattgggggctgggaagggaagaaggaagaaaccatctctttcatagttccaggtcccatgggacagcctaccagaggtccagtttctgctctgtggcctgtgacctggaactgggagtcttgactcctccctttgtctctgctgcccaggagatagtggctctgagtgacctcactgttccctgttggctcaatcatctgtgcaaccctgcactaaatgcttcaaaatggtttttgtcttcctgattagaccctaacagatacaggaattggaactatcttacagatgttggaactgaggcccagagaagatgtgacacgtcttaagttatacggccaaaaaaatggtaggaaatgtctaccatgtataaagcattgtgttagccactatgtggatgataaagatgtgaaattcctaggctcttttctcaggagcctcccatccagtaagggaaatgacttgtctatacaaacagctataatacaggacagtgtgtgccaggcaccattaacaagcgtgccagttataaggattcaggtgttgggggcatgcaagataatgaagggaggtttcctggggagctcaacagctgaagcagaccaggaaatacagggtaggattttggcaggaaagatggtgtgtgcctgtggttggtggaggggtgatcattctaggcagaaggaatagcctaaatgtggaaggaggcaggaaagcttcaggccctcccaggaaacaataagccatttttaatttggaacttggggaagtggtaggtgggaaggtagagtaactgcgttgttcactgtttaaacaggacacttcagagaatgaaaagggactctcttaatacaccaaagcaacaggcagagactggggccatgctagggaaagtgaggctggcccaggtggatcaggagatatggtcacctgccaagaggtggctgagcccagatcgtggaaggttttccatcccatactaaggggtttagacctcaggttccagttcactgggaagcaaataaaatagtcatgtaggaagggatggaaaataattctgtaagacgctaactgcatttcataccacagaccggggatgaggagcaaatgttcttgctctccatatctgatgtgacctgtggcccccaatgagcaggaacaccccgttctcccatgtgtcctgctggacctgcaactatacatgcttagcacactgcatgggacttgagaagggaaacaagaaattagtagaagacatggttccttccccagggatgagacttttgggtattaaacagggagcagtacacaatttgcaaaatccagtgtcattgaattccaaaaggcacagccaaggcagccagcacttctggtggttaggacaggagaggtcacaggggcctgggccttcaggaaatgaagccaggagcacagaactcgagccccgcagggaagaattacattttggctgggtggaaagaggggagggcattcctggcagatgcaccggagctggaatgatcaggtcatgtgtaagggacaataaagcaatgagctgatgtgggattcgcaggaggtagggctgggggagagggccctgaagaactggggcagtgggtggggaggagctccggtgtggagggtgcggaattctgtccaggggcactatgtgtgtgtgaactgcaggggaaagtttacttttcttcttcacccgaggacaattcgaagccgattgcagaggcagttggcaaagtcagtactgcatagtggttaagggacagacttagcagcgaatgtgcctgggttcacatgccggcccatctgctccgcagcgttggagaagccacttgacagctctggacaatagctgaacctccatcaacccggtgacatgaggattaagggattaactcctataaagtgctgaaagcaaagcctggcacacagtaagactaaatcaatagttctcagccctggctgaacgttcaagtgacttggagcgcttcgtaaaaataccagggccggaggattttagggcggggagactactgctgattctgcagaggtagatacatgtcaggacacctttgtccaaacctgtagaacggacaccaagagtgaaccctcatgtaaactatggacttggggtgatgatatgtcagtgtggattcatggattgtaacaaatgtaccatgccggacagagggtatgtgggaactatctgtgtcttatgctcaattttgctgtgaccccaaaactgctctaaaattaaagtctatttaaaaagaaaaaaaggggctgggtgcaggggctcacgcctgtagtcccagcactttgggaggccaaggcaggtggatcatgaggtcaggagttcaagaccagcctggccaacatggtgaaaccccatctctactaaaaatacaaaaattagcagagcgttgtggcatgcgcctgtaatcccagctacttgggtggctgaggcagaagaatcgcttgaacctgggaggtggaggttgcaatgagctgagatttccccattgtactccagcctgggtgacaggaagggactctgtctcaaaaaaaaaaaaaaaaaaaaaaaggcaaaaaagaccgggtgcagtggctcacacctgtaatcccagcactttgggaggccaaggcgggtggatcacctgaggtcaagagtttaacaccagcctggccaacatggtgaaacctcatctctactaaaaatacaaaaattagccaggcgtggtggtgcatgcctgtaatcccagctacttgggaggctgaggcatgagaattgtttgaacctgggaggcagaggttgcagtgagccgagatcgcaccattgcactccagcctgggcaacagagcaaaaactccatctcaaaaataaataaataaaaataataaaaggaaaaaaataccagtgccagggcccacctcttcccccaaccaaaaaaaaaaaaaaaagcacaattaagcagcataatggggtgaaaccttcaccatcagttttttttttaaggtttctaggctattcctttgggcagccagcactcagaagcactgaactaaataaatggacatggactcttgtacaatagcgaacacgtcagggaacaggcatgttcatggtagagccaggatcttttcctggggatgcatggggagcggtttcctggcttccacttggcgcagaagctctgcccttttgacagctttctgagcctctgggagcaacgcagacccaccagagattctttgaacaagaagtgggcaaactgatttcagaaaggaaaaaaatcctatggcattactaccaccacgcttagttaatagatgactgacccttcttattaaaagaaaactcaaagttatccagaaacaatttccacccccagcacctaataggtcaccaagcgagcataatgtcccagaaatcttaaggagcattgtgacaatataccaaaacaatcttaagtttaaactgtaaatctattctctgaaaggcccatcatcttgggagcaggactaagatgaatgctccatcagacaagccatggccggcagccccagctctcagcagcacaaatgtccctagccacagaggcccagagctctgctaattcatcaaacacccagcacgccccaagccaaactgtggatgtccttatccaaacctgcttcttgtctccacaaaactgcaattccattctaccaattgctcagtgcaaaaatcctggagtccgtctttcactcccctttcacgtccagcatccagtccaacagcagctcctgtcagacacactcagaacctggccgcttcctcccaccttctgcaggaccgtcctgggtggaggcaccaccgtctcatctgaattaccgcgatggttgcttgcagtccccatctgtgccctgagtcttctccagaggatacattcacatcactgagataagagtcatccttttacacttagccagaaaatgtcatcacatctctgttcagaaaccctcttatgtgtctccatctcactccaaatcaaatccaaagtcatgaccatgtgccatggcctacaagcaatgagctgacgtgggagtcacagaaggtgaagagaacctgccttccccaggtaataaccacatcacctcccgctctgtactttcacccctgtgctcagagcccctcaccagagagaccttcccaccgtcatgcgccttccctccctcgtgctgctttatcttttttcacctgacccattacatagttcctggtgtgttaaatgtctggctcctcttgcgatccctttcccatgagatcagggactccagtatttgctgctgtaaccttagggtctagaacagtccccggcatatagtaggccctccatgaatccttatttttgaatgaagtccttatgatcactcctttttgaattatattccaggatacatcttaatagattttgtttgggaggatggcactggtaggatgagatgcagtgattaacataatggactccggggccctgggaaacagaattttggggttctaaccctagctttgttcctaacccattgtgttactttggatgggtcctgtgatctctctgggccttgggtgacctatagggtgtaggcagtggactagaccagttggatttgaccaattaaaacagaattttttaggggtgggatataagcatcaatacttttttaaagttccccagaggtaatgtatagccaggagtgggctaagcctaagccttacagcagggtttctcctgtgttaaaaatgcacacgaatcacttgggatgtcattaaaatgcaggttctgattggctggtctggagagggagctgggattttgccattctaacaagctcccaggggatgctgatgctggtggtccaagaccaggctctgagcggcaacatcttgaagtcacttccagcttggtgactccaacgtttccatcaagggtaaaggtccccttattaaattctcaggaaaacatcagctgtcactccactagctgctcaatttgatctgagttccctactcaatgactggcaagctgcccccgcatgcactgtgtggctgttaagagttggttttccttcttaaaaaatgaattgctggacccagaaagggggaatgagcaaaaccaggtctgagaatttctctcccaaaagcaggctcagagacctgtagtcagggaagaagcccgtcacaagtcagtggcttcccttcgtctgccgttctgttgtcagggcctcggtgctggctgtgtcctgtgtccctctctatctccttgatctgaccatctcatgatgcctctgcctggctgccacctcctggtgcccactggtgagccgaggcagccactagcaggcagacgggcaagcagggcaccctgcacagggccaagggagcagcctcattagggctgtcaaggagcagctccaacaggagaagaatctccatctggctgctgcagcagccgccgcagggaatgggaagtgacaaggacagaaagggagcagtcactgacaccctgcagttcaaatggtgaccagagctactgacaacagggccttctcctacagcagctgtgggaggcctgttagattattctgctcacccagtcccctaaggattcagcaacagagcctctgaccaccaacaagccacagttcattcaaatcatttcccccagttcagatggctgtatgtggaatggctcttttgcctgctgcccttgaggcaagactcagtgaagaacagaacccctggatgcgttgtgttaattcctcccacaaatcttttgtttgtttgtttgcttttgagacagggtctcattttgttacccagactggagtgcagtggtatgatcatggctcactgcagcctcaaccccccaggcccaaccagttctcctacctcagcctcccaagaagctggggcctcaggtgtgtgccaccaccccaagctaattaaaaaaaaacaaaattggcccggtgcagtggctcatgcctgtaatcccagcactttgagaggccgaggcaggtggatcacttgaggtcaagagtttgagaccagcctgggcaacatggtgaaaccccgtctctactaaaatacaaaaaaatttagtcaggtgtggtggtggggacctgtaatcccagctactcaggaggctgaggcaggagaattgcttgaacctgggaggtggaggttgcagtgagctgagattgtgccactgcattccagcctgggtgacagagtgagactccaactcgaaagaaaaaacaaaaacaaagaatggctgtgtctaacaatacacaggagatctcagggcagaaagaatgagcatttacttagcatttgttgagtaccagcactgttcaaaaagtttccttatgtgtattatctcatttaatcttcacccaaccctgcaaagtagatactgtaatcattcccattttacagatacggaaatcgtggcagacagaggttaagcaacctgcccaagtaagagatgaggccaagaattggacctgggtagtctggcttgagagctgagtatctacttatgatacttagtgtgtctacttacactctcacagagtgctgcagatttctgattctgaaccagtgggtccctgtccacccccactggctcatcttagtctggccctgtatatagccagaacacttccatatttggagctgtgctagctactgaattatgtcccccaccaagtcatatgttgaagccctaacccacaatgtgatggtatttggaggcagggcctctgggaggtgatatggtttagatgaggtcacaagggtggggccctcatgacaggattagtgcccttagaagagataccagagagcttgcactctctctctttctctctgtcccatgtgagaacatagtgagaaggcagcttctgcaaaccaggaagagggcccttaccagaacctaaccatgctggcacctcaatcttggacctccagcctccaggacggtgagaaagaaacttctgttgtttaggccacccacactatggtattttggtagggtagctcaagctgactatgacaggcagggtctgagggaccatcccagggcttaacccctctcacggaccacgcccattctcacccattctcaggttcacctgaggcccaggtgtggggtgtggcctgaagggagtcctggaggatccagagcggcagctcctctcccatatgagggggactccactgaggtgtagcctggtgtctcatggaatgtactgagactggctcagcattgtgggattcagaaaaagtgaatgggagcatgtgcttgggagaagacaaagcaggaattccaggtgatggagcctggaggcagacggggaggggcgtgaggtccaagtcacacagtggttcatggagaactcaggaggcaggggcaggagaggctcccaggcaggacctggcagaggcagggaggccttggggctgtcatgagaggccctcagctgagtgcatgaggaggagaaataggctgggctggtcaggacagagacttacgctgccaaactgaacccctttctcagtcctgccctctcgctacatcgtcggggcaaagcccttcccgggactcacagggcctgattagtttcagctctgtccataactagccatctccccttgtcaggtaatttctttatgagctttaccttagagggagttggtcaactgttccccagcactaacacatcacgatttctacatgagcaatacaccccatcttttcaatctttccagatgtgtctgcctctaattctgtgattacaaggtagggctgactccaagaacttccctaatgtgcctggtctgctcagttctcagaaggtgtcaatggagtgacagtttcagaacgtgacagtgacagttttcagtgacagtactttcagaacgtgtccaacttctagtgattggtgcacctttccctgactgtcccaaagtcttgggaggggctcttggatcaacctgtcacctgtcacctgactagcatgatttgccctgaggagtctgcaccatggtgggagcagccacccaagtcccgtccccaggaaaaggtgagtgagtgtcccagaacctggcctataaccattcactcttctgagacacttacctactaaagtcaccaccagaatgtgatgacaagcagtggattctcagaagggacctatcacccgaggactaaccgggagttccttgtcagaccctcggaactcattcaagcagggctccaggcatggtctgagtcatggccctgatgcgtgcctgctgaattcattcagggagaatgccacgggaacctgcctcagccctgtgtcaggaacacagacaccttccaggtgtcggaaagttctaccagtcatccttaagatttgttagacctacttaagctcacaggaacatgaagttcacaaaatgctttccaaccttggatgaaatgcatttccatcttagccaagacatagcaagattcagtcatctttatttctacctgatgatttcttgaacaatcacgttaaccacattttttttaccctccaaaagagaaatagcagaggggaaaaatgctgcctttcttacctccaaactctcctattttaatcagttccaaaattatagtttggggtggggagcatgtttaaagcacctgaaatagctattatgtattgagtattcaaaattctttgcatgtgttgatttaatccccacaacaaccctattaggcaggtactattattatccccatttttacagatgagaaaactgagacatagaaaagttaaataatttgcccaggatgatacagcttatagatctgggatttaaacccagatctttggacgctggctgtcaatagtggaaaagattgtctgttctttgtaagcgaagttgatggtgacaattctattagcaggttgtgtgttctgaggtgtttcttccagcaatggggatatctttttttttttttttttttttttttttgagacagagtctcgctctgttgcccaggctggagtgcagtggcatgatctctgctcactgcaacctccgcctcccgggttcaagtgattctcatgcctcagcctcccgagtagctgggattacaggctcacgccaccatgcttagctaatttttgtatttttagtacagacagggtttcaccatgttgtccaggctggtcttgaactcctgacctcaagagatctgcctgccttggcctcccaaagtgctgggattacaggcgtgagtcaccgcatccggccccagtgggggtgtctttaagtgattcacctatactcatttgcccagtttcattcatgaacaacaactcatgtttttcagatgtctggcaaacggtttaggtttccttgggtgattatgtatagaaagaggctgatggccctccccagggcacaggtgacaagcacttacaaagagctctcaaaccagagtatcttgaggaaggtaacactgtaccccacggctcctagggtctgtctgtctgcctggacatgagaaataaatgagaatgccgacacattactgaagtcacagagtccacattctaaaaacaatccactctgtgaggtgcaacagttaatagcatgttagagttctagtggaaaagaaaatgaaaaactatccaaacagggttgcaagcatgaaacgtgtaacaaaagcagcttaaaaccttgtgtctgggtgagcactctctggttcaatacccgtttctgaaatttcagtgtctgtttcctggacactggactgtgtcccactggactgatcccactggactgtgagtgggatcatagagaactttgcttcctcttacttggcactggattctagagcatattaagtgctcttaatgtttgttggataaatgaatggttaagaacaggccaagagtggcagctcatgcctgtaatcccagcactttgggaggccgaggtgggcagatcacctgaggtcaggagttcgagaccagcctggccaacatggtgaaaccccatctctactaaaaatacaaaaattagccaggcgtggtggcatgtgcctgtaaccccagctacttggaaggctgaggcaggaaaattgcttgaacctgggaggtggaggttgcagtgagcccagatcttgccactgcactccagcctgggcaacagtgcaagactccatctcaaaaaaaaaaggataaaaaaattataggcaaggggcagtcataggtggctttttgagaaggataaagatacatgcaaatagatgatttaaaagatcaattaaatttcccacagatagaagatacagattacaaaatctggctacaaattccactcatgtgagtacgcacaccttgttgcaatgtgactttgccactcttcaaaagtagagtctatttttcttaaatgtgggttggcctgtgacttgctttggccaagagaatgtgagagaaatgatattgggtggaactcatgaggccctgcagctccgtgaccttggaatgctgcccttagactgccctgtaaggaaaccagtactgtcctcctgggggatgagagcccatgtggaggagagcaaggcgggctagccaacagcaatatccactgccgggcctgtcagggaaaccacactggaccttccagcccagccaatccgtaaatggacttgagtggcatgaatgagcatgaaaaagccagggaaaaccagcagagaaccagcccgccagcccacagacccatgataactaagaaactgctgctctacgagagcacaccagttttgtgatagtttgctaaagttgctcaaccttggtgctccagacatcttagatcggagaattctgactgtggggattgacctgtgtactgtccaatgttcaacagcaggtttggcctcctcccgccagatgcagtagcaccccaccccctcctgtcaggacaatccaaatgtttccagacattaccaaatgtcccctgggggaaaaacacaagtgacccaggaaaccttattgatttccccttcaaatccttgaataatcaatcgtgaatttggggcagagttgaaaaaaatgtttttgcccctttgtccctagacatctcccactgggtagtctggatgaactcagctggtgtgtctggaaccaacactgcattctcagataaacctggccagtgcttatgtccaggtaggcaaaaagccctgcctctttttatgggattgcttggctaccccatgtattagcttcctagggctgtgtaacaaactaccgcaaactgggtggcaaaaagcaacagaaatttattctttcacagttcatgtgtccaaaatgtctaaaatcaagttgtcgtcaagccatggtccctcaaaggttccagggaagactcttctcttgccccttcctagcctttggtggctgctggcaatttttggcatgtctcggcttgccattgcatcaccccaatctctgtctctgtcttcccaccgccattttttctctgtgtgtgtctctgtggctctgttttccctttttaaaagtataccagtcattgaattaggacccaccctgtcagaggtgtttgaaccagaatgactccatcttgaatagggtctgggtaaactaaggctgagacctactgggctgcattcccaggaggttaggcattcttagtcacaggatgagacaggaggtcggcataagatacaggtcacgaagaccctgctgatagatcaggatgcagtgaagaagtagccgaagcccacgaaaaccaagatggcaatgaaagtgacctctggtcgtccacatggctcatatgctaattataatgtgttagatgccaaaagacactcccaccagcaccatgacagtttaccaatgccatggcaacatttagaagttaccctatataatctaaaaataggaggcaccctcagttccaggaaatctctgcccttttcccagaaaacacataaattatccaattcttgtttagcatataatcaataaataagtatactcaggcgagcagcctataccgctgctctgccattcttttactttcttaataaacttgctccaaattctttcttgtgtgaggttcaagaaccctctcttggggtctggattggaaccccttttccgtaataatccaacaacctaatccaatatgaactccttcactaattatacctgcagaaatcctatttctaaataaggtcgcattctgaggctccaggcagacatggatttgggggacactattcaaccctgtatacactccatgagctgattggcttgtggtgactgtgccgttctcctggtcattgtccctgcccggtgctctatggacctgtccccagcctagccgatgccagggcagagttgatgagagagcagagatgctgctttgtcccgctttagcccaggcaggagcggagctttgctgctcctggtgcttcctccgcccccttccccttccttccacctccctcctgctggctctcagcacagccatgtgattgcaaccatcaaaggaggcctccctgctgaggagggggtatatctaagtgcgggttcctggacagatttttatctgttgctttgctgcctttctttacattatgttcataagagaccacaattccccgtttgtatacacatcgttgcaatttgctttattatgaggtagaaaacgtctatttgcattttcctccccactccccaactcctacatcttttggaaaaaaaaaaaattctatttcaagctacagtgcataccataatgtgattattgatgtttctttccctgggaatgccttcttggctttccatttctcttccctgccaagcacacttgacccgtgttaatgtaaaggttacaacagcaatgataaatctcttccccgccgtctcacttgcctgaagtgcccaggttcatgagatgaggacagcatgaggaggagaatgcaggatgcagggaagatagaggaaagagagaaaatcaaaagattcataaatcgcagggctcttagcctccaagcagaactgcagattagatttgttaaaccaaaaaagcccttgggaaacacagaaacaggagctttcgaatatctaaaaactcagatttaatgatccaaagatcaaatgcaggtgaagaaaagtacttttctttgggctatgagctaatccaggggttgacggtatatagcaggaaattttgagactaatattataactaacagctaacttttaatctttgaaaggcatttgcacaaaataccgttcattttcctcaccagcatttaacatattggtataagtcaaatccctttgcagatgaatgcttaggacgtagagcgtgtctcagtttcggcaaaacactggaatcacctgggattccgatttaattggtcaagcgcgaagcccaagcatcagtgggttttaaagtctccccaggtgatactaacgggcagctagaattcagaactaccggtataaaaagtcagaacttcccacgatcattagtgcccagcatacttactgctaagcagcaaaacgtgaccacatctattacagggctctaccaacatttcttgcattacgacggaatacttttcctagtagacgggctatttttcaaaatggcagcccaggagcttggaatgagtggattctgttgtgtcaaatcttcaattttcatggaaagccactgccctgctggatctcagaacagggaatggtgactccctgaaccttccacagggcaagttccctccccaagtttctccttctgctttgtataccttctgctttgacttgcccacctgtctctggggcttcctcatgggcttcttattcctccattcatttataccctcatcctgtatatggaacataaaacagtaatagcaaatctcaattcttaacacatgtcaagcttctcttctggctaaaatgtgggcataatattttggtttactgtgagactaaaattaatcaggaaatatgtgttgattgctcagaggaaaataagcaagggtgggaaacatacaaagaagttcagtgtgtagatcctcaaggatcttaccagggtaggcaaactatagcccgcaggccaaatctggtccctcgcctgtttttgtaaataaagttttattggtacacaactatgctattttttttaaagcatattatctatgacagacctgaataattgtggcctatttttgcatctggcctgcaaaggctaaaatacttactatctggccccttttagaaaaatgtttgctaacattgatctagataaaccaaccacaaaaacaatagatagagaagggagagatatagatagatagatgtctccatccatcctttcaacaaatatttatgttgtaggcactgtgccaggctctaggggatgtttgtgtgaatcagagagggctacttccccctgtgaggcccacagtctactgaacttgtcatcaatcctgagcaatgaataaccaccaaaagggaggcctgtgcaacaagatcaaaggagaagagaatgtttgaggctagacaaacccatgggtaactagaatctcacctgtgaaccttacagctggtttctaagctgaatgggataaagacgaggaaggggagacctcgacaaggttggaatgaagaagtaggaaagtccaggtcatggtcaagggccagcaaatgccaatccggctgtctcccaagtatactggagtggtaaggggaagaatggctttctttgttcaccactgatcatccataccagagttgacattttgtaagggtgtggacaatgtttgtgttatttacctccatctctagcgttaagcaaaatgcttggcatatgtaggtgcctgaagaatattatctaaagaattaaagaatagatgagtaatgggtatctcaaatgttaggctagatatgctgtaagtcagataagcatttcaaccttggtaaaatgatgtctgatgtttattatttatttacatatttacttatttttgtgacaggatttcactctgtcacccaagctggagtgcagtggtgcaatcatagctcactacagcctcaaactcctgggctcaagcaattcttccaccctggcctctcaagcaactgggactacaggcacgagccaccatgcccagctaatttttcaatttttttgtagagatgaagtctcactgtgttgcccaggcttgtctcaaactcctggcctcaagcaatcctcctgcctcaccctcccaaagtgctgagattgcaggcatgagccaccaccatgctcagcctgttactttaaacaaaggactagataggagataagaaagcttttgtgtttatgaacaactcctctacaatgaaacttctacaagcattacattctttaactctgtcagccttttgttttatagatgatgaaattgagtttcagagaggttaagcaactggccaaggtcatacagcaagaaaatggtagagctggaactcagtaagtctttttttaaatctcagactcaacgctatcagcacactcccatgcctaccagtcattttcataccatgctttgaagaaccctcaggctcctcagagccccataatggcactgtgaccaatttagtagcattgaggatcaaaagcacagaccccctacccagcttcaccctgagcagttctcattttctctcctttacttattgagtttcctggttttatccaaacaaaagttcttggaggaacaaaaaaaaattcgaaatcactgtacaggaccatactacttcctaaaataaagccagggggtatggtttctagcctgaactccaccaccaaggtgctgtgggatcatagtcagccacttctccttcttcctacccatggaagtttggacaacaatgctgagatcctatcacactttcttcactttccagagagatcaagatgaaatgaaaagcttatttaatggatggcaatggctggatcaccttgaacaaaattctagataaagtttaactccattgacagcagcaaattaggggaatataattagttactgagcagagctcaggaaatcatcattgctgggtgctttggcagatgcctgccaatggcatctaaaattatgactctagaagcaaatatgagccaatcttttggccttacctcatagtaatcagcacatgacagaatataaggatattagtaaacagtccacaggggtatagccacttaccaagagagatgtaacacatgaatatactgattctcaaagaattcatagttggaaataatgccactcccatcgatggcctgaccattcttataccaagttacctctggcttgggctgacctgacaataaagaaagaaaagtatccttattagtttaagtatttttaggaaaaaaaaaaaaacccataaagctatgaacaaggatggacagtaagcaacagggatgaggatgatggattacgttaggtgaggaattgaaaagccttcttcttgttgatacaaataaacacgtaattcagcagacactattgagcatgttatgtacctaagatggtgctgtgctgatgggtggcatacaaaatgaaaaatgctacccctaatctcaacgtgctattaagaaaaattttccaatacttggaaataaggcaaagatatgaatagtatcttttttcaatgtcatatgaaggcaaaggcccatccaagcatgatcttgggtcatatactttgtttcactcaatgataactactgatttaaagtgaaggtatatgttaatttgtaggtttttatccaatagaaatgcaaataatttccatctaggagaaaagataatcctataagttattgtttattgctctgtaggacattaaccagtgctacacctaacccagcagttttaccccaacattcctttattaaattgcctatacacacctagctcctcaaactttaatagtttctggtttcttctctaattaattagttgaataaaatctttaaaatgtgtatttcatatttgcatgggaatcaccttacctttttgaaaattatactttaatagtgctcaaagttagtgcgttagttatggcacaaaagagaggagaacaaagtagatttgcaaatgccactttcttcctgaggatgaagagtttggaatgtaggcttcccagactgatgctatgcatatgttactgatatcatcacagaaattgacctacactttctctcttagaaaagattcatccttccctggtgttcaataatgggacgtgatgttaatgggctaatccggtaaaacctccgggaatttcatccaccccttgggatttttccctcttgttacagagcaggaaggtttccattgtgttccaaagagctttctcattagccttcatgtcactgaaaatatgtcaaaatgtgccatatgcacaggaaggaaagcctggtatttggaaacaatacaccattcttaatctgtcttaggaacgttcttgtatttctgtcttatttattgcgtgatttttggtgagcaactccagagaccactaagatgagaaccgcatgttctggccaggcatggtggttcacgcctataatcccagcactttgggaggccgaggcaggggggtgaatcacttgagtctaggcatttaagaccagtctgggccacatggcaaaacctcatctctagaaacaatacaaaagttatttgggtgtggtggtgtacacctgtagtctcagctacctgggaggctgagacaggagtatgatctgagcctatgtggtcgaggctgcagtgagctgtaatcatgattgtgccactgcactccagcctgggcgacagagtgggaccttgtctcaaaaaaaaaaaaagaaaagaaaagaaaagaaaaaacggaactccatagaaagaggaaagacaaacgaagtacagagggaagaaaaagttcgttagacctgcacctgcaccatgagcaggacctgaaaatgctaagtctccctccctccctccctccctgtgtctcccagctaggctgccactgtgctcatgccatgaatgcgcttttttggcaactgtggatttttcctccttgccttctccttcaggtaaacacctgagtagttaccctggggcttggaacagatagacctgcatgcaaggataaatcctccagtagctgcgtggctgagcctcttacaggcatttgcctataaaaagacaccaaaaaatgggcttccctgaaaaaccatcaaggggtttctgatcataattcatttctgcctgttcttgtcaaccctgtgtcctcctttaagactgtttcatcacactcctttataggaagcagtgaattcctcctttttgtgggtacgtggctgttttgaagaaaatacataaaatattcatgagctgggcctgggaactcattctgatctcttggattccagtttttcattcaggctgatgagggctgattgatttcccccagtttcctaatggctgactgtttttttcccctgtgcagtatagatctgaacaatcagccagaaatgagacttgcatagggaagtggtatctggtatcttgtgggtggttctcttttctcctgccacttgctggaaacctcacctgaaagtcctccccttgtttttggaacctactgtgggtcatacattgagagccacctcctaaacatttcagaagtatctgggcgaggggaccacagccaagttcagggcatgtccaaacacacgagggctctgctctgaagactcaaggtcagcttgcactgttctgtctgtctgaatgacgatggaccatcacggagacagaagcctgggcttggagaggctgagcgcacagttctacactgcaactccaggctgaaatcgaggttttatgacaacttctgctagcgaaaggcagccgtttctgaggctcacccctctcctctctggacttagaaaaatgggatcagagaccaacctggccgacatagcgaaaccccattctactaaaaatacaaaaatgagctgggcatggtggtgtgcatctggaatcccagccacttgggaggctgaggcatgagaattgcttgaacctgggaggtggaggttgcagagagctgagattgtgccactgcactccagcctgggcaacagagcaagagaccctgtctcaaaaaaaaaaaaaaaaaaaaaaagagcaaggggagaagagttttctgtctgccctcaagaaacaccattggcaccttcatgttttcaagggtagagacataatccaaaaaagaaaagagaaccacccatgaggtacaagatatcacttccctacccaattgttttatgtttatgttcttttaatgataaatccttttaccattgggagtacccatacttgatcaattctgagttatttattcaccaatccagaatcccagtcccctgttttttctccactggtcacccattgcctctgttttaagattttcacttcttattagcatccctgaagaaggcgtgcagaggagagactaatttagccagttttaagatatcaattagggccaggcgcggtggctcacgcctgtaattccagcactttgggagaccaaggcaggcagatcatgaggtcaagagatggagaccatcctggccaacatggtgaaccacccccctccccccgtccctattaaaaatataaaaattagccaggcgagccagccgcagtggctcacgcctgtaatcccagcactttgggaggccgaggcaggcagaccacctgaggtcaggagttcaagaccagcctgaccaacatggtgaaaccccatctctactaaaatacaaaaattagccgggtgtagtggcgggtgcctgtaatctcagctacttgggaggctgaggtgggagaattgcttgaaaccaagaggcggaggttgcagtgagctgagatcgtgccattgcactccagcctggcaacagagcaagactctgtctcaaaaaaaaaaaaacaataaaaataaaaataaaaaaattagccaggtacagtggtgcgtgcctctattcccagctactcgggaggctgaggcaggagaatagtttgaacccaggaggcgggggtggcagtgagccgagatcacaccactgcactccagcctgggtgacagagaaagactccatctcaaaaaaaaaaaaaaaagtcaattaaagaataacagaagagttccatcaatttaccgaaaaaaagtgattcatgccattcctctgtgctccatgaatttaaactatggttaaggacacccaagaaagaaagaaaattaagagtggattatctgaaaaaaataaccagtgtgagagctgcctaacccagaaccacaaggtgaagtaaagatcactaaatcgtgtccaggaagtcactcaaagaaatcttttagaaacaaatcatagaggatggagttgcttcattgattacacagaaaaaaaaacttccaaggtaattttcccaaatgatgttttagtaatgcctttgtgagccaagaaacctggtatgcagggagattttagagggtgattagctagtctagtgatggttaccagatattatgcagcgaagcacagcgtctgacttctcaggaaccttctgggaaagcaatgtagataaaaaacacagcgggggcctctggggcccttcggagtctttcatcctttcatgccgcaccaaatctgaaaaaaaaaaaaatccccgacatcaccatttgttctgggatttctctggccttcttaggaattccagaaaccacagggtgccgccctggcagctcactgcacgctggagggtgggcagactgaaggtctttgggcagcctttccaggccgtggtgctgctggtaggtgggctggatccttctgtatttcggggatgtcctgtgcattgcaggatatttagccgcatgcctggcctctacccaccagatgccaatagcacccccacccctccatgtgtgacaatcaaaaatgtctgcagacactgcaggggaatgggggggtgccctgattaagaaccacgaatcctattgtcctaggcagaccccagagcacccagagttccaatggagagggaagcatcccatgaggctatggttagtgccacctcctctcattcctcctcctttctcttcttaaagtcttttcacactgtgctcaaaaaagtgtgcatatgtctttgcctccaaaaaacatgtcagttgtgttgaaatgatgtccagggaggagatattttgaaattaggatatgactgctccttctgagcaccaggtgggtgccctaggggaaggcaggcactaaacacttgattagtcaccagatatattatttcacttaatctctttgaagctacttaaaggatagttactaatgtctcctacattttacagaggtggaacctgagactcagagaggttcaacaacttgctcaagatcacacagctcaagtggcagccaccttggggctgtccttcagggctgtgcaggctgacactttcaatgtgtaagacaccactggagctttgcagggcacagcttgcacaagtatgagccagccctgagggcgcaggttggtctgaatccagagaaccctttcctttccacgctaccgctaccggcagatacaagctggcttcacttggccagacctctcctttgtggagccctgagcttagaaagggcatttagttctgtctacacagtagcgtccacttcttcacaatggcaggcggttctcccacaccacagagctcggacaaagaaaagaaccacactacagtgtggttagcctgaacagggaaggggcggttaggaactgcaaatcctgaatccagggatgctgaggtccccaaagcagacacctgagctaagctcttggtaggagaggccaaattaaagcagccacagctgtattgccaaagggacacccctttccatatgagtgtcagtagcagcttcttacccatttagaaacagttcttccctatttcttcccacttttccagattgtctcagataccctgagagacgagttccccgaggacagttcaaggtctcaccaacacctaaaaaatctcctgatgagcagaagtgagtagagggaaaaggaacctgagttcagggccaatgatgtttgaggagccttgctgtagtagcaggatgagcaacataatttgcagggcccggttcaagatgaaaatgaggggttctttgtgcaaacaggattaaggattttaagatggtgacagcagagcattaaaccaaagacagcacctggcccggcatggtggctcacgcctctcatcccagcactttgggaggctgaggcgggcggatcacaaggtcaggagttcaagaccatcctggccaacatggtgaaaccctgtctctactgaaaatacaaaaattagctgggcatggtgactcgttcctgtaatcccagctactcaggaggctgaggcaggagaattgcttgaaccgggacctgggaggcagaggttgcggtgagccgagatcacgccactgcactccagcctgggcgacagagcaagactccatctcaaaaaaaaaaaataataataataataataataataataataataataaaataaaaagacggcacccttctgggctcagggccccgtgtgaagacacagatcttggcccatgaggcccaccttgcttggtggatgctgcccttggagcattctgctcacaaatgcctctagtgctttcttttgagatcactcctgctgctttggaagttcccacagcatttccttaatctcaagatgttctgtttagaaatatggtgtgaactgtatttcccaaaaagtgttcccaaactgcccctccataaagcacctacactctgtaaatatcagggttaaaaaataaattaattaaggggaatacactgccttcccttcctcagggagagtgtgtgcaggaagcaactttgtgcttaaacctgaagttaaattaacttacatgatgggtggaaagagccgtaatgttgaagaagtgacatggtggcactgaaaagagagaaaactgcttgggtgtggggcagaacacatgagatgggagagaggtttgagagacatacctgctgggacaggtgtggaagactgagcaagagaggctgaactgaagatttttcagaaactatgcattgtgattgtgaattgggtccttttgacattctttaacaaatgacttacatttccaattatttttggttatagaacttcttaaatgtagctgtgcagaggctggatgacatggggctccggttcatacatgtggtatttcagagcatagtaatcccctctcagcataatggcaaattagttgcacagcacaggaagaaaattcatctgctagatagcaaataaatacctccattccagattaggttacgggtacatttggtggttacggaatggatatcaattggtatttttaaaaaaccagatttaataccagcccaaggctggtcttgaattcctgggctcaagccatcctcccacctcagcctcctgagtagtggggactagaggcttgagcctccatgcccagctctcttacagccttaatgagatataattaccataccatacacaatttactcatttaagttgtacaattcaatggctttcactatattcagaattgtgcaaccgtcaccacaatccattttagagcattctcattactctagagaatccctacaccccttttacctcctcatctccccatttccaccctcccccccaacacacacagccagaggcaatcactaatctactttctgtctgtatgtatttgtctattatggattttttttttttttgtagggacagggtctcactacattgcccaggctggtcttgaatgcctgggctcaagcaatcctcccacctggcttcccaaaatgctaggattataggcagaagacacagagcccggcctattctggacattttatataaatagaagctttcacttaacacaatgtttttggggtttgaccatattgtcacctgtatcagtacctcattcctttttgtggccaatcagcaatgcttttcagaagcaactgttgagacagagggatgactaccccactcttcatattcctagggaagttactcaaatggagggggacagtggcgggcagggcagctctcatagcaagaaaacaccctcctgaccaggaggccccatagaactgtgaacacaatacaggctttgccacctgccaggaacaaatctacatccagctctgccaattataaggcaaggcattgaacctaccttctcatctgtaaaaggagggaatgataatagtctaaggattagaataatgtatgtcaattgccttgtaaatatctgttacataattagttttcataatggtaatcagcgtagtataaggaaagagttcacttgtttcatcagtttccttttctgctgtgggttaccacaatgattcttttttaaagtgatataccaactaatgtgtaaaaatgtctctgggtgtaattgtcacctgcaatagtaatttacaggacatgaccttccattctcattcctggagatcactgctatggatggagaaggaggaaaggataaatccagctgtcaagagctgggctgacgttgaggagcttctgtgtcatctgtgactcctccccaggtgatgacttcctgacagtgttgtcccacatgtgaaaatactgacaaacacacactatttgactcacatagtcagtttagtgaccacatatctgagccacagagcactgactgtactctggagaggaaaaggacagttaagtcaggctgtggctcgtgtttcgtggcttctctgaaggtgagaacccttgatgacagatttatcattctctgctagagatgaacaatcaatattgaattattggtattagtggaggagtttgtggtaggcttcacagatgaccttgggaaaacaatgtgttaattggaaagaatgctggatttgccttttttcttttctttttttgctgtgtggttatggtgttatgatatatctgtatatttattggtttccatccacagttcctggctcctaactcccatagtccttgttataatgttggggcacttttggccttgggaaacagaatctctctctctgaccttctatccttcttttacctgtccaaggcaggactctgtggtcaaaaggcccttattccaaaagaccctcattcctgcctcttactctagaggaaagaatgccacacagagaaacgaatgccaagaaaagtctgaacagacaggccttgctgggttcagatcaggtgctttttgtccaatcacatttctacatagttgtcaatcgtgcctatgtagcgaagcctccataaaaacccaaaaggacagggtctggggagcttccagagagctgaacacgtggaggctgacaggaggtgaagaactcatccacacactgggagggtggcacatcccaactccatggggacagaagctcctgcaaatcgcctatggatctctgcaaaatcgcctgtggttctctgcatctggcagtttacttgtatccttaaaataacctttgtaataaaccagtaaatgtgtttccctgagttctgtgagctactctggcaaattaaccccaagaggtgctcatgggaaccccaacttgaagccagtcagtcagaagttccagaagccttgacttgcagctggtgttccgggggcttggggggtgggtgaggagtagccttggggactgggcccacaacctgtgggatctgacactatctccaggtggacagagtcagaactgaagccgagaacacccaccagtgtctgcagcttggcgtatggggtaaatccaccacaactttggtcacggaagtcttcctcttcttccgtgttgatgattgttgttgtggtggtgggagagcagagaaaaaacagtttgagagagattttccctaaacagtggattgtggcaagtttctttttatttgtatttgaatttatttatttatttattgagagagtctcactatgtcgcccaggctagagtgcaatggcacgatctcagctcactgcatcctccacctcccgggttcaagcgattctcctgcctcagcctcctgagtagctgggattacaggcgtgcaccaccacgccaggctaatttttgtatttttagtagagacggggtttcaccatgttggccaggctggtctcaaactcctggcctcaagcgatctgcccacctcggcctcccaaagtgctgggattacaggcgtgaactactgtgcccagccaacttctttctttttaaaaattttatttacctttaattatactgatcctaagtggatacatttatgttcttaaaaatacatataaaggtaaagtctcccagaggcatcatctctccatctcagttctctaccaagaggaagaatctggtatccttttaggcatttttttctattcattacacatataatcatctaaatatatgataattttgttgtatgtatggcatgaatggtatatatgtatgttggtatgtatggtacatgctttgttgacagttggcttattttgcttaataataagttttggcaatcttacagtgtcaacccaatccgtaaggctctctatcagcttttgaaagctgctaaatattggtattccatagtatagcaatatcccacttaacccatctgctcttgtattgatgtataacttggctggagtgtttcagacttccaatgacatcctagtacatgcttccttagacacataactggtctctagcctaaatgccaagaaatagaattaccagagagaagactgttcacatatcacattaaaaatatatatatatttttgagatggagttttgctcttgttgcccaggctggagtgcaatggcacgatctcgggtcacggcaacctccacctcccaggttcaagtgactctcctgcctcagcctcctgagtagctgggatcacaggcacaagccaccatgcctggctaattttttgtatttttagtagagacggggtttcaccatattggccaggctggtctcgaactcctgacctcagatgatccaccggccccggcctcccaaagtgctgagattacaggcatgagccaccccgcctggcctacatatcacattttaatagctactctaaaatgggcaggacctttaacaggtagcagagtgatgtgatgatgtggggcgtggattcctgtacctgctccctaggctcaaacctcagctgtgccactcagtagctgatcatctctctgcctcagtcacttcttctataaaactaagataatagcagtatctattcatttgaccattatggaatttgagtcagtctatgtaatgctcttctgaatagtatataaagtaagcactatgtaagtgttagccgctgccagtggctttgggtttaacattggcaagatgaaaaaataatgtatttctctcaaattgttgtagaacaaaggctataggagcgttatttgaatatttaaaacactcaagtgatgtcacgttttattttgactaatctgcatccccctttccccctgcacccctgcaatctgcatcccccttcccctaccctcaatagtcagcaagtcgcatggctgctgtcaccaaaaagcttgctgtcagctgaaaggatcagggaagaggtcacagctcacaagcagaccacaggtaaccggctcttgtggagctggcaggaaagccagcagtcagggcgcctactcagcggggacaggagggattagttctgattacccagcctaatccaatggcaattgtcttcctgaatttgccatctcagttactgtagatttggacaccgcaccctctgtcacctaatacccagtcccgtgttagttagggaaccttatccaaagatggtttctgtaaattgcatggggaggaagaagaccatgtcgggagagacacttaacacatttcgggtgcctactgtgtgtcagccccaaggctgggcacttcacagacaagatcgtatttcatcttcacagtgaacttgtctggtgggtgttctttgctatttcccagctaatgacttggaagcttcagtcacttctaaaggttggtgtaagaagcataacttctcacagcctgcaagtggcagagctgaaacatgagtccagatttgctggagtggaatattcgtgaggatgtggaaaagaacaagaaccctcattcattgctggtgagaatgtaaaagtggtacagacagtttggaaaacactttagcagtttcttaatccatttcccgtttgccccgagaatactgttgtctccaatcctaatgtaatattacatacgtttctgttacattagaattagagataaattgtgtttaggaataactccaaaaacagtttttatattttattttcacattgaaaatcagccaaatttgtttcagcctcaaagagtgtgtttatgtaaaattgagtactggcagcaagctgcactttttgtttttttctaaacgggaaatgtgtttcaaagttaaacataaatttaccaaatgacccagcaattccactccaagttatcttcccaagagaaatgaaaatgtatattcacacaaagactcgcacacaactgttcttagcagggttattcataatagccaaaaattggaaacaacctaaatgtctattggaaataacctaacggtccaactagtgaatgggtagacaaaatgtggcatagcaatacaattgaataccactgagcaataacaaagaacaaactatggatacggtggggcgcggtggctcacgcctgttatcccagcactttgggaggctgaggtgggcagatcgcctgaggtcaggagtttgagaccagccaggccaacatggtgaaacctgtctctactaaaaactacaaaaattagccgggcatggtgtcgggtgcatgaaatctcagctacttgggaggccgaggtaagataatttcttgaacccgggaggtggaggtggcagagagccgagatcacgccattgcactccagcttggacgacagagcgaagctccttctcaaaacaaaaaaacaaacaaaacaaaactatggatacatggtatgacatagatgaacctcaaaaacattctcagtatgctcagtgaaagaagccatacgcaagagaccatacaataaatggaattatacaatataattatacaatataattccatttatatgaagtgtccaatagaaattataaagacagaaagtagatcagtggtggttggaggtgagggcagtggggagaatgctaataataaatgtgcctgaaggatcttctggaggtgatggcaatcttctaaaaccaatctatggtgatgattgcccaacctagtacatttgctttttaaaaaaaatcattgcatttagcaattagaaatggtgaattatatgatatacaaaatatgcctttataaagttaattttaaaaataggagcaaggaggcaaaaatttaatgagcccctactaaattcactgcggcgttgcctgtgatagcaaaagctaaatgtccatcaataggaatgtggttattgtatatctaaagaatggaatctttttttcttgttaacaacaatatacatttaaaaagaacgagacaggcccggcacggtggctcccgtgtgtaatcccagcactttgggaggccgaggtgggtggatcgcttgagcccaggagttcaagatccacctgggcaacatgctgaaaccccatctctacaaaaaatacaaaaattagccgggtgtgtcgcatgcctgtagtcccagttactcaggaggctgaggcaggaggatggcttgagcctgggaggttgaagctgcagtgagccgtgactgcaccactgcactccagtatggacaacagagcaaggccctgtctcaaaacaaaaaaaaaaaaatgagactctgataatggaataaaaaaaatgcactgatatggaataatctccgggatacattaaatgaaataaacaatgtataagagtgcagggaatgtgatcactttcttttttttttttttgaggcggagtctcgctctgtcacccaggctggagtgcagtggcactatctcggctcactgcaagctccgcctcccaggttcacaccattctcctgcctcagcctcccgagctcgaactacaggcgcccgccacaatgcccggctaattgtttgtatttttagtagagacagggtttcactgtgttagccaggatggtctcgatctcctgacatcgtgatccgcccgcctcggcctcccaaagtgctgggattacaggcgtgagccactgcaccaggccaatgtgatcacttctatgggcaaagaagaaggaggaggaggaggagaaaagaatcttatatgcttgtttatacatatattgactagaaatacacgagaaagcagtagcttggttgctcctggaaggaggcctaagtgtggggggtggaaagaaggcatgccatttggagacagtgatagtctttgtatatctttctggataccttgaatttatgtatcttacctaataaacaagtaaaagctaacttttcaatattaatagtgagcacctccatgtgcccaacagtgtgttgggtgcacaatttgtcacacagacgtggtgaatactgagctggcagcagctccctctggatttgttttgaatttattttaggtggaagagtctttccactgactctcctctcccctgctgtttaaaatgtatggcagtttccaatctttatgagagggcttaaaaaaaaaaaaaaagctcaaggttaaataaaacctgtgcgaggccgggcatagtggctcactcctgtaatcccagcattttgggaggccgaggcaggcagatcacctgaggtcaggagttcgagaccagcctggccaacatggtgaaaccccatctctactaaaaatacaaaaattagccgggtgtggtggcacacacctgtaatcccagccacttgggaggctgaggtaggagaattgcttgagcccgggagatggaggttatagtgagccgagatcgcaccattgcactccagcctggccaacacagcaagactctgtctcaaaaaaataattaaatacataaataaataaaacctgtgtgagagtttagtacctcccctgattttacaactgaaaaatgcacctgaaacacagacaggttaggtgacatttccaaggtcacacagcttgttagtgacagagtccaggtttcttgactctgattttccatgtactgcattgaaaggatacatcctcttgcctatcttggggtaaagacagggaagagaggagaacttatggtgctataaacatacaaagtgtgacagtgctgtaatcggacccacttccttgagttaactgattaaaatcactttggtttgaagttgaatgtcatgggccgactgctctgtccagtctaggaatgtgtcgtcaatgtcatcacaaacatttcacagtaaagaaagcccctctctggctcgttttcctcttatcctccacatttgcccaggctccttatgttcccaccctcactcccctgtaatgaaaactccaaagccgctccaactaatccctcttgggagaatgtttactttcaatgtgaccaagaggtgaaatgctgtggaatttctggcatcagacaatataggggagaacctggaaaatcttaggctatcttctgtctcactccccgccccccgacagaaataagaccaaccctgagtgtagttaactgagcccgagtgtagttaactgagctagaacttattatgctgaactaaccacctgtcagcaagtccagtcagaaaaaagcagtggtgtgaggacagggaagtttcgcaggagagtggtagtctgatctctgccaccttctaccctcatccttcaacccagccagtcagagtgtcttaggggaacacttttcatataatgcctccacttgccttatttccagaagatttttttttaatagagatggggtcccactatgttgcccaggctgttctcatactcctgggctcaagcaatccccccacccacctcagactcccaatacagaagatttttaatggttctttatctaatcttgttctagtaaataaagtgtgccttagagataaggaacatcacatccaataaaaagggccgtagggtgcagtactgcagccaacggttcattccatttctttttatttcttttgagatagggtctccctctttcaccccgctggagtgcattggtacaatctcggctcactgcaacccctgcctcctgggctcaagcaatcctccctcctcagcctcctgagtagctggaattacaggcatgcaccaccatgcctagctaatttttgtatttttagtagagacagagttttgccatgttggccaggctggtctcaaactcctgacctcaagtgatcctcccatctcggcctcccaaaattctgggattacaggcggctcacgccaccgtgcctggctggttcattccatttctgaggcaggactgttctgtggaagaacattttaacttgtctgggctgaactttaaagcatgcccatcctaatttttttttaaattttttctggcttacctttagcagtaatatcctaaatctttaaagtataaatgctccccatggctaactttataactaagggaagaagtggtaagatttcagagacctttctccaaaatatctaaaatctcctaaagtggccattcgcttgtcctcctaatcaagcctcttccatcactcagcagcctggggactcggctggcgattcctcacccttcctgctttgttggctctgattggtctaaactgtggtgctcttggtcactgattgagtcattaaccaaagtttaagccaatcacatgtggcactctccaaaaagtagttcaggggtgaccaagtcagtgcaaagcttaggttgttcactccgtcatccacagaaaaaggaaagcatgtgaacctcagcgaaggccaatagctatcttgagaccgtgctaaagctggcctgataaaaccaaaacagagatgagcagagcttccagaaatgcaggaaacagcagggtcctgaccaaagtcctggactcttccatggtatgagcaataaatccctgttactgatttaggtagtttgagttgatttctttcttttttttttttttttctttttgagacagagtttcactcttgttgcccaggctggagtgcaatggcacgatttcgggtcactgcaacctctgcctcccgggttcaagcgattctcctgcctcagcctctcaagtggctgggattacaggcgtgtgccagcatgcccagctaattttgtattttcagtagaggcagggtttcaccatgttggccaagctggtctcaaagtcccgacctcaagtgatccacccaccttggcctcccaaaatgctggaattaacaggcatgagccaccaagcccagccaagttgatttctttgttgcttctagaaggcataccctctcctcattggcccacagtgcctgaaattcctatcatttggctctccattccagatctctatgttggacatcaagttacaatcaagttaccgacagaagtaatggattgaagattaaatgatttaatcaaaaccatctaactcttgacaattctttcatcatcaagaaggcgggggaggagaagtgtgaaaagcgtagcccaaccacactaatttctgatttccatattcattctttctctttctgccctccatgtttttagtttgcttttctggatttcctttacatagaaggaccactttccatctcaatctgttcagaaaccccgccaggttttcaaacccctagctcaaatgctggtttctctttgaaggcttccctgataccctcagctgaaaaaaaaaaaaagccccctaaaaactagagaccattagcctcagcatattgtccccacactcagtgtcacccccagcagctagactgtaaactgcttgcctgcagggcacctgatgggttaaccttttatgtttacagcactggcacactgtatctgtgtctctggcaccccctgagaagtaaggaaagtttggtggttgaaaagaataagcacaaataggttttcttcaggaactgcaggccgaagaaatggctacagcagtggttctcagagtggcccctgggccacgccatcagcatcacctgggaacaaggaagaaatgcaaattcttggaaacttcagaatcagaaactctggggatggagcccaggaacctttattttaacaagctctttagattctgttgcacttgaaagtttaagaaccgctggactcaggaaggtcttaaactaggggttgaggagcaaatgagcgtgtttaagagcaggggcctggttatctaagagcaggattgaaaatcaagtgaaaatcaaggtgggctgtgcagccaggacatgaggattgcagtggaagggctggcccttgagagggagggtgcagtgtaaccagaactgaactctcggaattgagcttctcttcaacttgctgcctgtctcttcgagctgatgtctgaagtctcctgatcagttttgtctatttggcccatgccaggtgggtgtgcataggcggaaatcccaataagggcttgaaacatgtttaaatgttttatttgatgtaggtcaggtgtttattctttcgttttcgccaaccctaagatgacgtgattacgttctcccaagttgctttacatgtttgcattttcagtttttctttttggcagcattcaacccagagtaacgtatcctgggttccttgtgaacctgtctgtaaccgaagcgaagaatgtatcgaggtactccaatgggcctgggaaagagctgtggggtatctcagtaaaaacaaggggcaacaagaaagatgtctgataaagttcttgggagctagcccacaagcccgcttgtgaatctcgtctgctccctcccatccctgcctggcctttctccctattcattgtgtacttttatcactgaccccgcgcaattctagcccacggtgcgatccctatcctggaaactacacttcttctgagttggcccaaagctactgcccctgctctgctcctccaaaggctagtccacttcaaagagttttcacctccactcccgcccccacctctctcaatgcaagactcgactataatctttgaggaaaggctgggcgtgtgccttcattttcatagttttcatcatgatcacaggcctttcattactatggattcccaaacactcatatttaaatatggtaatgatatgtattaaaaagcattcccagaggatgttgataaatctctacttctgcttttagataataagcatcaattatccatcaactatttttagtaaaaaaaaattttttcttatttatcatagatacattctaaaatatctttttttaattttcaaacacattgtttccaagtacagaatttttctcaaagaatctaattgtgttatgttgtattgcactgatgcagataatgtatagtttctattactttatatagtttattttatggtagtattctaaagttttagcaaaaaaaaaaaagacagaagcttttaattaaggtgaaaaactaactttcattgagaaactatgattcgacacatactttaggtatatttattcatctaatcccccatcaatcctgttaaagtgaatactgttaagattttacagatgagtaaactggggttcaaacaggttgaaaagttatgctaaaattaggagtcgattccaaatctgactccaaagcctttctcaggacctcccctgcttctcccacctccatccagagtaagatactaactcaactgcatcgcatcacaggggctgatacctacacacaagtgttcaggaggctgttaaaaactcatgaaactggaggagaaaaaaactttgtaggtaatgacaataggaactctgccctacctaaaagcttcccaaaattatgattaaatgtttggtaaaaacatcaaaaagacaatgtaggccaggcgcggtggctcacgcctgtaatcccaagactttgggaggccgaggcgggtggatcacctgaggtcaggagttcaagaccagcctggccaacatggtgaaaccccatctcaactaaaaatacaaaaaaaattagctgggcatggtggcaggcacccgtaatgccacctactttgggaggctgaggcaggagaatcgcttgaacccagggggcggaggttgcagtgagctgagactgagacattgtactccagcctgggcaacaagagcaaaactctatctaaaaacaaaaaacaaacaaacaaaacaaaacaaaaaaaggacaatgtatatttgggagctaaagttcatttagtttgttttaagtcctgatttccaagatctgaacatggttattggccatccatgctttttaatacaggatttgtgaagttgttgattcggaaggtaacccacaacatccttggtttcaattcagaagccacacagcaaaaaaccccttcaatttgtccttagttgatatagagttataaaacatatcacatatctctggaatgaccattcctggttaattaatctttagaaataaaggctacctttacttaaggaaaaggttgtggaaagaaaataattagagcagaagcagctctaaatgccgttcttgcttttatctatttttaaatgattgccaaatgtctgtaactgacacccttaatcaaggcttttaaagtttagatgtgttcattaaattgtaatgtgacagtggtggcatttaattgatggatttttttttggctgactttttgccttaaatttttttttaaatctatttaacaactcgataaatgtttacatcagccattttgaaaagcctgatagcttttcagcaaattgcattacctgttgtcagacaatatactcctgtgtctacccagataggagagattttcaatcattcagttaattcacagtaaaaggaataactcttgactaaaatactcaaatatttcagacaaaagtctctggggcctgagttacctggatagttgactttttatgttgctttgcaaaactttacatatcactcgtttgagtcattctgtatattttttctaactgttaagatagacatgatgtgaaagaaactgttttcattcattattgtcaagccaaaataagcaaatttaaaaatagcaataattttcaaaaagggtcaaaatggacttaaattacaagaccatgagagtttgcccactttaaaaccttatatgcccaaatatcccatataatccctattggtttcatctcattctatttcatcaggaaaccatctgctttgttctttgttgcagaaaatgtaaacaactatatattgaaagcacagccattccttatgtaaaaaccaaagtctacatacttacttttcagtactctttgtccaagaaatgttgtaggagggctggctcagctgtggattccccaggctgtgtgtgaggcattgattgggtgtccctgttcccgggacagggattcaaaggagtttatagggctcagggtcttccatgatcaggtcaaagcatagatgggtctgcttccagaaagttcatctcttcctaagaggggaaattccatgcccggggaagttctggaagaagagcattttttccccgcccttcagtgaactaggtcattgctgaagctggagaatatattttagcatccctgtgatgaaacttgagggctgtttctgcagtaggtgcgacacttgttgacacgacacgctggggaggccctggcaagggggcctggtgaaatgcagccccagggagctgatgaaacccagacgagctgtcactggctgctgctcaggagaccgagcagctctttacaaagcccatgctggaccctgggcttagttgctcgctccttaggaaaggaaaaacttgctgcctgataaagggattaaggccggagtaacacaaccagttctcataccaaggttatcaggcatttgaagtacacataggaaacccgtggagggggtgttggggaggtgaaaatatgtgtcatatgttgttcatttagaacaggcattatagccatcctctgaagttctctgagaaaggcagaagccacagaaggaaggcaggatccaccctcctcaccctgcttacccccccttaccccttgtctgtctgtctgtctctctctctctctctctcacacacacacacacacacacacacacacacaccccttcctattttgactacgatagaagagaacagacaaagatcagaagaaatccacagaagaaataccacaggtcctattccttcagattgcctggaatggttcttgttgggaaagtagattttgtaatatgggcaattcttttattgaagtttatccaagtccaaaaacatagagaatcctttagcatcattctgtaactacttagcctctccccaaaaatattttaatgtatgacacctggaaattgacagcttagacagaaacctcttttgagactcgtggagacagctcaaattagcagctccaggggtgactttgaaagggacatagctgtaaatattcactctgtgtagggcactgcaatcctcaaaagcaaattgtttttacacagcacagaatgtacatcattatcccttgatggaatgcaacttttcacaagatgaaaactcatctaaaacgataaaatattaagaaatgtaggggtgatatgttctgtttttcagttttatcttcatgtgagaaaaaagatattaaagctgaggcactgtaaaataatgactatctcctggggaacacatctgtgaaatgccacagaacacagaaattaccaactctttgcaaatggtcggctttatggaaagctgaggtcttcacaatgtaaggtcttttccagataagaaagaggagataacttcaagttgggaatgaagagaggaggaaagtgtgatgataaagaataaacaaatgctgtcgcacaccacagagagaataaagtcaaaagtgaaggaatgtcccaaagcaatagataaatgtgatatggttgtgaaagaagtgttgcctgggagttattaaatggaaaagttgaaattcactatgaaacttaattttgttcctctgaaataatttgaaaaaccaattccctcaactcccaacattcatctcctagcaaaataaatgtaaagagcagaaggtttatatatgtgcatatatagatacacacacacacacacacacacacatacacacatatacatgcatgcatacacacatacatgcatatatatacacacacgtacatacatacatataatggatttaactgtatttgttttattcatctcatgaatttacagccacagaatttatgttttaatcttaggtgtcggggaggaagcatgaaagaaaatcagaaacagaaatcttggaattaaactcaaattaggcctgtaatccctgcactttgggaggccgaggcaggtggatcacttgaggtccggagttcaagatcagcctggccaacatggtgaaaccccccgtctctactaaaatataaaaaatagctgggtgtcatggctcacgcctgtaatcccagctactcaggaggttgaggcaggagaattgtgtgaacccaggaggtggaggttgcagtgagccaatatcactccactgtactccagcctgagggacagagcaagactccatctcaaaaaaaaaaaaaaaacctcaaattagaccaggacactagttctgaattttctgtgaatatcaaaggagggatggaagaagtaagacgttgaagagaaaaagaaaggcatgtatctgtgccctgctaatagcatcaaaaaatacatgactctctttatcacatctactgcaagattgaagaccattcttcgcaatcagactcttgacattcccaaagatgtcaacatcactccgaagggacacagttattgtgaagggccccagaggaaccctgtggagggacttcacttacatcagtggagaattcagtctccttagaaaggaaaagaagaggctccaggttgacaaagtgtggggaaatagaaaggacctggataccattggcactatttgtagtcacaaacagaacatgatccagggtgctgcacggggcttctgttgtaagacgagagctgtgcatgcgcacttccccatcaacattgttagccaggagtcttttgttgaaatctgaaatttcttgggtgaaaaataaatctgcagggtttggatgaggccaggtgttgctcattcagtatctcaagcccagaaagacgagttagttcttgaaggaaatgatattgaacttgtttcaaattcagctgctttaattcagcaagccacaacagttaaaaacaaggatattggcaaagagcaggggctcatgcctgtaatcccagcactttgggaggctgagacgggtgaatcctttgagctcaagagtttaagaccaacctgggcaatatggtgaaaccccatctacaaaaaaaatacaaaaattagccaggtgtggtggcgtgtgcctgtagccccagctacttgagaggctgaggtgggaggatggcttgaacccaggaagctgaggctgcagtgagccgtattcatgcccactgcactccagcctgggtgacagagtgagatcttacctcaaaaaaaaaaaatcagaaaatgtttggagggtatctgtatctctgaacaaggaacggttcagcagcctgataaataagatctaagagttgtccagctacacaaacaagatgccagatgattccccagacctatgtgtgatgtttaataattcagtaaaatacctcaattgaaaaaaacacgtgagtttgagattaaaagtaaagacataaaaatgtttagcattattccaagtaaagtaatgtagagtataagaaattgtgtttaatctctatttttctgaaactataggaagaattttcttaaaacttaattttaggaagattttccttctaaggaatggagttggaaatgtatttttgtatcagatgtttattctctctctctgaaaggccttttcagctttcccaagttccaactgttattttctcggtttcttgaatgaatgagcgccacttggttcaccgaccaccctaggtctgctggagactgggatcaaatcagttcccaactaatctgaacaattaaagcaaattcattaggctcttatgctgctctgtgctcctataacgtggactgggattggtacgtgagaggtttatctgctcattttcttcttcctggcatggaaggcccttgaacactagtggcaaggctgatggcacagtctttgccagtaaagcatattcttggcggaggcttagtaccaatcacgtggcagatcagggactctgccagggtcctcgggccaggctggaactgagcaggtcactcctgctgcagtgagaactgtcagtgtttggggagctctctggagcactgagaacctccctccccaacaattcatccctatccagggtccagggattccccttagcagatgtgacctgaatcatgcatttgcaaccttcattcagttattttattttattttattttttagacggagttttcgctcttgttgcccaggctggagtgcaatggtgcaatctcggcttattgcaacctctgcctcctgggttcaagcaattatcctgccttagcctcccaagtagctgggattacaggcatgcaccaccacgcccagctacttttttgtatttagtagagacggggtttcaccatgttggtcaggctggtctcaaactcctgacctcaggtgatccacctgcctcggcctcccaaagtgctgggattacacacgtgagccactgtgcccagcccagttcatctatttaaaatagctgccagtcactcgggtaggtcaactaaacaggcattttctccccttaagtgcagtggcaaaagaaatatgaatgtaaatgaaactctgttctctcatgatgtttttcatcccgggtaacatctttctataatattcttaatgagaagacggaatttaaaaatatttgcaaaacaggccaggcatgctggctcatgcctgtaatcccaatactttgggaggctgaggcaggaggattgcttggattcaggactttgagaccagcctgggtaacatagtgagaccttgtctctacaaaacatcataaaagtagccgggtgtggtagtgtgcacctgtggtcctatctacgcaggaggccgaagtgggaggacttttgagcctagaaggtcgaggctacagtgtgccatgattgtgccattgccttccagcctggacaacagagtgggaccctgtctcaaaaaaaaaattgcaaaacaacaataaaaatgcaattttatcagaattgatatatctgagagggatctttcaagcatatgagtgttgttcggaacctggaattcattttcccccagagtagcaaaattataagtggtagttaggttcacagacacagaagtattttatccatcatgttcctgaaggactgtatttgagctatgtaaaaccaaaatagcaaaaccagctcaaaattcaatgtaacaaaatatgagaatctaagtacctgaacaaaaagtacccaagtttccaagataaaagtttgtcatggtttattctagtgcttcagtttcagttttagaacaaccacaaaaatgcattgcaactctcagaacaggagcaaaattccaattttgtaaatgtgaggccctatttcacaaatgctaagtaaaattcattagttagtgtgaaaacttaaaattttaaaaatatttgcatatgttatatgtactactttggaacagtttactttggtcttttttctgattgtaagagcaaaacatactcattactaaaactgctggatattttcatcaaccaaagacataacaatttgagaagcatttatgattggaaaacttctcagctttggttactaacagtgagtctctgcagtgcttttgcctggagctgctcccattcccccaccctgttctgctgtcacaggggttctaccagggccacctgtaagcactggcattttcactgccatggtcaagggggtttgctggatttgaagcagtggacaacacctacgcccagcagtgttattgatggatatgatcctggcagcaggcgagtggagtgggattggggcaagcatctggctgatgcgggctgcatgtgtgtgcagggcagaccatggggaacctggctatccacactttcccagcatgttcagaggagacatgaaagggcccaacaaaaagtgagtatcaggcagacttgaaaatggaagaaacttaagtgcaacttttgtgcttcaaaagccatcattacctgccacacactggaagaaaatatttgcaaatcatatgtgtcatgaaggatgtacagccagaatatatattttatttattttattttttttttcaacttttattttaagttccagggtacatgtgcaggatgtacagatttgttacataggcatacatgtgccatgattatttgctgcacacatcaatccatcacctagttattaagcctagcatctattagctattctttctgatgctcaccctccccaccagcccccaacaggtcccaatatgtgttgtaccctgccacgtgtccatgtgttctcatcattcagctccccttgtaagtgagaacatgtggtatttggttttctgtttgtgcattggtttgctgaggcggagagagcagaacatatattttaaaaacccatgaaactcaacaataaaaagattaaaaacccatagccagggatggtggcatgtgcctgtgctcccaactactggggaggctgaagtgagaagattgctcgagcccaggagtttgagactgcagtgagctacgattatgccactgtactccagcctgggcaacagagtgagaccccatcttttgatagataaataaataaataacaaaaacccaatttaaaacatgggcaaaagatttgaatagacatttcgccagagaaaatctatagatggctaataagcacatgaaaggatgctcaacacgttaggccaggcacactggctcacacctgtaatcccagcattttgagtggccaaggtgggaggattgctttagtccaggagttctaggtcagccctggcaacatagcaataccccatctctaccaaaaaaatgaaaacaaaacattagctgggtgtggtggtgtgtacctgcagacccagccactcagaaagctgaagagggaggatcacttgaacctggaaggtcaaggctgcagtgagccatggttgtgccactgcactccagactgggcaacaaagtgagactttgtctggaaagaaaaaaaagatactcaacacctttaatcaataaagaaatgcatattaaaatggaaacacaataaaacaaagaaatagaaaaaaacatattgaaaaaaaaccacaatgcccacaaggatggctataataaaaaaaaaaagacgaacaataccaaatataatgaggatgtgaagaagaaactggaaccctaatacactgctggtgggaatgtaaagtagcacagccactttggaaaataactggtcatttcttaaaacgttaaacacaagcttgccatatgactcagcaattccactcctagaaccctccctatgagaaataacaacacaagttcaaataacaacctgtatgccaaaaactgaaaacaatccaaatgtctgtcaaccaatgaatggatacgacaagctatggcccgtgtactattcaagaacaaaaagcaaaggacaattgattcatgttacagcttggataaacctcaaaaaccctgtgctaactataaaaggccagacacaaaagacgacatattgaaatattccaatgttatgaaagtcaaaaaagacaaatttatagagacaaaacatcggtggttttctaaggttgggagaagcagggttagctgcaaatagacatgaaagaatattttgggatgatgggactgttcttgaactgaagtatgataacagttgcacaaacccataaatatagtagaaattattatactgtacactaacaatgacaaaattttatgtaaattatccctcaataacactgtttatggctgagtgtagtggcctaagcctgcaatcccagcactttggaggccaaggtgggaggaccacttgaggccgggagtttgagaccagcccgggcaacatagcaaaatcctgtctctaccaaaaaaattagccaggcatggtggcatgcacctgtagtcccagctactcaggagactgaaggagaaggatcactcaaaccaaggaggtcaaggctgcagtaagccatgattgtgccacactgcactccagcctgggtgacagagtgaggccctgtctcaatctttttttttttttttttttttttttttgcaacggagtctcactctgtcacccaggctagagtgcagtggtacaatctcagctcactgcagtctccacctccagtgttcaagcaattttcctgcctcagcctccccaatagctgggactacaggcacgcacaacaactcccagctaattttttttgtatttttagtagagacgggcttccaccatgttggccaggctggtcaaactcctggtttcaagtgatccacccgccttggcctcccaaaatgctgggtcaattgttttaaaaaatgtaaaacaatagaataaaacagttagtggatcccttgcttatcttgccctacaatagaatattttctgacttttattcttaagtcacgttcaaagcatcaaacctacttgataaaactatgacttgaacgactactccagattttcatccccacgagtctgagaagcagatacctagtgagtaaatcctcctgaacatgatattcctcgtgacaggtacccagagagccaaaagtctaaggcaagaattatcaccagccgcctcctgtcccattgctcatttgacagtgttactatgctgttcccttatgtaccaagacagtgtggagcctgtcctccaacaaatggaaaggcggcagggagaacagggttctctaggagctctgcaaaggtcaggagatggggctcctggactctgttaccacctgctactggctggtcagggagtcttgaagaaggcagtgcccaagttcttattaatgacattctttttttataaaaggcataatgaagcttacctggtcttaagtcagagtttttagcaaaatattatgtttcctgtccctaccatttacttttatggttacatggccaattgagagattgatcaatcctacctgattgatcaatcaggattgcctgtagcaaaatttcacaaaggaagttcactccaagccacagctttctgaagcatagtctaccccagttgccctctttcccctttctggagctcctaagtctcatccaagcctcatgcaactagtccttttcttggtgtaaaagatccatgaggctgagttctgggctcagttttgccagccccacgaactcccatctttgttgcccccaggagaggccatgactacacccttgataacttggccctttccgctgtctgtgttccacagccccctttctcgtaagctgtccaaacctgtcttcctgaggacaaaaagaacttcactacagggtgaaaaactgtcttcccaatctgcaaatgtggctgcacgtgacaggaataatttaactaccaattaaagtgtgtgtgctacagaagcacttctcatcctcatttgctttatcagtgttcatttatgaatccatttttttctgtctattacccatcggtaatgagaccttagcaatagcctccgagtctcctcttgccaaatctgccatcaccaccccttcccagcaccacagacactatcgtggggactgcccagacagccaacgggccaatcttcttagacacttgtttttcatctctctctctctcttgcttataaatcttctgtgattccccatcacaaatagaataaagctaaaacatctccacttgacattcctgagtttagccggctctttctctgttgcagttctcttgtcttaataaatcggttctatctaggcatcagccaagaagaatccactgggctaggttacagaagaacaagaataacttcaaaagcacttttcaactaccccatccaacttcctcattttactcacttcacagattcagacaaagatccagacatactcaaagaactggtggagtaggaagtggagataattctgctgcattctgaaaaccacaccattaaaacagattaattcctggtgttcagagaaccatttacattgctgatgaattcattacttgtgccacaatgctttcttacccattgcttggctgaaaagaaaaaaaaagtctcaaaccccataagtccccattttcacttttccccatatcataaagctgaaatgcaataacaaactcgctttccgtttttgtcattaacatagcaatttattctattactcctaaagttttgaagacaaatatcaatatcaatgtctaattttgttgcctctctctccaaccagtctgtaagtcttatgagatgtttgctcacccttctatctccagcagttagtgtagtgtttggcttgcactggctcaaatgacagtccttgagtgaatgaatggatggctcttagatacacggtcttctcactgcagtatatgctcattcgctctcaaaagactaacttagcaaatggcactgattaaggtggaatgtaagatcaatcctagttattctaagaagccttaacaggtacagcaccagccccaggaaaaactaaaaaaaaaaaaaaaaatttttttttgaggctgggtctggctctgttgcccaggctagagtgtagtggcatggtctttgctcactgcaacctccaactcctggggtcaagccatcctcccacctcagccttcctagtagctggaactacagatgcacaccaccacactgagctaatttttgtattttttgtagagatggggtttcagcatgttgcctaggcttgtcttaaactcctgagctcaagcgatcctcctgcctcagcctcccaaagtgctgggattataggcatgagccactgcacccggccaaaaactgaatttttgaagtgtcatttcctaggccttttctttcaatctccttttctccccattttcaatatttcctctgccctgaccatgtaatattgtgggaccattttcccctataattttcatatcagtataaaagtagtgagaagaacaaaacatagactgcaggatattttcatctcatcttattgtaagcttaatagaccttaaagcagttagctttgaactttactatgcgtcagaatcacccgaggctctcattcagatgcagattttaaggacccagagactctcattcagcggatctgaatacagggccacaaatcaacagtttaaataagctcccagtgaacagtacaccatgaatcactactttaagacatttatagacaatcaaccacatttcaccagattgtgtaatcattttctgcccagtatttttccagtctgctttaggctagagtaaaagtctgtgaaaaattcatactcaatatactgttaggaatttaatgctttaacattggagaacatttgcattttaaagagaatgcccaaagagagcaaacatttacctcaaagcaatgaaactcaaaggttgattctgagtttcaaccatcatcactaaaggagtggggcagtaaaaaccaccctgtttaatatgcaaatgtactctcgtactatttaaataaaggaagcagtctgatcagcgaagttacctgttttctggggtttgtttacaccatgctgtttcaaatgtaggcttactaatctatcatggtttaggctactagtgagaataaataatattaacttcagctcactcttattagcacctctgccccaagatgtgtgaacctggacgtgttttatctcccagagtctcctttgttaaaagagaatgattacagctccttccttgggttatgtgaggattaagtgagctacttatgcacattcctaacaccgtacttgctatgtaggaagtatccactaacggttggtaattggcactatgataggggctgggcaagcagatttgcagagacaaaattcctgcccttagggagatatgcccaggtagccaagggagctagggaagggacacttaccaggattggaacaaagaatgcctcatggaaatgacatctgagggtttttgatggatgggcagaagcgtcagggaggaggatgcagggtctatggaagaatattcggataaaaacaacagcttgtgcaaagtgatgagtaaaaacttggcttgtttaagagaactgcaaaaatagtttagtatggatgaaatataattaatggaaagcatgcattcccgtgacctgtacagacacacagggccccttatttacaaagattctgtgctttttaaatgttctgttgttaccatcttgaagttacacatttttagacaagaggccttgcatttttactgtgccatgggccctgtcaattatagagttggtcctgagggcagatgtgatagtacgcttcatcagaaaatgtgtaagtgtaggattactcatagacagggaaatacaggtatttatatgagaggaattcatgtaaaaattaatgtcagtcccagaaaaaaatctcgaagagtgtcacgcacgttcatgtgaagagaccaccaaacagactttgtgtgagcaataaagctgtttatttcacctgggtgcaggcgggctgagtccgaaaaaggaatcagcaaagggagataggagtggagcagttttgcaggatttgggtagacagtggaaaattacagtcaaaggggttgttctctggcaggcagggacaggggtcacaaggtgctcagtgggggagcttctgagccaggagaaggaatttcacaaggtaatgtcatcagttaagtgaggaaccagccattttcacttcagttgcttcaggccatcaggatgtatatgtgcaggcttgggctcaaaggcctgacattcctgtctttttatattaataagaaaaataaaacaaaatagtccttaagtgttggggcagcgaaaattttggggagtggtatggagagataatgggcaatgtttctcagagctgcttcgagcgggattaggggcagcgtgggaagctagaatgggagagatgaagctgaaggaagattttgtggtaaggggcgatattatggggttgttagaaggagcatttgtcgtatagaatgattggtgatggcctggatgaggtcttgtatgaattgagaaactaaacagaagacagaaggtctgaataagagaaggagaaaaacaggtattaaaggactaagaattgggaggacccaggacatctaattagaaagtgcccaagagggttcagcgtgattatttgcttggctggtgagttttttgggctctatccttgagtttttttatgttgtcatataccgggccagactgatttaggtaaaaacaacactcttcatttaaaaatatacaaagtcctctttttttagaagtgagtaagtcgaggcctcagagattttggaggaaagagaaatgcaaagccagcaattgtctgttaaagaaggattagaaatggctacgagagagtgagtgagattgatagtgtggtgtagatagctggggagaggtagagggtggcataagaatgggaccaagaataagagtgagtataaaagtgagtataaaagaataggtataaaagtaaagaataggacttcatcagggtgaaagtattggagtgtaccttgccactgaagatcttctatccacttcaagatagacttacgggtggcggtttgaggtaaaaccaggagccactgaataccaagagcctgagaaactgcttgggtgatttgactaataaaggccagtccgttatcagactgtatagaggtaggaaggccaaactgaggaattatgtctgacagaagggaagaaatgactgtggtggccttctcagaccatgtgggaaaggcctctatctatccagtgaaagtgtctacccagaccaagaggtattttagttttctgactcagggcatgtgagtaaagtcaatttgccagtcctgggcaggggcaaatccctgagcttgatgtgtggggaagggagggggcccgagaaatccctaaggagtagtagaatagcagatggaacactgagaagtgatttccttgaggatagatttctacgatggaaaggaaatgagaggttctaagaggcaggctagcgacttgtaacctacatggaagaggttatgaaatgacaacagaatagaatgggcctgtgaggctggaaagagatttttttttttggtctaaaaaccatctgccttgagtggggagggattgacaggtggaaacttcagtgggagagtatataggaatgactgatgagaaggagaaaaactggccatgagggacagaagtaggaatactagttgcttttgtagttgtcttatcagcataattgttgccttgagcaatggggtctgaggccctttgatggcctttgcagtgaatgactccagcttcctttggaagtaaagcaaccttgagaagagtttttattaaagaggcattaatgatggaggacccttgcatagtgaggaaacctctttcagcctatataacagcttggtggtgcaggatatggaaggcatatttaaagtcagtataaatattgatgcatagtccctttgtaagagtgagggcctgagtttaggcaaagagttcagcttgctgagaggtagtggagtggggcagaatggtagcctctatgatagatgtggaagatactatagcatagcctgcctttgctggtgagtggagattaggcctagtataactgccatcaataaactaagtgtgatcagggtgagaaacaggaaagaaggaaatatggggaaatggagtgaatgccaggtggatcagagagatacggtcaggtgtggtatcaggaataatgtgggggccagcctaaaacagtaaggtcaagttgtttgtacagaaaggctacagggcgcactcctggctcttgtgtaagaattctgactgcacagccctgcacttcagctgtgtgtaatgaaaaagggctgggatgagttagggagagctagtgtgggagcagcttctagggctgtttttaaggatttccttttgtgagtttatataacggtttagtcaggatggcaaaaccagttatctaaaggtgaaagtacctaacaatgcctaggaaggaagggagttgttgttttgtagaaggagttggggtttgggagattagccagacacgatcagcagggagagcacgtgtgtttttatgaagaattatgccgagataggtaacggatgaagaagaaatttgggctttggagggagatatgtggtatccctttgagaatagatgtcagaggagcaggagggtgtcctgttgggaagatttgtaggaagcctggccttcaatacccacaataattagggaggcaagggaaacaggcccttgaaaagaagttaatgtggagtgggtagcctctgtattaagatggggatggacttaccctccactgtaagggttacccaaagcatctgtgatggtctaggaggcttttacggtgattgggcagcgtcattcttcagctgctaagttgagaagatctgggaaggagtcagtcagtgagccttgggccagagttccaggggctctgggagtggctgccgggcgagttggacagtctgatttccagtggggtaccgcacagatgggacacagcttaggaggaatcctgggctgtgggcattccttggcccagtggccagatttccagcacttgaagcaagctcctgggggaggaggtcctggaggaatgcctggccactgcagttcaggcgttttgaagttcttgtgtgctggagatgtggctggggtttgtctcacaggggaggcaagtaattgcaactcttctctattattgtacaccttgaaggcgaggttaattaagtcctgttgtggcatttgagggctgggatctaatttttgaagctttttgtaatgtcaggagtggattgggtaataaaatgcatattgagaataagacggccttctggcccctctgggtctagggcagtaaggtgtctaagggttgttgccaaactggccatgaacggggctgggtttttatatttgattaacaagagcctaaatgctaactgatttaggcgaggtcagataaagaaaaatgagcattaaccttggctatgccttcagctccagccacctctttaagaggaaattgttgggcaggtgggggagggctagtcatggaacaaaactgtaagctggaccgggtgtgaggaggggaggtgatagaagcattatagggtgggggagctgaggctgaggaagaattgggacctggctcagtctggcgaggagcagcctggggaggaggggagaggtcagatgggtctgtagaaaaagaggattcaaaggactcagagcttggggtggaaactgaaggaacagccaggagagaaagaagaaagatttgggatgagtggcattgggagcagagactagggagggactaatgtgtaaaagaatgcctggacgtcaggcacctcagaccatttgcccattttttgacaaaaatcatccaggtcttttaagatggagaaatcaaaagtgccattttctggctatttagaaccattattaagtttgtactggggccaagcagtgttgcagaagaaaataagatgcttaggttttaggtcaggcgagagttgaagaggttttaagtttttgagaacacagactaagggagacaaagggagaatggagggtggaaggttgcccatagtgaaggaggcaagcccagataaaagagagggtagagatacggagaagggggatggtgagcagccctgggctgcaaggtaggagaggagccaaagcaggcgtccctgcaattgacttgccaccaagggaatgtgggtgaatgatgaaggcaggcatccctgtggtgatcagacacgaatggagtgtgggtgaataatcaggcaggcatccccacagtgattaaacaccaagggaagactgtcttcctaagtccgtgaccggtgccagagttttggctccacagataaaatgtgtctcctttgtctctactagagaggaaaaagaactggaattggaaggacagggagattgaagggtagggagagagggagattgaaaggtagtcggctgggcacggtggctcatgcctgtaatcccagcactttgggaggctgaggtaggcggatcatgaggtcaggagttcgagaccagcctggtcaacatggtgaaaccccatctactaaaaatacaaaaaattagccgggcgtggtggcattcacctgtagtcccagctacacaggaagctgaggcagaagaatcgcttgaacccaggaggcggaggttgcagtgagccgaggtcatgctgttatactccagcctgggtgacagagctagactttgtctaaaaaaaaagaaaagaaagaaaggtagcgagagaggctggagaagggagtgaaaagaccgcttacccgatttgaaattggtgagatgttctttgggctgtttggtctgaggacctgaggtcataggtggatctccttaaggagtgagggcaaggacaggggaccagtctcctgaaaaagtcctcctgtcccgggtttcagcaccaaatgtcatgcacttctgtgtgaagagaccaccaaacaggctttgtgtgagcaataaagctgtttatttcacctgggtgcaggggggctgagtccgaaaaaggaatcagcaaagggagataggggtggggcagtttaccaggatttgggtgggtagtggaaaactacagtcaaacgggttgttctctggcgggcagggatggggggggcgtcacaaggtgctcagtgggggagcttctgagccaggagaaggaatttcacaaggtaatgtcatcagttaaaggaggaaccagccattttcacttcttttgtgattctccagttgcttcaggccatctggttgtatatgtgcaggcttgggcacagaggcctgacaaagagctccttctctaaactttagaattcagcaagcaatagtttttgcttcacttaggttttttaagtcatccatatgaacatacatgaactgtatcacacattggctgtcagtgaggaatttatcttattgtagctaagaaagtgtgtgatattttattcttctgttgatgattcccctctgaaagtctcttgtgcaccctcctctgccagaattaatcattgcttctagaatgttcttagggtatctttgtatatgggtctttaataattatcagaaaaatttctagaaatgaaattgctaggtcaaacaggaaatacatttttcattttgatagatattttttaattgtccttagaagagtaatgctaatttacattcttcctaacagtatataagatgtcagacttgaaatacttttgccaacacaacgtagtaccagaaatttttatttggtaacttgatagataggattggtattattgtattatgtaattgcattgctgttatttaaaaagaagtgaagtatcttttcatatacatatttaaaagccatctgaattattattgtattttttaagacagagtctccctctgtcgcccaggctggagggcagttgcccgatcttggcacactgcaaccttcacttcactggctcaagtgatcctgcctggcctcagcctcccaaagagctggaactatgggtgcatgccaccatgcccagctaatttttgtattttttgtagagacggggtctcgctatgttgcccatgctggctttgaactcctgagctcaagtgatccacccacctcggcctcccaaagtgctggcattacaggcatgagctacagcactcagataatttgaattatttctgtgaactgcctgtccatgttctttgtcgactttcctgtttataattggtctttgtaattgatttgtaagaacactttatatatattagaaatagtacaccttgtccctcatgtatttaccagcttgtcatttccattcttccagaaagaaaatcttaatctgtatgtagacaaatttaccaatcatttctttgaaagattctgagatatttcatttttagaaaaccctttgtactctgaaagtagacattctcctgaattctctttttgaatttttatggtttcacttaaacatttttttttttaacatcttgaaacacttggaacttgctttggtgtgatgtgtgagttaaggaaacaaattttttcccaattgtctcaacacccaattattcaaaaacaaattttccccactgattcaaatcgccaccttcattataatttaaattctcatctattttgcgtctcatttatagttctgtattttgttccattgatttgcctatccatgagctgatgtgaaaccagttcagtacttacagcttttataatcgatttgtttctttgtttgtttgtttgttgtttgtttgttttatgacagagtctcactctgtcacccaggctggagtgcaatggcatgatcatagctcactgtgtcttcgaactcctgggcaaaagtgatcctcccacctcagcctccagagtagctgggactacaggagcatgccaccacacccagctaatttttttatttttagtagagatggggtctcactatgttacccaggctgttctcaaagtcctggacccaagtaatcttcctgcctcagcctccgaaagtgctgggattacaggcataagccaccgtacttggcctgtaatctattttgatatttgatggggctgaccccttctcattactcttgtttttcaaaaacttcctgagtgttacctggttacttttccatatgaactttataatcatcttgttaggttcctcccaaaatcctgttggtgacatgatcagatctgaatttcaaaaagatcattctggctacagtgtgaagagaagagtatatgtaggaagacctgcaagatatgcagaggttcaccagagatgaggggaacttggacaaggattgtggcagtggagatggaaagaaaacaggatcaagtgatatggaggaataagaattgtcaggacttgatgaatgtgatttagcagcttaggaaaatgtaagtgttttttctagtcttgcttagagcagtcctagactttagtccagttccagaaaagccccattctgcatcaatccaaaaatacagaattagttttatagttgccctaaaaataaaggccctcttggggaaggacctggagctcttctgtagagagatatcacaggttcagacaagataccccaaactgaattgccctttatgagagataccaaaccagctctagagcatttgataggctgaagagatgtcctcctgaccccaagcctcattctaaatggcaatggtgtattctgagatactctgtcgcattacatttggggcctggagatacaacttgtggttggtgaagaaaaaactatgataccgcaacagttttcctttcctcagttcctcaaaaagttaagcagaattaccataccatccaacaattccactgctaggtatatatcctaaagaactgaaagcagggactcaaacagatccttgcatactaatgttcatggcagcgttattcacaataaccaaaaggtggaaacaacccaagtggccctcaacagatgacagataagccagatgtgatacatacatacaacggattattcagccttaaaaccgaatgacactctgatccaggctacaacataaatgatcataggaaacattatgctaagagaaacaagccagacacaaaaggacaaatattatttgtcttcacttctatgagcacctagagtagtcaaatttatagagacagaaagtagaatggcggctaccagggactaggtggaggaggaagagggagttattgtttaatgggaatggatagtggtgatggttgcacaaccttgtgaacttaatgccactgaattatacacttgaaaattgttaaaatgggctgggagcaatggctcacgcttgtaatcccagcactttgggaggccgaggcgagcggatcacttgaggtcaggagtttgagaccagcctggccaacatggtgaaaccttgtctctactaaaaatacaaaaattagccgggcatggtggtggatgcctgtaatcccagctacttgggaggctgaggcaggagaatcgcttgaacctaggaggcagaggttgtagtgagccaagattgtgccacagtactccagcctaggcaacaaagcaagactccgtctcaaaaaaaaaaaccaaaaagtggttaaaatggtaaattttattttatgtatattctactgcaataaaaaaaaaattaagtttcttctttcctaggaaagaactggtcttgggagaagcacctcctctcatcactgggacaaattatgatcatgtgactatgtttataaatcatatctctgcagcctaggtatcacagagtaggcaatgcactctctcacacaaaatgatacaaaatattttgggaagcaaactgtaaagcctgcatctctggaaatcccctcccaaagtggctaaccacaaagggaggaaacataacagggtgaaaccaaaagtttacagtcaaaacttagagtctatgttacttcattctgtactagatagatgcagtgcagatgtgcattcaggaatgataggattggagcatttaagctgtctttgctttagtctttgctccaaattctagggatagtcttatccccaaatgtcttttgaagcaagtaagtttgaagcatttggctaaacaaaagctgtttaactcaattttcaaaccacctgaatatgaagttaccagaattagtatcaattgaaaatatcagaagacagctaaggacaaaactgagttactgtcagtcaatgtggtgttaacaaatgaacactgagctaggaagctgtcaagctgcccatactacttccatgaccccccccaaaaaaaatattccagaggacagccttagtgatctgtcataaaatatgggaacatatacatgcatacatgcatgaacaatctatagaatgaatagtaacatggtatccaaaaaaatgaaagcataattgattaatatcatgctcattggtggctatcaattacttatggtgatgaatttctttggccaagttccacacaaaaaacaaatttttctaaacacatagtcgacataggattgaagagtgtgcatccgctcagctgttggctttatgacaggacatgaagggtaggaataaagggaaatgcgtctcaagggaggaaggcaacatcctttcaagagtcattgttggccaggcgcggtggctcacgcctgttatcccagcgctttgggaggccgaggtgggcagatcacctgaggtcaggaatttgagaccagcctggccaacatgacgaaaccctttctctacaaaaatacaaaaattagccaggcatggtggcgcatgcctgtaatcccagctatgtagaaggctgaggcaggagaatcaagcctctcgggaggcttgaacccgggaggcagaggttgcagtgagccgagatcatgccactgcactccagtttctaaatttctaaggattattttttctaattctgtgaaaaatggcattggtaattttatagggattgtgttgaatctgtagatttccctggaaagtatggtcattttaatgatattggttcttccaattcatgagcatgagatgtttttccatttgtttgtgtcatctatgatttctttttttttttaattatactttaagttttagggtacatgtgcacaacgtgcaggttagttacgtatgtatacatgtgccatgttggtgtgctgcacccattaactcgtcatttaacattaggtatatctcctaatgctatccctcccccctccccccaccccacaacaggccccagtgtgtgatgttccctttcctgtgtccatgtgttctcactgttcggttcccacctatgagtgagaacatgcggtgtcatctatgatttctttcatcaatgtattgtagttctccttttagagatctttcaccttcctggttaaatatattcccaggtagctgagatcgtgccactgcactcccacctgggtgacagagcaagactccatctaaaaaataaataaataaataaaaataaaaaataataaatgtgtagctattataaatgggcttgccttcttgatttggtcctcagctagatcattattgatgtatacaaatgctaccaatttctgtacattaattttgtatcctgaaactttcctgaattcatttatcaaatctaatagttttttggtggaatctttggggttttctagatataagatcatatcacagcaaatagtctaatttgacttcttttctaattttgatgcctttttttttctcttgcctgattcctctggtgaaaactttcagtaccatgttgaataagagtggtaaaagtgttcttgttctagttcttagaggggatgctttcaacttttccctatgaagtatagtgttggctgtgggtttgttgtatatggcctttactctattgaggcccattccttctatgcctagtttgttgaggatttttatcatgcatgaagggatgtcaaatgttatcaagcattttttctgtgtctattgagataatctgtttttgttattaattctgtttatgtgatgtatcatgtttattgatttgcatatgttaaacattccttgcatccctgggataaaacccatctgattatgtgtattatggggtttgtttttgtttttgtttttgttttttttgagatggagtttcaccctgtcacctggactggagtgcagcggcatgatctcggctcactgtaacctccacctcctgggttcaagcgattctcctgcctcagcctcctgagtagctgggagtacaggcatgcgccaccatgcccggcaaattttttttttatgtatttttaatagagacagggtttcaccatgttggtcaggctggtctcgaactcctgacctcgttcaccatgttggtcaggcttggtctcaaactcctgacctcgtgatccgcctgcctcggcctcctaaagtgctgggattacaggtgtaagccaccgcgcccggccatgtattatgtttctgatgtgctactggattcaatttgctaatattttgttgaggatttttgtgtttacgttcatcggagatattggtttgtggttttgttgttgttgtgtccttgtccggtttgggtatcagggtgatacacctccttgatttttcagaatagtttccaaaggatcagtattagttcttgtttgcatgtttggtagaatttggccatgaatccatctggtcctagactttttttttttttgccttggggttttttttttattactaattcaattttgctgcccgttattgatccatccatgtattaatccattttcacgctgctgataaagacatacctgagactgggaaatttacaaaagaaagagatttaatgaactcacagttccacgtggctggggaggcctcacaatcgtggtagaagatgaaaggcacatatcacatgccaacagacaagagaagagaacttatgcagggaaactcccctttataaaaccatcagatctcatgagacttattcattatcacgagaacagcatgggaaagacctgcccccatgattcaattacctcccactgggtccttcccacaacacatgggaattgtcgaagctacaactcaagatgagttttgggtgaggacacagccaaactatatcaatccaggtgttctgtttcttcctcgttcaatcttggcaggttatgtttttccaggaatttatccatttcctctagattttctagttggtgagtgtgcagctacccataatagtctctaatgagcttttgtatttctgtggtttcagttgtaatgtctcctttttcatttctgattgtgtttatttggatcttctctcttctttgttagtctagctagtggtttatcatttttgtttatcttttcaaagaaccacttttcatttcaataatcctttgtatttttaaatctctatttcatttagttctgctctaatctttgctatttcttttctactactaactttggggtttggtttgttctggtttttctagttccttgaggtgtaacattagatcattaatttgtgatctttctacttttttgatgtaacttctcacctggtgctgcttttgctgtatctcacgtgttttggtatgatgtgttttcattttcattcttttcaaaaaaatttttaacttctgtcttcatttattcattgacccagcaattgttcaggcgcatgttgtttaatttgtatagattccaaagttcctcttgatattgatttctacctttattccactgtggtctgagaaaatacttgatctaattctgatttttaaaaatttgttaagacttgttttgtggcctaacatgtggtttatcttggagaacatcccatgtactgatgaaaagaatgcaccttgtagttgtatgtggtttgggggcagaatgttctgtaaatgtctgttaagtctatttggtctaaagtccaatttaagtccgatgtttctttgttaatgttctgtctctgtgatttctctagtgctgtgagtggggtattaaaatcccctgctattattgtattgctgtctatctttctttaggtctagtaatatttgttttgtgaatttgggtgctctgatgttgggtgcatatatatttagaattgttatatcctcttgctgaattgatcccttgattattatataatggccttcatttttttaaattatattatgtttttggtttaaagtctgttttatctgatataagcatagctattcctgctcacttttgatttccatttacttggaatctcattttccacctctttacttttagtctatgtgtttttatgggtaaggtgaacttattgtaggcagcatatagttggatcatgttttttaaatccattctaccaaactctacctttaaagtggcacgtttaatccatttatattcaaggttaatattgacacaggaggctttgttcctgtcaaattgctgattgttttcaagtcgtttttataaattctttgtttcttttctttccttgtctttgtggtttgatgaaattctgttgtgttgccatttgattcctttcttttcctcctttgtgttgctgttttatacgaactgtgaactttctagattttctagttggtgagtgtgcagctactcgtaatagtctctaatgatcttttgtatttctgtggtttcagtcgtaatgtttcctttttcatttctgattgtgtttatttggatcttctctcttctttgttagtctagctagtggtttatcatttttgtttaccttttcaaagaaccgcttttcatttcaacagtccttcgtatttttaaatctctatttcatttagttctgtgtgtcttttatatttctgtgtgttttcataatggtgaaaattaacctttcacttccatgtttaagacccctttgagcatttcctgtacagctgatctagtggtgacaaattccctcagcatttgcttgtctgggaaggagtttatttctccttgatttatgaagtcagcttctggcaggacacaaaactcttgactgacaggttctgcttaagtttaatatttttctgtggctgctaattgttcacatgttttcattatgaagtaattttaatgccactttggtgggctgttaatccctttgggggcctcatgcaagcaagagctagcacaaaggatcaatttaggtcttgttctgggggttacctagaggggcagcaaaacctcagtagggtaagccataaataatctaaagttcctaagagctgaagaagaaggaaatggccatccaaaatagagctgtacttgccccagctagggaaattaggaacgagagatacccagtgatgagggttgggtctttgaagaagtgtctattaatatggccaccagagagctctaaacatctgccaagtttctagagccccctgttagctcaacataacagtaccagccaggtaagcattccttgtaccccatacctcttctcccttcctgcagtttatgcttgcagggtcagaaaccacacttggcaaactgcagaagaaaaggtaaaagcaggccgggcgtggtggctcatgcctgtaatcccagcactttgggaggccaaggtgggcggatcacgaggtcaagagatcgagaccatcctggccaacatggtgaaaccccgtctctactaaaaatacaaaaaattagccgggcgtggtggcaggcacctgtaatcccagctacttgggaggctgaggcaggagaatcacttgaacctgggaggtggaggttgcagtgagccaagatggcaccattgcactccagcctgggcaaaaagagtgaaactccgtctcagaaagaaaaaaaaaaggtaaaagcattagatggaatcacatggaaacagcctacctccttccttcctcactgcaggcttctcatctgagctcgggaaaggaggagcctcctagatttgattatgtgatgattacccaagattggacattttaattactaattgcaagacctttttattgcacatgaataaatggaatagtcatattgtcccaaatttaatcgagggtgggacaaagactaattccacagaatacatttaaagcaatagtgggagttaaaagtaaaattgcattataattagaccctccaagtcctgcctgtttaacttaaggttgctcacactactgaggcgagatagaaaagtagttggtgaatttcaattggaaaagtgtagccatgggaaggaacctaggagtctcatctctctcctgaagttaatctgcccaatgtctcaaaggcctcaagaactgttctcagggaagtattagaatgcaaataaaaccaccattctacttttgactagaaatcctctggtggttgcctgagatggggaggtattgtttaatgggtatagagtttcagttggggaagatgaaaaagttctggagatgaatggtgatgtcacaacaatgtgaatgtacttaatgccactaaattgcacgctaaaaaatgttaaaatggaaaatcttatgtattgtatatttcatcacaataaaaaaatagcataggatgattgtttatccactgggaaaataaaataaaataatcattattacctctaaaaccaaaataaaaccctgatggatgctttgccagttaaagcatcttcagaaagatgacaagaagttagacactgtatccacaggaacaatttggcttaggcagaaaagggagatttgtaggctcacccaactgaactgcaggaaaggtgggtatgagctggacctcaggactgaccacacctgggactggaacaccacccgccctttctctgtctcttgtttctgcttctctcagtgcaccagccactctctcccaccacagactggcttcttctgcacagcctgtgggacatggccaccgaacagctcagactcatacctcacaggtttgccacctgagcaaacccaagatcttccatctggttgaaggtcagaagtctcaggactgaatttggggaacatgcctatctgtagccaatcactgagttagggaagcagatcagtcagaaactgggggatcccattaaaccacactgtggaaagcagtattcctgagaacagagtgctactccactctaggcagacaaagcagtagccaccagctatctgcacagtccttcccttctctggaacagatcccaaacagtgctgggaagacctcagcagcacagttggaccacctatgtgctccttccgccctcattacttgtacatcctggatccctggatttcttagctaatgctgggttggcagaaatgagggggaggggagcagtagaatcctgccctaaattgcagccagtcatctgaggtcattttttccttgtcaatgctatatccccagagggttggacccttctctattctgttatgctttattcagacaatttctagaacaatgttggccagtatagatgattcccgtcattttatctctactacctaggtccaaagattccccccacaaccttgtgaatctctgactcagtgttattagtcttaaaaacccaggtgctgaaccagactatgctgtgctcctctttggagtgaatcttggattatcaaataatcaaataatggctaagatcagcccttgtttccccatgtccctgcttagtgccagctctgtcttcatcccctcccaggcttggccacccttctgctgagatgcaccctagcatgttgcccataaaggaatgtgaaaaaagtatctacacttctgaagatagtgtgctccacccttcaaagctttaggaagataaatttagacataaaacaggaagtatttctctgtgtggctaagagtgatctaagagaagttatttcctcaagatattttgaagctgtagtgtggggaaacagttctcaaaccccagtgtggatcaggatcacctggagggcttactaagctacatattgttgggtccaccccagagtttcgattcagtcgatcaggggatcagaggtggggcctaagaatttgcatgtttttaactctttttttttttttttttttttgagatggagtctcgctctgtcacccaggctggagtacagtggcaagatctcgactcactgcaacctctgcctgccgggttcaagcaattctcctggctcagcctcccaagtagctgggattacaggtgcgtgctgccatacccggctaattttttatatttttggtagagacagggtttcgtcatgttggccaggctggtctcaaactcctgacctcaagtgatcagcccacctcagcctcccaaagtgctgggattacaggtgtgagccaccacacccagccagaatttacatttttcaaaaggtccctgatgttgctgaggcaggaccacactttaagaaccactatagtagaggtttaggaagagacagagaaaaatctctccaggctacaagactgtctgatgctgaaggtcttggcctaggtcagctaaggtgctctttagggttgatattctgtgattgttaaacaggtgactaaatatgtatctgtgtcaagctactcttattatcattaaacagttcttgactgcttactttattaaaatataagaatttccaagagcttcggacctctgatctatatataacagaacttcattaagtataactcactaagtcacttagtgaaaagcttgaactacagaatagtctaactaattgccctttcaaataggcatttaacaataatttcaactagcctcctacaaaactgtttcacagcaaagctttcactgatgtttttgcaaaatgaatttaattactaattatcatataaggattagcatatagctgatatgtaaatgtcttaggtatgatttaaactgttgagtcaactgaacatgtaccttcctctcccacttcctccaacaaataaatcttacttgtattttaatttaatactgtgtccattcttctgaaatagctgtttattctgaacatctaattttagacatataactaatatggtacaattttcaactgccggttatttaaatgctgccccctccctgacacaaataaatcttatttacatattatttgcttcataagtattccaccatcctgcagtcactgtgatcattgtccccagctagtctttgatctgtgataattgtccacaggtagtctttgatcatatgttctcctgtctggaggaactaatatgtccttccaactctgcccagccttcaggtacaatttaggcccctacttttctcttaggctttcttcagccactgtaacttttttaagtttctcccttatccaaagtcccttactacttagaacctcggaagtaaagggacctcagagaacatccagtccacgctgccctctgtttaaatgtgtctacagtgtaccacaccaaggaactcccacactctgaatgaacagcccagtgatcaggagctttgaatcaattcttggcacctaacagtttgtgaagagtctgctaaactccctctatcagaaatcccagaggactgagaacaggtcatccttggaggtatgtaatacagtatttaaccacctttctacctgagtgtgcttacctgcaaagggtaatgtcgatattaaccgagaatgatcatggttgtcacatttaaactaataataataaagtacacaatttattatgcagaaagaatcatgccttcataatcagtcttcacaaagattcctttaactctctgcacccaccattcctaatcctggaaaattatttctctttgctctttgctcatccataggctctttgacaaaagtctccagaaaactactgaactacacacatcaacaataaagaagtcctaatgtccaaaaccttgcttgtcacttttttgtttgtataatttatctccacaactagatcataggcttctagaaaacatgagttctgttttaaattttgtgccccttggcagctgtatctgaatggagtcaggatctggaagcccaagtctccttgtcaatgtctgcttggttcccaaggacacctgtaaatggaagaggggcatagtacacagaagacattgctggcaagtgtggtctctttacgatcaggtgagtcatctgctgaaatctttataatagacttctaccttgatggaatgggttggactaacgaggaaccaccattactccaaggcccagagcagagctgggccatcaactgtctccacacttcctgtcttctaggtgccaccctgatccctcattgcctttcagctgcatgtctaaatccccaccccacccctcatctagttggctttgattccaaggacctaggactggagtagggctttcacaaataagacagcaggaatgtaatgcaacctaatgagcagactaagaaagcatctatacagaagaacagacatacaaataccaaggcagataagagtgacaaaagacaaaaaaaaaaaaaaaaaaaagagagagagagagaaaaagctgaagccggtcagaattcatcaggggatggtgtatgtctaccacctcagtggtcctttaaaggtaaacgggcttatttttcatgcaccagcctatggtcccttcactgggacactctcaacatccccggctttttataactctggctggaaaggtcagctctgaactcttcctgggcagggaaaggagttcacatagggattggggatggagtacgggagcagaggagcagtgcctatgttagaaaccggtaggaaggccgggcgcggtggcttgcgcctgtaatcccaccactttgagaggctgaggtgggtggatcaactgaggtcaggagtttgagaccagcctgaccaatatggtgaaacctcatctctactaaaaatataaaaattagctgggcgtggtggcatgtgcctgtagtcccagcagctgggcaggagaattgcttgaacccaggaggtggaggttgccgtggggcaagatcgtgccactgcactccagcctgggtgacagaggaaaactctggtttcagaaaaaaataaaataaaataaaataaaataaaagcagcagcagcagctggtaggagctggatgcctggaagaataaagagcctttctcccttaggagtgagcctaatagatggatctttactccctttctcctgggccctctactggtctttgcttctcccatttttcacattctgactgcatatacatacatggcaatatatagagaatttggccccttgactctcaccagaagcacccccccagccccatgactctgatttcttcaatgacatacgttaagtactttttctccaaaggtgaaatgatcctaggctttctcaagggcaatgattctgagccttacccacattttagaatcagcttaggaaacacaaaaaaatctcaatgaccaggcagcacccccaagccaatcaagtaagaatctggggtgtaagactcagacatgagtatatttttttaaattgtttatttttatggggacctagcaggtatctatatttatgggatatgtgagcaatttggatacaggcaaacaatatataataatcacattgggggaaatggggtgtccatcacctcacgcatttctcatgtctttgtattacaaacattccaattatgcttttagttatttttaagtgtacaatgaatttttttttactttagccacagatctaggtacatttttaaactccccaaatgattctaatatgcagtcaaggctgagccagctgccctggagatggtccatcccttttcaggcctcgctgcacatcagactcatctgaggaacttttaaaaccactgttgcctgtgccccacccaaaccaattaaaatcactgtctctggggactacagccaagatatcagtatgattctttttgtgtgtgcgataaactatatataacataaaatttacctttgaactatttttgagtgtgcaaatcagtggccttaagtccgtttgcagtgtgtacagccatccccagaacttcttcatcgtctcaaacagaaactctgtacctattaaacaatacctccccattcccttctcccactagcccctggcaatcacttttctacttcctgtctctatgaatttgaccatgtgaagtacctcctataagcaaagttgtacaatatttgtccttttgtgtcttatttcacttagcacaaactttctaggtttatccatgctgagcatgtataagaatatcattccttttttatgggccagacatagtggctcatgcctgtcatcccaggagtgggagggatcatacgccgttgggagaccgaggtgggaggatggtttgagcacaggaggggttcaagactagcctgggcaacaaagggagaccctatctccaaaaatatagaagaagctgggcacggtggttcacgcctgtaatccctgcactttggaaggccgaagtgggctgatcacttcaggccacgaatttgagaccagcctggccaacgtggcgaaaccccctctctactgaaaaatacaaaaatcctctgggtatggtggtgcacgtctgtaattccagctgctctggaggctgaggcacgagaattgcttgaacctgggaggcggagggtgcagtcagtcgaggtggcgccactgcactcgagcctgggagacagagtgagaccctgtctcaaaacaaaaataaaacaaaaaataaaaacaacaaacagacacttatttttgaaaaaagaaaagagaatgtcgttatttctatggctgaatatgattccattgtatggatatactacatttttttaaagaattttcaattctttggggtatgtacctagcagtggcattgttggatcatatggtaattctgtttagctttttgaggaattctttatccctcatgtaactcttaggtacagccaagggagaggaaggaacgctgatatggccagcattcctcttaaaacctaagagtggccaggcttggtggctgatgcctgtaatcccagcactttgggaggccgaggcggggaatcatgaggtcaaggaatcgagaccatcctggccaaccaacatggtgaaaccctgtctctactaaaaatacaaaaattagctgggcatagtggcgcacgcctgtagtcccagctactctcggaaggctgaggcaggagaattgcttgaacccgggaggcggaggttgcagtgagccgagatcgcgccactgcactccagcatgggtgacagagcgagactctgtctcaaaaaaaaaaaaaaaagaaaaaaaaacctaagagtgtactgattggtagttggtaaatattattgaatgaatttcttcataaattatatgatagtccaatgcatttgttattatcccacattcaaaaaactattctgtggattaatgtagttattacccggttgaaaatcccattttccattcgaaataacatcccaattgaagtttccacccacagttgaaatgtgtcccctgtgataatttaagtttcagagtttcttaatgatttgctttgtagataataaattaggcctgattcaagacttttcctatcacaatgccatttttgtaataacgcctggtgttattcctattgtaatactaatgctcagatagcttctcttgaatagaaaggagaagctgtctatatccatatgaacaagtacatataaatgtcttccatctcataaagcattgccaaactatccttttctatcaggcctcaacatttctacctgaaaattaactgcaaggatgttttactacattataatatacccttcctacccaagtggtgtctgctctaagatgtcaaccaccttttgcaatacactattgccctttctgcaaattggacagtttcttcagaatttacaacttctgtttcaatgtaggagccaggtgggatgctttacgcagagacagggatgggtggagacagacagaaatacatgcagtctccctataaaggttcttcaatcccatacctcaatgtatacaaatctgtaaaaatgtatacatggataaacatacatcaaatagagaaatcccaaagttcactttggggaaaaaaaaaagaaaaagttgccaaccagtctaagcaatactgaaaaccactgttgtctcaaataattgatgaatctcttacctttttcttgttgctttaccatttttaaaaaatgtgtctgaagttttacaaccattcctggatgtgaagtggaacgatagtggtttggggcatcagctggggtaggtcagggggataggaaaagcagaggagagtcagtgccacctggagagttgattgagctgagaggagaagtggcagcacctgtgagttttgagatctactaggtatgttctaagatagcactttctaaaggaaaatccatagaacactagttctgggacacacttagcaaaaacaggcccagtaagtaaagaagtttggagacactctatataccggtgaagccacaacatattgcagtttcttaaaggctctgagacacacagaaaagaaacctgaaaaactttaacacagcgtttaccaaattagttttgccatggagctctttttgtaagtaatgcactaataatgtgtttcaaggaactggtgttccccaggacataacttgggaaattttgctctagagcaactggatactcttgcaaccattgttcttatatccctggaccttcaaaccctattattattattttgagacagagttttgctcttgtcacccaggctggagtgtgatggcgcaatctcatcttgggtcgctgcaacctctgcctcccgggttcaagcgattctcctgcctcaacctcccaagtagctgggattacaagcatgcatcaccaggcctggctaattttttgtatttttagtagagatggggtttcacaatgttggccaggctggtctcaaactcctggcctcaagtgatccgcccgcctcggcctcccaaattgctgggattacacgcatgagccaccgcacccggcccttcaaaccttattcattcctcctagtgttccaagccctcattcaaccacagcttctcacaactctcatttccttttattagccacttttctttccaagacaatgtctatcccatcccttgaatgccacatattaaaatccacctcctgcacctttgccccttctcatttcccccacttggaacatatccatcccttccttcaagatccagccctaaactctgactataggaagccttttctgaagaagtccacttacatggaatgttcagttatttaaattctgctttatttaatcctagtgtatcacagagaaactgctggtgatacagttacatgaatcttctcttgggaataatttgtcatctctacctttcatacttactcatttaacaaccaggctaaatctaataccattgccctctctactgcacgtttactatattccatacaccagaaatgtttgtttcatttccttctgactaaaccaagtagaatgtagaataacacatttgaaagttggctgaggcgggtggatcacctgaggtcaggagttcgagaccagcctgaccaacagggtgaaaccctgtctctactaaaaatacaaaaattagccgggtgtggtggcgcatgcctgtaatcccagctactcaggaggctgaggcaggagaattgcttgaacccaggaggcggaggttgcagtgagctgagatcgtgccattgcactccagcctgggcaacaagagcaaaactctgtctcaaaaaaaaaaaaaagtttaaacattctttaaagtatagtgattcatgcaaccaggcacagccacagactagtaaaaaataatcccaaatatttgttcagtttgcccctcctctccatgcccaatgttgtggctcttggtggaggcctttttttcccatctacattaccagaatacttcttggacttccactctttcccctccccacattgctgcccgagagatgtttcaaaaatccaaaagtgaaatcactatcctgcttaaaatatttcaattactctccatcacttaaagcagtgtttctcaaactgtaaacatttagctttaggggttttgacatatccacataccacctgttctcttgggtatttaatatacttccttaaacaaaatcaaattttaacaagtaaatttgatatagtcctaatcaatactattagttgaaatggcaattttgattggcagctatttttcttttctgtattaatgtataactattaagataaaaatgttcatccatgttatgacttaaaagcatcttgtataacaccagtggggcatagatggctctgtggtaggtatgtatctacagaataaaatctcagcttttggcatgacataatctggtcttcactgccttttacatcgtggtctctgtccctttcccatcagtatccccagctctcctggagcaactgcagttctccaaccttgctgtgatgttttctggctctgtgcttttatagtatggtattcttttttttttttttttttttttggagacggagtctcgctttctcacccaggctggagtgcagtggcacgacctcggctcactgcaacctccacctcccgggttcaagcaattcttactcagcctcccgagtagctgggattacagctgcctgccaccatgcccggctaatttttgtatttttagtagagacagggtttcaccatgttggtcaggctggtcttgaactcctgacctcgtgatccacccgccttggcctcccaaagtgctgagattacaggtgtgagccactgcggccagcctacagtatggtattctttctaccctgtttcccaagccatctcctctcatctttccacatggactgaagggctctcccctggatttgtatacttcttgctatcaacagagcacttactcctcctgttccttgtcttaagcagacatcgggtttggtcaacattgtattctgcaaactctaagggaaaactggtgaagaccgaactgtggtgtgggaatcccgcctagctcatctgcctgggttgtctttatctttgtctcatgactaggctactttacaactctgagatcgcagtgaacttacagaaaactgatagtgatgcaagtgaatcttgtttataattaaataaattgtcaggtggaggttcaattgcattccctcctccactgtggaagaagctagttttgcatctaggaagcaacttcatttcagtgggctgacatatttatctggtctttgggttctcctctgaagtaattgtaacacctttctgattcccttgttagttaatgagttaaaatctctgatatgtgttcattgcatatttgttgcatcatgatttaaactttcttgtagaaactattcttaagaccggacgcggtggctcatgcctgtaatcccagcactttgggagggccgacatgggtgaatcacctgaggtcaggagttcaagagcagcctgggcaacatggtgaaacccgtctctactaaaaatacaaaatattagctgggcgtggtggtgtgcacctgtaatcccagctactcaggaggctgagacaggagaatcacttgaacctgggaggtggaggttgccgtgagccgagatcgtgccattgcactccagcctgggcaacaagagcataactccgtctcaaaataaataaattaatcaaataaaaactattctttaacagtatgtatttgatacagagcctggtgccccaagaatatgtgttcatgacggaatgaatgattgagtgaatgaatcaatttagacaagtaggtgtagactttccatggtcaggatcaaatatttaggtctggatgattcatcatgaaggaagagtgtggaatactagcatgatgcctagctactattacaaagttgaaatcgaaatgagaaaatttccctaatcctttggaagatggtggcaagaatgggctgcaggggatgtgctgagcctgtgtctgtgggtcacctgagtggctcctacagaggctgagtcagagaggtcacaaagtgggctgagcatggaataagggatggcagacaatgaatgccttttttttttttttagacagagtcttgccctgttgcccacactggactgcagtggcacaatctcagctcactgcaacctccgccccctgggttcaagtgattctcctgcctcagcctcccaagtagctgggaatacaggcgcgtgccaccacgcctggctaattttttttggtgtatctttagtagagatggggtttcaccatgttggccaggctggtcttgaactcctgacctcgtgatctgcccgcctcagcctcccaaagtgttgggattacaggtgtgagccaccacgctcggccatgaatgccatttaagccacataactcctgcttcctttccctccattgtatacagatccaaggaccagcaggttttctcctgcactgagtcttttaaaccctgtccaactgtgaaataatatatcattctggcgttttttttttttttagttggagtaccatctatagttaaactgtataaaggaaaaaaatcctatgagtcagtttccagacctatgagtgctttgaagattacatcaatggagttccatatattgaaaccacaagcttcctgccaattgtctggatttacaaagatctatttcactttgaactaatgaggaagaactcccaaggctattatctatagacatgcatgaacttttaagggacatttaaaagccagatctttacccccaatttttctcctatctttatataaacataacggttaatatagaaaagaaagctgaattactatttacattgttcccaaaattgatgtagcagttttaagagtactaatatacaatgcacatacttctccctgacgctatataacactattaggtactattattttccactttttacaggtgtggaaactgaagctcagagaggttaagtagatcacctaagttccaccactagactagtaagtggcagcaacatcaagtttccaattcaggactaactttaaaggtcacattctactataccattatgcccataagagaaccacaggagtgaaattatgtcatagaaatattaacatttgattgaggagagaaaaagaccagtcaaaaaaggtaatgtcagtttgggtagaggatggagggtggcgggtagtgactggatagggtataaaattgctaggtggaaaaaaaggttgggagtagggtaaaacgagggaggcagtcacttgggaagccagggtgggggcgtacaactcgaggtcaaaacagtgcccagctgagctatattggctaagagtaaataacactggcacccatttaactcgtatgcacacgagaggttgcataagcaacgctttgtacatggcagacttttctaagaagtctaaatttagaagacctctgttgaatttaaattaaaaggcaggattccagtaaagactagaagattttatttccataattggcacatgcaggtaacagatcctcagaaaatatttgtacagtaattgaggacaaaacaggaaggcacctgaagcggttgggaaaggcttgccaagtcaaactgagtatgaaacggcacttgtatgtgtaagggtaatagcatttactgagtcatctacgatgtgccagttaccgagttaagtgcttcacatacatcaactcctttaattctggcaacaactctatataaactgtattgtcagtcctgtgttaatagatgaggcagagaaattaagaaacttattcaagctcctaacacttgaatcgagcagatctttcatgctcttagccatctcactgcagtctgaattc

SEQ ID NO: 43 - DNA, 175416 bp, Homo sapiens
gaattcttacctgtcttttgtgatttttttttaattgatagagccacagtataataaaacttgataaccacacagcaaaatttacattcatatgcgtaaaatattacagtatgtggggttttctttgaggggggtagcataaaaggttctagtagaatgtatattttgtatgtttccttttcctaactattgcatggtcttttctagtcttttagtgagaactagattttaacaaggaaatgttggtggatggggcatataatagtaatttgtaaattaaagttctatacagatatgcttagaaatgtacctctacaaaaattcttacagtaaatatttaatgttttttccccattctttcacctaaatatattaacactgcatatatggtaaagaatttcaaaggagacagaatgtgctgtcactagctaatcatttatttggtgatttatttctttcaatatgggaaggccagctgttgagctcatctgaaccgtgttttgcaggattgtgcttccatgacattgtgcaataacatcagattgccagggaagtgacatttccaggcctgttgttaggcatgcaatgataaacaaaaagtaccggtttggctcctgtatctttccagttattttattttaataatttctgaatttactcttgttatttataattagattgatatgataaggcaagtttggtcagaatttttaatggtgctcaaagtagaatttttaatggaacaaaagctttttttttccccccaagatttaccacactgttgtgtaagggatggggaaaagtctcaaaatcttacttaaatgagtttccctctctaaatagtgaggatttagagaaagacaaatgaagttaacaaggtaaacacctcaaatgtgagatttcagctattatgctgatgtgttaataaaactttatttataactcttatggactgatgactaatgggtgaatccatccatttttttcttatgaaaatatgaaagaatatacaatgcaaatatgccaccttggtaattggcttatacaggttgagcattcctaatctgaaaatccaaagtctaaaacttcgtgagtgccaacatgatgccacaagtggaaaattttacaccttacgtcatgaggggtcgcagttaaaactttgtatcatgcacaaaattatttaaaatattgtataaaattaccttcaggctatgtgtataatatgtatatgaaacataaatgaggctgggcatggtggctcatgcctgtaatctcagcactttgggaggccgaggtgggtggatcacttgagcccaggagtttgagaccagcctgggcaacatggcgaaaccccatctctactaaaaatacaaaaattgggccggacgcagtggcttacgtctgtaatcccagcactttgggaggccaaggcaggcagatcacctgaggtcaggagttcgagaccctcctgtccaacatggtgaaatcccatctctactaaaaatgtatggtggcagtcatctgtaatcccagctactcaagaggctgaggcaggagaatggtttaaacccgggaggtgaaggttgcagtaagccgagatcacaccactgcacttcagcctgggtgacagagcaagactccgtctcaaaaaaaaaaaaaatagaataaaataaaataaaaacacgaaaattagctgggcgtggtggtgcatgcctgtaatcccagctactcaagaggctgagacacaagaatcgcttgaacccaggaggcagaggttgcagtgaaccaagatcacaccactgtactgcagcctaggcgacagaatgagacttggaatcttggtctcaaaaaagaaaagaaaaacataaatgagtttcatgtttagacttgggtggcatccccaagataacctcattatgtatacgtaaatattccaaaatctggaaaaaaaaaatctgaaacacttctggtcccaagtctttcggataaaggatactcaacctgtattttcaatctggcatcaggggtgttgtttgtttttatattatacaattgatctcagcttttaaggtgcctacgtgacataaaaaggaaaaggcttccaaaacttcactagaagtgatgaggtgtaaggaaaaaatattgatcagtttaggtttctgtattggtgaagtatttaaagattgagggaatcatatgaagaattactaccttggttgtttattctcatttcttattgatattttcaccttggcttttaagccctttgtttgacttttaaaaccaaatcctgtggccagggcatggcggctcacacctgtaatcccagcactttgggaggccaaggcgggcagatcacctaaggtcaggagttcgagaccagcctggccaacatggtgaaaccccgtctctactaaaagtacaaaaattagcccagcgtgatggtgggcacctgtaatcccagctacttgggaagctgaggcaggagaatcacttgaacttgggagggggaggttgcagtgagccaagatcatgccactgcactccagcctgggcaacaaagcgagactccatctcaaaataacaaaaacagatcctttagttgcccctgtgaagtagagaaccagaaatattaaaaattgtgacaagactgcagtttaggctgaagctttgccccaatataaaaacgtcatcttggagtacaaaataaagaggcatgttaaagcaaaatgtcagcttaagaaagctagaaaacttttaaatcctactgattcgtgtcttaacagggtggctgcattatattttgaagtattgtgaatattccaaacatcagacacatctacactaaatgtaagtgtggtagaggcttgagggtttagggcatatcataaagaaacctttagtttttcttttggactatgcctttaccgctagttgatattaccaggggactcagtgcttgagggctgtgggggaagatggaaggcagagtcacaggaatttcagcatgaacagctagatacggagaacagaggaactcgagttcatgcccttttatattatattgcacgcaggtttgtagaagaaataaaagttgcaacagaacagacaataattcagttttaaacatatgtaaacataaaaaacagaaaccaaaaccagaaataactgtccttaaaaatacaaaaatacatgtccttaaagataaataaggagaaagatttctagttatgttgtatagatggccaggataaaaagtaaccctttggcctgagatctatccctgcatagcctttctgtgttcatcgcttgctgcagcttagttgtgctttcgtgtagaagaacggtaaaggagtcttgtcggaatatggcaaaagtgttattcggcctgcagcggagcagctgttcagttcacatagctcagtggttaagcagtgggccttagcatagctagcctgggttcaaagctttggctttctgctgacttagctgtgtgactgtggttctttaacttttctaagccaaaaggaatctacaaaatggatagaactaaattaatgaggtttacaggataagataaaataattatccctgtgcctggcacactaaaaatgctcaaaatattgtacctattattgttgtcgtttcctgtcaatttattaaagacattcaagcactttttcatctttagattggggatttggactaggtagcattctatttcaggcctcaatgagagaaacccagctttaatcagtttctgtgtattaagggtctacctaaggttttttgggttttttttttggttttgggtttttgtttgttttgttttttgatacggatggagtcttgctctgtcgcccaggctggagtgcggtggcgcaatctcggctcacggcaacctctgcctcctgggttcaagcagttctcctgcctgagcccccagagtagctgggattacaggcacatgccaccaacgcctggctaattttttgtatttttagtagagacaggcttcactgtgttagccaggatggtctcgctctatctcctgaccttgtgatccacccaccttggcctcccaaaaggccaggcgtgagccactgcacccagcctgccaaaggttttttgtgtttttttttttgttttttttttttttgaggaaaaaaagtcagggggtttaaagctgtagtgtagtaaaacagtgaaaagccagtgcactgacattttacgttgtctgagagtcgagttacctaaaaagccagcagtagattatagagacagtatcatatagcacagtagcgaggctggcctgcatctgtattttggttctgtcacttactaggcatttcagtttgggtgagcttttaaacctcttcatgtctcagttttcccatctgtaaaagagggatgttaatattacctactttgttgtgaggattgtgtgaggcaatgtaactagtgacctttcttggaaccgtgcctggcacatagtaagtgccgtgtaagcctgctggggtggcgggtgttgtgctcatcagccactcactgtgctaagtggagtgcatattcagttgagtggaaaagtttttcatttaaatgattattttctctgtagacaaaaataaatatctgtgactatattcttgaatcatcctcccaagaaataaaactccctaaagatctaatttgcagaattgtatttctaagtacagtaagttctttgacatttgtttaaaaaatacctattttcttctctatccttgagtaatgggatggttaactaaataaataagcagtactagagatggaatttaaaaacaacaacaacaacgatttgggccacacacggtggctcacacctataatcctaacagtgggaagctaaggtgggagggttgcttgagcccaggagtttgagaccagccttggacaatatagtgagacctcatctctacaaaaaatttaaaaattagccaggcatggtggcacatgcctgtggtcccagctacttgggaggctaaggtgggaggatagcttgagcctgtgaggtcgaagctgcagtgagctgtgatcacactgctgcactccagtatgggcaacagagcaagaccctgtctcaaataaataaataaataaattttttaaaaaaatgatttggactagttcattttacacaaaagtacttaattcccctcaatataatttggttgcagactttgatacagaatagttacacttttcgtaagacattttgggaaagagaaaaaatattttggtgttaagtgccttaattccattcagcagttgcagggctgggcatgtggcattaatgtaacagaacaacattcagcttttccctggatgaatggaagctaagccttccctcagagttgtatcttcaccccaatcaagtcttgctggagccagacgtattacctgacatgagggaggcagcacccaggcctgctgtcagtcgtctctgagtaataccagttgttgaaatggtaccatttctactaaaagtcagacccttgaaaagagacctccagatctgaccctgtcttgattggtttgcattgttaatttaatgcaattcagtaagtatttactgagttatttttgttacatctatagtccagatgaaggagtatgctatgtgctgagagaaataatagtgaataaagatcatgatctgtcctcctaagaaaattacagtcctgggccgggcacggtggctcaacgcctgtaatcccagcactttgggaggccgaggcaggcagatcacctgaggtctggagtttgagaccagcctgaccaacatggagaaaccctgtctctactaaaaatacaaaattggctgggcatggtggcgtatgcctgtaatcccagctacccgggaggctgaggcaggagaatcacttgaacccgggaggcggaggttgcagtgagctgagatcacaccattgcactccagcctgggcaacaagagtgaaactccgtctcaaaaaaaaaaaaaaaagaaaaaaaaaattatagtcctttaatacaaggagaaaaaaacactatggagtcaaaacatcaactctgtgattttaagcaaatcatttaatctttgtaatttaattttctcatctataaaataagggcagaaatcacttaaagttgttatatggattaaaattagattgtgtatatgaaagtcctttgaaaaccaagaaaatgttatacaggttgaatatctctaatctgaaaatcccaaatccaaaacactcctggtcccaaacatttcagataagagctactcagagtgtgtaaatgtaaaagattagtgtcattatgatttcttatcagaaaaactaagtagacataggactatagaatgtcaggaaaagccagtatgtgattgtcagaaagtgctgctacagcatttcaaagtagggagaatttgaagtgtgttagaaagccacaaaccagttaccaggtagtagttaccaggtgagtaacttgctaaggattctgaactttggaaataacccttgaggactggttatggtttgggtagatagaacggagatagagtaacttgagcaaagttgtggacgttaaaaataagtttatcttgctcttgaagcagtaaagagactgatggaaaataaagttatattttgaatacttgatggaggtgtataagttgtaccctttttaaagtgtataatttggtgatttcagtatcttcacaaagtgggcatcagtcaccactacctaacttcagaacatttccatcaccccaaaaagaaaccccatatccattaacagtcactcccattcctccttaccccagcccctggcaaccaccaatctattttctgtttctgtggatttgcctattctggacatttcatataaatggaatcacccaatatgtggccttttatgtctgccttctttcacttcacatgttttcaaagttcattcatattgtagcatgtactagaacttcattattttagggctagataatattctattatatgattatattttgtttatccatttatcatctcatggacatttttggacatgattaataatactgctgtgagcatttgtgtacacattcttgtgtggacgtagtttccatttctcttcggtatgtacctggaagtgaaattcctgggtcatatggtaatctatatttaactttttgaggaactgcaaaactctttccaaagttcttacaccattttacatttgtgccaccagaaatgaatgagggttccaatttctctgcatccttgccaacacttgttcttgtctgtcttttttattgtagccatcctggtgagtttaaaatgacttggaactagtggctaatgatgttgagcatcttttcatgtgcatatttgccactcatatatcctctttggagaagcatcagatcctttgcctatttttaaatcaagtcattagtcttttttttttgagatggagtcttgccctgttgcccaggctggagtgctagtggcacgatctcagcttactgcaacctctgcctcccaggttcaagcgattctcctgccttagcctcccaagtagctgggattacaggctcccaccaccacacttagctggatttttgtatttttagtagaaacggggtttcaccatgttggccaggctggtcttgaactcctgacctcaggtgatccacccaccttggcctcccaaagtgctgggattacaggcttgagcctccgcgcctggccgtcattagtctttttattgatgagtggaagagttctttattctggatacaagctgtccttatcagataaatgatttgcaaatattttctcccattgtgtgggttgtcttttcactttacctgatcttcgtggtttattgaattaaatccattcttttggtcattatttttaaaaccctatctgtgcactcctttttaaaattccctgtgtgtgcagtcttattttcattcacaacagtaatttagttttttgctaggctagtctcttttctgttagctttcattccaggtccaatccgtgtttatttctgttctcctgcccataatctacctcgctctctctctgcctttgcaaatttctagccattccctctcttaagaccatcccctgttgtttcacttcatactgatattcctctctactttactcatttcatacgtacatggtggttgtcccactaacatgatttatggcatttaattatgtgatgactttcattgttgcttgataacataaacgtgtgaatcgtgtgaattcatgtatggagatacatgaatctcctgatctcctgcttagaggtcaggaactttgtccttcttttttgtttctctcagtgcctacatgataacttccagtgcacacatgagctgtaatataaacccacacttgaaaatgggtatatccattttctcattttagctgaaacgtatttgaaagaaccatttttctcattttaatcgaaattcagaaaaagcagacgacctggattttgtcctgtaggaccacatgaagcaaattgtctttaattctcaaagccgcattctctgctaggagtcggggccataattacaatggattagctacttttggttccctgtctaaatggcttttactatttgctttaaaataccctgtaaagaaatcattaaatccagaatattgagagagcaaaatcagtgggctccagatattgcaagcagaggggaggatatcttcaaaagtgttttgtccagtacttttatgaagaagttcagactgatatttttgttgttttttacagccaaaacaaatttcaagaaaacattgagttgtttgggttagtttttatagtatcacttctcagtaaggaaatatgattcatctgttgagtcctaaaactatcccaaattttagattattgagtcaaaagactctagatggaagattgatatttatatctcatagcaaaaagaaaaaatagcaatctgcgaagtcagatttcccatctctgattataaaactatatattttaataacccttaactgtttatggtaatacctgcagtttcttgacttcatattgcagttgctattcatctgaattgtgtttgttcatccgttaaatacttactaagctcctgctctctatgccaggaacacacaaataaataaatgtaagactatctctgccctaacagaactcctagcttcatggaggagacaaatgagtcaggagagaaatcctagctgcattcttttttatatatcataacataaaattgtattttatattatactattggttacaaatatattttataaattaggatatacttcagacagcattttgatattgtcttgaaatgcaaattttaagtgcagactgttggtaatttatttatttatttatttattttgagacagagttttgctctgtcgcccagggtggagtacagtggcatgatctcagcttacagcaatctccacctccaaggttcaagtgattctcctgcctcagtctcccaagtagctgggattacaggtgcccaccaccacgcccagccaatttttgtatttttaggagagatggggtttcaccacgttggccaggctggtttcgaacccctgacctcaagtgatctgcctgcctcggcctcccaaagtgctgggattataggtgtgagccgtcatgcctggcctgttgccaataattttaaatgcaaaataacattgtctatatttataattgggtatttcttacatatgctcacatcaacctgaagaaaattaaagtcaaggtttttctacaaaaagttatgcagtctgtatgttcagagtgcatttagaattgacatctatctctctcttatttttcctcttttcagggttattatattatgcaggacatggttatgaaaattttgggaacagcttcatggtccccgttgatgctccaaatccatataggtctgaaaattgtctgtgtgtacaaaatatactgaaattgatgcaagaaaaagaaactggacttaatgtgttcttattggatatgtgtaggaaaaggtaagttttctaatctttattaaagaattgttggagttaaatatcgaccatgacaaactagagaaacctgtgaaatgctaaaagccatttgcgtttgtgaattttagtttatacattgaaactggaagaacaaaactagaggaaaatacatttactccatgtatatctaattattttaactcttcatatttgctatagaacacaaatgaagaactaaagggcatgggcatttactcacactacaggggattcaactctccagaatgcctttagatgactttaataatcactatagttattccctcaggaattaacaaaaccaacacccatggagttgggatctctgctcactagtcagtcctggtcttccagacatggaatgagtagccgaagcagatgtttggaggtttggatcccatttgtctgccattgcctttctaaggagtagaaccaatgactgttcctctagatttactatttttttgcttgctcagcatttaccaatcaaaatccaatgccagagttcaaatgcaactctagttttaaagctaacaaggagttagtgggttattttgggtagatatgtagctacctagatgaaaaattttgaatctataattttaaattatgtattctaaaaaactgttgtattttctcattatttatacccttttaagaatgctctttaacttttcatatttctatctgccctcctccgcctcccttaaatagaaatgactacgatgataccattccaatcttggatgcactaaaagtcaccgccaatattgtgtttggatatgccacgtaagaacatttgatgtttacgttgaagtttcctttattgtttgatgtctttttgtttttgctttttaggagcaggggtcttaactctgtcacccaggctggagtgcagaggcgccatcatagctcactgctcctgggctcaagcgatcctcctgcctcagccttctgagtcgctgggattacaggcatgtgccactgtgcctggcccctgagggttttttgattatagattagaggcctagaaaatacctatagacatgtaggcataaatttacctccttgatattctgcgtagaaaattttaaatgatcgactttagcattccatatcatggtatcttaattattaagcccaaattgggcatgtaattcctgcttaaagattaactctttaattatcaatgtcatgtgagaggcagaagagaaaatgaagcttattggtgtatacagaagtcccatgtggcaagtgtttgcttttctaacattttctttttaaaaaattatttttattggatattgacaagttataattgtatgtatttatgggatacaaagatatgctatgatgtacgtattcaatgtggaatgattgaatcaagataattcacatatcacctcaaatacttatcttttttcctaactgaaacattgtaccctgtgactaacagtccccacgctgtccccacccccccccagcctctggtaaccaccattctgctgggtgcttctctgagttcatttttattagcatccacatataagtgagaacatacagtatttgcctttctgtgcctggcttaacttctttttctatttttaaggtgtcaaggagcagaagcttttgaaatccagcattctggattggcaaatggaatctttatgaaatttttaaaagacagattattagaagataagaaaatcactgtgttactggatgaagttgcagaaggtaaaataaaaaataaagagaaaagtactcagaaaaaggagagcaggggagacacacctattcagggttccctctctggtgattgttttattcttattatgtgggtttggaattagtacctactttataaaacaatttttatattaatataacgttcagcaacacttctgctatttaatgtcatctttccttcccttttgacctagctctccaccatctgtgcagcattactcagactacaaggctaagcctcggcacagtcattaataaagttgaattctcagagctctactttgcttctatgcccagtgccttggtactggcaaatctccctatttgagggtgggtgggtggcatggaggggtggtggggaattgtccagtgagcagtctctcccaggatgggagagagaaaactttacagaaatttttagacactgctgggaaaagctgagttcatttttttccctgatgaacttagtagtttttaaatcctgatttaaggatgtgatcctagggggtctaatgccacatcttccatttctatctgttctccctgcctgctggtataatgctgtgcatatgtcagatgctgaacaagtacctattatttcagtagattgcactgtgttttttgaaaaaacattttataagccatagcaaaaagaaggtaacttggccaggtatggtggctcaagcctgtaatcccagcactttgggaagctgaggcaggaggatcacttaaggccaagagttcaagaccagcctaggcaacatagcgagaccctgtcttcaaaataaaaaataaaaataaaaaagaagaaattattttacaaactagcaccactagaaaatggagtttcatggatgttccagtgatggcagtttgggtataaggtgtttgaccaactgtcagccatatttattttcatgtttttatctgtgtagctattttagatcacttgacttagccacttttccatttaacataaccagccagggctttggacttcctgccaccctcccgcttcatccagagaagttccacttttatttgttttctacattaggcttcttctgaagcttacatttgaaggaaaggctctgctgctttaaaaaaaaaaaaagaaagaaagaaaacctttggattatgtcagttatattcaaactgagatccagtaaggtgctccagaaactctacagtgttttatttcaatttcgtttttaagtccattttaactattttaaaacttaataaaaagcaccatgctcactcacatatgatatttaccaaattgtcatagcaatgaatggcatcccgatatgtgctgtgaggatatttgaacttcttataaacatcttagacagttttgcttttcgctgatctttttcagtcctaccatgtctgcttaaccagaattgcccaggcaggaagaccctgtagtgtacatggagcacactcagctcagtgccgtgcacattgtgcccttcgtgggtaacggcccactcattgtacaaaataagtaaaggcctaatagtatcatgataaataatacagttaaatctagcccttattttgagttttggatgctttgtgtctgacccctgtcttagtagtaaagagcaaaagtagttgtatgaaatttttcacaagtcatccaattttgaaacaaaactttgctgtttctccctttggatcttccagattacttaattgaaactcattccatggctgggcatggtggctcacacctgtaatcccagcactttgggaggctgaggtaggaggattgcttgagcccaggaattcaagaccagtctgggcaacacagcaagaccccatctcaatttaaaaaaaaaattatttggggccaggtacagtggctcatgcctgtaatcccagcatttggggaggctgaggcaggagaatcacttgaacacagaagtttgagaccaacctaggcaacattgtcagaccccccatctctataaaaatttaaaaaattagccaggcattatggtgtgcacctgcagtgccagctactcgcgagacttaggtgggaggattgctcgagcctggcagtttgagactgtagtaagtatgaccacaccactgctctccagcatgtgtgacagagcaagccccatctcaaaaaaaaaaaaaaagaaaattccagagggagaaaagtattcacagattataagccaagcagttgaaggggaaaataaacatgttaccaatttctttttttaattttttggtttctttgtgtgagactacagagtctctgtcgcgcaggctagagtgcagtggcatgatcttggcttactgcaacgtccacctcccaggttcaagtgatcctcttgccgcagcctcccaagtagctgggactaaaggcacacaccaccacgtccggctaatttttgtatttttggtagagatagggtttcgccatgttggccaggcctgtctcgaactcctggcctcaagtgatccaccggcctcagcctcccaaagttctgggattacagacgtgagccaccacgcccggcccaccttaccaatttcaactgtgtgcaaggaaaacaaaatatgaggtaaattggttgttataatgctacagccatcaatctgtaacgtgacttttatttttgtactattcaggacagcattattattagaagtgttgaacatactactgaaggttttcattgtgagtagatgttcgatatgaatataggaccttgaagtaacctacatctaattataggacccctcttctcccttcccccactccatgataactaccattctaaacttattcctttttcgttttacatagttttattgagtttatatatacccaaaaaagtatgcgtagttttgtttttaacttcataaaaaggtattatgctctatgtagtcttttgggactagatttttttggttaatattatgttgctaagattgatccctattgttgcatgactgtagtttttaactgctacgtaatattctgttatgcaaacatactacagtttttttcaactactctcctgtgttggtgagcatttgagttagttgtaggtttttgctatgttaacagtgctatcattaacagtcttgtgtatgtctcctggaatatgtatgcatgaatttctttgcagtataattctacaacttggaattgctgggtcatagggtgtgacagtattccattttgagagagaatgccagacagttttgtaaagtggttgccgagtctacacttaaccctactccccacggccagcaagggataatgtgaatctgtactctctccatcacttgatagtcagacttttttatttttgccaaatgttaaatagtatctcatgtgatattgaacattgttcatatttttaatagctatatgtatatcttatgtgaaacatctttttatgtcatttgtgcattcttctgtgtgtgtgtgtgtgtgtgtgttttggcttattgatttagaggaatgttgtatgtgttcttgatataatactagcgaggaccgctaagacacaattgaataggtagttgtgggcatccttgtcttgtttctgactttaaaggaaatactgctaatgtcttcacatttagaataatattgtaagtttttttattaacactttatcaggttaaggaagttctcttaatttttttgaaaatttttattatgaataaatgaacaagattaaatggtttttctgcagctatgaagaagaaaataggatgtttcttttctttcaatttcttaatatggtgagttaaatttatagatagtctaacattaatccaacttgagataaatcactttcattgggatgtatatttttaatacactactagatttaatttgccatcattctgtttagaattttcatatctatattcatatgggaaatgggcctgtaattttactttcttatagtatttggtttaattttatgagaaaataaaattagtatttagtggtatcagtgttatcagtatcagtggcatacagagtatcagtgttatctgatagaatgtagcgtaggccttgtggaatgagatggaggacaaccaagatggttgattttatgtcaacttttgccaggcctcagtgccaagatatttagtccagcattattcaagatgtttctaggtgatggatccaacattattctggataagattaaagtttaaattgatggactttcagtaaagtagattgctctccataatgtgaatgggcctcattcagttagctgaaggccttaatggagcaaagactgacctcccacaagcatggagtttgctagcagcccgcctctggggctcaaactacaactctcctctgcatccccagcctgcctgcctgcaggtttcagacttgcaccgccacaattcataaaccaataccttaagtcagtcccttcttctcactgtccctctatgtacacacatacacacacacacacacacacacgtgtacgtgtacacatgcgcccatcttgttggtactgcttctctggagaactctaatacagaagaagtacaccctgttgtttactgggaacttttgtataaattatgatctgttccctaatgtttatggtagaacttgcctataaaccaacctgggattggtatttttttggtagaagatttttaaccactggttcagtatcttgaatatttcttgtaccatataggcttttcatttcttgagtcaattttgataagttatattttcctaggaatttgggcagttttcaaattcgttgtcatttagttgctcatatttctaatagtattctttaatctctgccttatccatagttatatatccgttttcatcagtattacttgtacttactttccttttttatttattgccagcttttgccaattgtgctatttcattttgaagaaccaatctttgactctgttgatttcttctactttttcattgttttctacatcattaacttctgctgtttatttatgtcttgccttgcatttattatttctttttctaacatcatcgtagttattcacttttagcctattttttccaatttaagtttctaaggctttacatttctcttaaaacatcactttcatcacacatcctataagtttagggattttttttagttgactttttttttctttgacctttaagttatataatattatctttaattttcaaatatggcaggaattttcatttcactttttgctttttatttctaccttaattgctttgtgatcgaataatagtctgtctaattgctatgctttgaaatttgtggaggttttcattatggccaagtaaaagatgaaattttgtaaattttgcatgtgtacttgagaaaaatggatatttttgtagtaactggttgcagaactctatgtatgcccattaggtttggcgtattaatttttattgttttgttcagttctatatttctgctgattgtctctttgatcaataattgagatgttgaaatctctcaatttaccaaattttcttgtagttctagcactttttacttcatatatagtgactattttcgtgttttaaatgtttatattttcttattgaacctttatcattatgtagtgatgcctccatttcaaatgcttcttctctttttgtatcatactaacagagccacaccaacttcctttttgttgacctaatatgctattttttacacttttactttcctactcttaacccctaggctagcctgcttctctacacttttactttcaaacatttcatgtcattctgctttgctgtagcttttggaggcaccatataacagattgtttaaaatccaatctgataatcttggtcttttaatgagaaaatttagttaatttacatttgttattttttgtacctgttttaaccatctaattttttgatttggctcattttcttatcttttttaaaaaaattgtatttatatcttttcttctctaacaaataataattttaatgtactcctacaatacttggtatctccttttaactcccaacatgttgatttaacttagacttagttctggatcactatataattttgtctctttttttaaaaaaaagaaccttactattgttaatttataacatagtagacagaagtaggataaactataacttaaataatatacttctaaatttaaattgatgtgtatccatatacattagtctatctaaaacatgttgaatgaaaatggtacattacaaagacatacatagaacatttttgttgaattcaaaaacctaaaacattggcatatactatttatgaacacttacacacatgagtaaaaattaaaacatgcctgatatgtctggcacataataggtgctcaggaaatatttgttgagtgaataaatgatactgagaatataacctgataatgtaggatagttcttagcctaaatatttaaaacataagaattggtggtcttaaaaataatatttattttcatatcttttagatatgggtaagtgtcaccttaccaaaggcaaacaggctctagagattcgaagtagtttatctgagaagagagcacttactgatccaatacagggaacagaatattctgctgaatctcttgtgcggaatctacagtgggccaaggctcatggtacggtaaagcccattttttgttagatctacaatatacttaacgttaaatcataaagtttcttctgaataaataactttcctcccagttttacagtgaaaatattttggcctactaggcaaatctcaaaccaaacaaatatttcaattatggatattacactggcttatttgatttagaaatatcaaattatttagcccattattgtcactattggtaaaatttaaatgaccatttaaaaatttttctatttttaaaataggttaagtttccatttgtctaatacacaatcctttagattctcctatattgtgacctgtcgaaaatcatggattgggttctgatccagtctctaccactctatgaacatgttatctataacatgtaaataagaaatggtacctgcttcaggctgggtgtggtcgctcacgcctgtaatcctagcactttgggaggccaaggcaggtggatcacctgaggtcaggagttagacaccagcctggacaacatggcaaaacctcgtctctactaaaaatacaaaaagttagcggggtgtggtggcacgtgcctgtaatcccaactactagggtggctgaggcaagagaatctcttgaacctgagaggtggaggttgcagtgcagtgagcagagattgtcccactgcactccagtctgggcgacagagcgagactctgtctcgaaaagaaaaagaaatagtacctgcctcataggttattgggattgaatgagtgcataggtagaaatgagcatggcactcgacaagtcctctgtacttttgattattcgtataactgagcatcctctcttggacacttgatcagtaagttgagtgatcagcagagaagatgacgtgaaaatcaatctgtagcttaattaccttttggtaattgtgtatggtttaatgaaaaaataagtttaaattaccaattgaaataattttggattttctgagtccaagtatctagtctgtgagtctcttatagataattgaaaaataattgtatttaatgaacttctataaaatatctttattttcataaataataatttttgttcttggccaggtgtggtggctcacacctgtaatcccagcactttgggaggccaaggtgggtagatcacctgaggtcaggggttcaagaccagcctggccaacatggtgaaactccatctctactaaaaatacaaaaaattagctggtcatggtggcaggtgcctgtaatcccagctactctggaggctgagccaggagaatcacttgaacctgggagtcggagtttgcagtaagctgaggtcacgccattgcactccagcctgggcaacaagagcaaaactcagtctcaaaaaaagaatttattctctaatacatatttttagtaaattaacatattaaagcacattaaaatgtaaaatgctataaatatctcaccattccagataactggataagtaattgaatgtcttttctctaaaaaagatctaaacaacaaatagcaaaattacggtggtaaagatcaacaataaacgaaacttcataaaacaaaatgaaaaggtcatatagaaaatatttgtaacaaataagagaaaaaaaattaagaccctcctcagtaaacaagcaaatgatacaaattcaacaatccacactgctggaagtatagagaaaaattttttaaatggctaatgtaagtaattaaggaataattaaaactgatggtatctttctgctttttaataccatcaagtagacaaatgttttaaaaattaatactctgttttggacatgttatgctgaaactttatattccatgcaaattgaaaataatttgtcccatatgtaaaggaacaatcacatagctttatctatcttaaagcattacgtatatataaatattaactatgatagaaaaacaataaaacccagaggtattataaatattcaagagttaacagaatggttaaaggtaacaaactataatgtggctgttcagtgacattgtgctttattaaaaattctggtcatataaattgaggcaacagtgaaaatttatctacaattgtatgcatatttttgattgccacaataaaaattatatatacagttggataagaactataaacaaatggtaaatgaaagactttgtttggccagcagaatagtgagcattattttttaaattgtatgtgtttaaacaatgtaaatcatgtttttaagcaaaagaaatgctaactatattctcctccataaatatttgcctcttatcatcagaaaacctaccaaagttgttcttattgttctttttcagaacttccagaaagtatgtgtcttaagtttgactgtggtgttcagattcaattaggatttgcagctgagttttccaatgtcatgatcatctatacaagtatagtttacaaaccaccggagataataatgtgtgatgcctacgttactgattttccacttgtgagtctcttcttttatttaaaatacagtgatatattctcacttattaaagactaaattttttaaaacttaaagttgatggtaaatataaaggaaatatatatatttatatatgtgtatatatttatagtttagtaacactgatcataatatttactaattgccaaaataccttaagtttatgagatttagaaatgtctaaagttcactcaggaaggatgcctctaatttcttatatcctaaacacgagagccaatgtgaaggaataaaatgtgctataaatatgtcaagaataatttccttttaaacagttataacttatattggaaacagtagtttttaagtcttgttaaggtatggtcatatgctggaataatagaaatctagttctgctcttttcaaacatttaggtttgatagttattttacgttggtctaaagaagccagtaaatagtacccctctttcctacatgagtgtgacaaactgagaagcaagcaaggagtaagacaagcagaaacccaaaatatcactttgattactgatagaggctttgtggaggatattgcttcatgtcagagtaaatggtctagcaccaaaccccagaattgagtggccaccccacacctccagtctcagcagtacggagcccagataggcttcctgaggtactgagcaagctgggggcctgtgggcttctcactggagcagcagaacccttactcttggccattgggttggctctaaaagaagaaaaaggaaaaggctgtttatttatccttcttaaatattctaatcatataaatttccctgcaccttcccaaaagtgatgattaagaggagagaatccaggagtcaaacactaatggggctctctctgcttaagaggaaacttgagtagctcaagaagcatttctaggaatcatttgaaaggaagctctttcagagctcactttactttttagatggcttagtacagaattgagaattcctattataaccatagattgttgttttcattgtttagtcctggataattttgggattaccaaaattcacgagaggccagaattcacgagaggatagtatcagttaagatgtcttatgtactagattatattgtggctttcattgatttcattattaacagtccctaatttttttttttacaggatctagatattgatccaaaagatgcaaataaaggcacacctgaagaaactggcagctacttggtatcaaaggatcttcccaagcattgcctctataccagactcagttcactgcaaaaattaaaggttactaccttttctgtttatagctactaatggaaaactttatgaaactggaaacttattttggcatagaccatagatatgctgccttattattaaagtagagataaccagtctacagaaggtcctatcagtgaccctttttatattctgtttccgatggtgaccagaggactttatgtgtgcttaccctccagaatgctaaaaaattagtaacattagagtatattcttttttctttttttagagacagagtcttaactctgtcacccaggctggagtgcagtggcatgaacatgacctactataacctcaaactcctcagtgcatatgatcctgccacctcagcttcccaagtatctgagtctacaggcacatgccactacacccagctaattttttaaaactttttgtggagaagggatctcactatattgcccaggccaatctcaaactcctggcctcaagaatcctcccttcttggtctcccaaagcactcggagtacaggtgtgagcttccactcccagctccatattctacttttaaatatgttcagattttcaagtaatcatttcctagttctatgactagacatatagcaaattagaattttttttccatttttttatttctagttgacttacaaatgagaagctagttctgcacattgagtgttctaatgaaagcttttaatttgttcacaactacatgaccatagaatgtatcagctaaaactcagggaatggaatgggcatgattgagaattacacacataaacctgttgtcatcctgttcggagctcatctacttaaaatcctttcttctcttaaaaagttagcccattatctgattcagttatattttccacctacgattatggattactataatattttaaaaacagcttaagctttttttataaaactggtataaaaccaggtttttttttttgttttgagatggtgtctctctctgtcgcctaggttggaatgcagtggcgcgatctcagctcactgcaacctccacctcccagactcaagtgattcttgtgcctcagcctcccgagtagccaggactacaggcgcacaccaccatgcccagttaattttttgtatttttagtagagacaggtttcaccacgttggccagactggtcttgaactcctaacttcaagtgatccatctgcgtcatcctcccaaagtgctgggattataggcgtgagccaccacgccgggcccagatcattttttaattaaaagttaataccccatctctaataatagggaagggtaagtttcctaagctgcactgcttggaaaatgttttccctgttcatctagagtgtaagaaagatctctttgactttgactactaacagtagtaagaactagaaattctaaatgggttgtaagtattgcatgaaggaaaaggaagataatgatagctggcgtttctcagtttcagggagatataaaggatgccttgaggatttggaacctgggaaaggagagtgagtggatttttgggggtgggggtgtgtatgtgtgaatattttcagattgatatatattcactgttgatgccaataataaaccagatttttttccttttcaggaacatctagtcttcacagtatgtttatcatatcagtactcaggattggaagatactgtagaggacaagcaggaagtgaatgttgggaaacctctcattgctaaattagacatgcatcgaggtttgggaaggaagacttgctttcaaacttgtcttatgtctaatggtccttaccagagttctgcagccacctcaggaggagcagggcattatcactcattgcaagacccattccatggtgtttaccattcacatcctggtaatccaagtaatgttacaccagcagatagctgtcattgcagccggactccagatgcatttatttcaagtttcgctcaccatgcttcatgtcattttagtagaagtaatgtgccagtagagacaactgatgaaataccatttagtttctctgacaggctcagaatttctgaaaaatgacctccttgtttttgaaagttagcataattttagatgcctgtgaaatagtactgcacttacataaagtgagacattgtgaaaaggcaaatttgtatatgtagagaaagaatagtagtaactgtttcatagcaaacttcaggactttgagatgttgaaattacattatttaattacagacttcctctttctaagattttgtgaattggttgaatagttctatacaaatgaagtatggaggtgtgtatgtttatatgtatataacaaaatattttcattgtgaccactctgaagtaagagcaatgggaatggcattattgtagaataagtcattgtatttttaacaccagaaagaaccttgccgatcaccaggcataacctaattttatccatggaagaaacacagaaaggcatctaagttagagctggcaccagaactgagacctccagaaatctattccagtattttttccactacacaactgccttcctgacaggttctgagataagtgttatgtttgtagatagagtgaaatatatttatatatatataaatatatacagatacatatctgtgtattatctcaaggaatgtacaaactttagtttttgattataaggacttcactgcaagttttagttaagaggtttgtatataaatctgttatagaacaggctgaaatttcttgttcataagattatgaaaccacatgagaagtgataaaatgtttgttaaagctagatagaggttaagaatcaagatataatggataattttcatagctgcctatcagaatttcccaaatatttagcatcttccttgataatatgtattttcttcttgaatttcactggcctaatgagataatactcttatctttggctctacctaaaagttggttaaaaatgcaattggcattaacaaggaaaaatactgaattagtaattttaaaagtctcacaaagaaaatcccaggcctagatggctgcattgttgaattctgccaaacattaaaattagcactaattttttgcacactgtttctaaaagtaggagaggaaagaacacttcccaacttactctaggtcagtattaccctgatactagactagacatcacaagaaaactataagccaatattccttattaatacaaacacaaaaatcattaacaaaaatattagcaaactgaatccagcaacctataaaaaggattctatatcatgaccaagtggaatttatcccaggaattcaaggttggttcaacatctaaaaatcaaataagctaatatacagtcagttctcattattcacagtaattatgttctacagaatattctcccataaacactgaattaaatatggaacaactgcttttaggagaaagtgtatttgtgtatatgtgtgtatacatatgtttatctcacacacattatgagcttgaattcttaattcatcctagcaaattctaccttattttacagaagtgaaagtgaggtatcagaagtgttaagtgacatgcctgaggcacccccctaacaggtgtcagagctgaaattcaaaccccatccagctggccccggagccagagcttcttgtactacacagaattgcccctgccatttccaccctccagtcatttctctatgagactgaagcaggaaggcagagcatcatcttgttcagcctcagctgggaacatgtgtactgggtgactcaaatttttcacccatttacacatatccacaaatgactgcaaaagtgccacggatatcaatttgagggttataaattttagcaagttggtaaattcacaaatacataaccttgaataatgaggatcaactgtaccatatttaataaagcacaaaacccacacagattgtcttattacagcatttgataaaatccaaaactctttcataaaaacactcaacaaacttaggaataaaaggaatcttcctagatatgataaatataacatctatgaaaagcccacacctaacattatacttcatggtgatagactgaaggctgaatgttttccccttaagattgggaagaaggacaaggatgttcactcggcactacttctattcagcattgtacttgaagttctagccacagcagttaggttaggaattcaaggtttgttcaacatctaaaaatcaaataagctaataaagaaaagaggtttatactgcaaaagaagtgaaactatatgtattcacagttgatacatagttgtatatagaaaatgctaaagaatccataaaaagtaataaatgagttcaacaggttgcaggatacaagatcagttttatttctctactaacagcaaacattctgaaaatgagaataaagaaatcctatatacagtagcatcaagaataaaactccaacacgtttaaagaaattaagatccagataaatggaaagacatccatgttcatggattggaagactgaatattggtaagatggcaatgctgcccaaattagtctacatattcaacaattcctatcaaaatcctagctgtattttttgcagaaattgacaaactggtaaaattggtagggaaacgcaggggacccagaatagccaaaaaaccttggaaaagaacaaagttggaagacgtaccaatttcaaaaagtgctaccaagctacaataagacagtgtaggcatatggatagacatatcgatcagaggaatggaactgaacatccagaaataaacccatacatttctggtcaacttgttttcaacaaggatgccaataccatcaatagagaaggagtggtcttttcaacaaacggtgctgggacaactaactggtagctacgtgcacagcaaaaggatccctaccttcctaccacattacaaattctaactcaaaatggatcatagacctcaatataagagtttaaactcttagaagaaaacagaagtaaatctttgtgatgttgggcttaggaatggtttcttagacataataccaaaagcacaagcaacaaaggcaaacagtagataaatgggacttcatcaaaattaactttagcgccttaaaggacaccattaagaaagtgaagttaaccctcagaatgggagaaaaatttttgaaaaatcatgtatctgataaaaaaacaaacaaacatgcaggtgctcagctgtggttaccaccgagcagcactgtccagtgaacttgctgtgatgatgggatgcttggtatccgcactcccagtgtgatagcctttagcctcatggggttgttgagcagttgaaataatagctagtgtgaggaactgaacataaaattttagttttaggatgggtgtggtggctcacgcctataatctcagcactttgggaggccaatgaaggcggatcacttgagcccaggagttcaagaccagcttgaccaagatggcaaaaccctgtctctattaaaaatacaaaaaaattagctgggcatggtggcacacacctgtaatcccagctactagggaggctgaggcaggagaatcgtacttcccctttatactcttctgtatatttgatttttttttttttaagacagagtcctggctctgtcgcccaggctggagtgcagcgacatagtctcagctcactgcagcatccgtggaggctgaaacaggagaatcgcatgaattttttaaaaaatctaaacatgtaattttaaaacgggcttaagaagaatgataacagttttggtcttcttttttatcaaccatgcttttattttacttgaatctcgtgccaattgctttgtaatattaaagtaggatttacacaagtggaatttagaaaagatgataatctatcaaatctgtcaataccaattagaatgtaataaagaaattaggatagtggaggtttgagcaagtaaaggctcacccaaattcaaagccaatacttgatgctgagaggggatattttctggaaggtaatttttaaaaattaaagtcacaattataaattgtatatttcctaataaaagaaatctcaactcatgggacaatttgaatttaaaacactattgttcctcattcagtgatgaacaagtcaaaacgtttcagaaaagaaagcctttaaagaagaatcctggcacagaaaaggtccatttagacattgccttcttcccccatctctaatgcctcttttcaaatctctgacttgcacatgaagtaacagtgaggtgtcctgtgcagcagtcgcaattttttgacttgtcaaattgaagaaattcaattatgtagccagagcttagatcactgacatgtatactggcataagcttttttttgtttgtttttaattttattagaagtgggatctcattttgttgcccatgctggtctcaaacacctgtcttcaagtgatcctcctgcctcagcagcatcagtttaatatctagataaaatctgatgtatgtaattttacttttaagggtttttttccaaacagacgtcctgacaatgttgtttcctattccttgaacattcacctgacgcttatatactgtcattacttttatctgtcaactgatgtcagctactcaatttacacattacttttgtgcatttcatcctgtttctcagtttgacattgtcattcaaattcagagtttgacactgaaaccctgggcatggtggctcacacctgtaatcccagcacttcgggagactgcggtaagcagatcatttgaacccaggagtttgagactagccttggcaacatggtgaaaccccatctctaccaaaaaaaaaaaaaaaaaaaaagcaaaaacaaaaattaactgggcatagttgcacacacctgtagtcccagctactcaggaggctgaagtgggacgatcgcttgagcccagaaggcagaggttacggtgagtagagattgtgccactgcactccagcctggacgacagggcaagacgctgtctcaaaaataaaatattagtaaagaagagtacaatcagaatatgaaaatgtgtaaatgtgcatattctctttttttctaatttggtagcattaaaaatacttaagcatcaaagtttggctttatgaagaaggagtctgagacacctcaggtttcagcccttactaatagcgtggctcaaagagcgttaacttgcctgtgcttctgtttccttatctgtaaaatggggatgatgctgtaacatcaaagagcttataatactttccagagctggcagtactaaataagaccattcctctaaagtgccagcattttgaaaagcatcaacccatcaaccttgtgctttaaatctggcattcttaaagctatacctgtaggcagtatagagtgtttttttttatttgtttttttgttgttgtcttttgagtctcactctgtctcccaggctgtagtgcagtggcacgtcttggttcgccgcaacctccgcctcccaggttcaagcgattctcgtgcctcagccccccgcatagctggcattacaggcacacaccaccacgcccagctaatttttgtagttttagtagtatctactaaaataaacagggtttcaccatgttggccaggctggtctcaaactcctgacctcaagtgatctgcctgcctcggcctcccaaagtgctgggattacaggcgtgagtcaccatgcccggccggcagtgtatatcttctaaagttgcaatttttgttcactccagaatcacttttcaaaaagcatgcagatttaatgccaccagtttgtgttatgtatctatcccgcaaaacagctctaaaggtgatttactaaaagattaacagcatttatctctggtgggataatttttctttgcttgtttacctgtgtcttgcagattttacacagtgaacaatgactgtataattttaaaatacagatatgcacaattgtgtaatgtaaatatgctcagcttcaatacatttaagaacacatttttaacttttcgtaaggagtcttcagtttaaaagtacagtgtcattacagagtgcttattctgttacaaaattagtaaagctgattctgcctctaaatctgaagtaattcccactttttttcatgcttgagtttagttgataaatagcattttagatactaaaaatgattggatgagtatttctacattaataagttgctaattaggcaccagggtagcagatagaatgcctttctgtgtgctaggtttaaacattttacacacagtcttatttaaaacagccttgcagtttatagatgaactgattgttaggctaaccagaggtgttactataccctccaggataacccagctagtaagggcagagccaggatgattcagacccagaccagagccgggtgttttgtccacagtactgctgctgcttataccgtaacgggaaaagtacacaacagtgtcttaatatttcattcttccatgaaaaacacttttaaaatattgaaacattataggagcagaagtacatctctaaatatacttttaggtcacattgaaaacatttccaaaggatttgacctgaagttaatgttgctacattatgctcaatacagcaggctgttctgctagggaaattgttaatattttaaaaatattttcctaagctttagctttaccacttccaagtctgtacagactggttatttctacattacaaagacagtgactccctcaaaggctgacagtttttatagtctgtgtttataacatacacatctattcttgccagatgtgggttcctacattgccatctaacctcagcatcctttatgttatgctccaacttgggtaagcggctttgtttccttcccaatctcctggtcagacagttgacctcacatctttgtctagtggttttcaaacgtcagagtagccccttgttggagcggcagccttggggttccccactgttttccacattgcctttccaagtaagctttggtctgcgttaaaccccgctgtttgctttgatattctccccccacacagccgtaccccacaccagctgggcgcctttgggagaccgcagcccttagaaaaggggaagaaaagcctcctgactgcacagtgagggctggaggcgtctggcctggagggagtccaggccactggactccacactgtcagccagtgtgagctgctggtgacagggaaaggccatgtgagcaggtcctgacctgcagttcgggcccctggagcaaacagcaccaaacttggcccccagatcagctttgtcattcaagatgtggcttgctagcaggtgttattaacaaggcgaagcaccatgtggtatcttcccattggaatcagttgttattgctaactaggtattaagtgtctgaaaacctgattttgtactttggcatcacctggcccagttatagctttgtgggggatacagtttcaaggtgtgcagtggcactctcacctgcaagggagaagtgtgcttgttgggggaaggtcagatagggggtacacagggctggcatgctaagacacgctcttcctggaagtatacgtgcagaaagccacatcatagtccaaggctttatgagcacaaaaggaacacggggtggggcggggaggggatcgtctagatgaacctgatggttaatgacagcaggctaagatgagccaaatgtccctctcattggccagccttgccagtgaggctgaatgcttccaagctaagagtctctctgtcctggacagcacttacaggaccctgccaatgtctgctgcccgaggtgctttctgacagtttgctgtagctacaataatccatttactcagctcgcagacttgccttggagccattctagctgtgtaagctgacttcacacccaggcctgacccacgatgtgactcgcaaaattaccttttccggcattttcgtgtcctggccccttgttagcagcacgtgaccaacactggccaccaaggcccaagctagactggccaacagagagtggagggctgagggctgaggagaccacaaccattattagataggattgattctgcctgtagactgaaaagaacatcaccaaatgatgtcgagaaggaggataaggaagaccattccatgatgctctgctcggccgagctaccctggaggcaggcccctgctgaggagaggcaggagaagggatgtcttcaggtgagccaatgggagcagctggctttcaaaatgccacttaaaagggaggctggctattggcctacactgcacagaagcttcctgaccagatgccacagggcctggggtcaccagtaagcctagagctgagactccctgagcccatctccaaatacataatccgagtggggctgtgagaggacagtggggcagtgcgggacctactcctggaggactcacccgctccccaaagggtatgtgatccatgccccaggccagtgctgctggctgaatgtgaggaagcttggactccattcctcaggagcccaggcacttcagcaggaaggctggggacctctggggccagcactaggggcagagcaacagacgagactagagggcagagggcacgtgggagctaagcctggggagatggacaccaatgctcaggtgagcggccctagctggcagcactttgtgtgtttcggcacgcatcgttgctgggaggagtaagcactggccgtgcaactccaccaggggaggatgatggagggggtgcctggtctctcctggcctctgtgcacgtggctcttcccttgctgattggagtcaatgcctttcactgtgataaaccataaccatgagtgttatggcttctctgagttctgagttgttctcgtgaattaatgaacctgatcttccagtggaatggggtgggcgggaaccagattggctcgtgatggcctgtgatgtcctagaatagccaggtcacaggtgggacttctcattcagggaaggtgatgagcccacaaagctgggtccaacccaaaggcttcaggggcaagtctgccaccccagccagcattgggtttctccaagtccctctcctttcggggctgtgttatttaccaattcctaaaggggacctcagagactagctcacaggccatctctctcactgcatcctccctggtcccctcaacaggaagccacctagagacagagaacagtgctttctgtgtgcatttcacccaaaaacgcacacagaacggagactaaaccatgtgttggcatgaatgactcctgacaatgaccccggattgcaccagccagactgggctcatcaccttccctgaatgagaaggcccacctctgacctggctactctaggacatcacaggccatcatgagccaatctggttcccgcccaccccattccactggaagatcaggttcattaattcacgagaacaactcagaacttagagaagccataacactcatggttatggtttatcacagtgaaaggcataaactccaatcagcaagggaagagccacgtgcacagaggccaggagagaccaggcaccccctccatcatcctcccctggtggagttgcacggccagtgcttactcctcccagcaacgatgcgtgccgaaacacacaaagtgctgccagctagggccgctcacctgagcattggtgtccaaggtttctactaggggctggtcacccagacatggctggccgcccagttggctgatcctggtttccagcccctgcagaggtcaagctgataccacttggtccaagggccccccataggtcacattgttagcagagactatctggtggggcccaaggcccccaggtaaataaacgcactcttatcagggaggcaattccaagggcttagaggttgcctcctgggagctggggataagggccaaacctctccttgttgaaggttaatcatgactgcaccccaggacacttgagtttctctcactctggagtatcatgcctgctgttgactgcctggaatgccttcctcactttgtcagaggcatttgaaccagagtgactccatcttgaataggggctgcattcaggaggttaggccttctcagtcacaggatgagataggaggttggcaggactggcatcacaagatacaggtcacaaagaccatgccaataaaacaggatgcagtaaagaggccagccaaaacccaccaagaccaagatggtgatgaaagtcacctctgatcatcctcactgctacttatttgctaattataatgcattagtatgctaaaaggcactcccaccagcatcatgacagtttacagatgccatgcgatgtccagaagttaccctatgtagtctaaaaaggggagggaccctcagttccaggaaatcactttcccagaaaactcatgaacaaccccccccggttttgcatatgatcaataagtaaccatgaatatactccgtccagcagcccatgccacacctctgcctatggagtaactactctcattcctttactttcttaataaactcctttgataaactttatggactcaccctgaattcttttgtgcacaagatccaagaacactctcttggggtctggatcaagacctccttccagtaaaaactttgccaggctcacccctcttctttcttcaaattgtaccttaagtgacacatccttcagaaaaacttactgctcagcctccaaattggataaaattcccctttgcacattcccagggagcctcggcttgccccatcaggggccctatccctcagcactgcaccacctctccttgtcctcctttccagcatcaggcagactctgcagggcacgcccaagagctggagcttaagctctctccttggagtcccagtctctttcccactacactcatctcagcagacgaccactcagctcactccatggagacacagaggccataggagcccacgccccgttcccgtccccagcctccatgctctctcgttcccaccccactctgcgcccccaccaagctcagagttccagatacttctccagggctgagcttcacatgagatcccatctcctctgtcagcctctgggtttttacccatctgttgccaaattcacccaggatgccaaattcatagaagcactccctaaggacctgcccctgctcgctcatccgtggggctcacattgtcctccctttctgatatatacagcctctccctggacactggcttcttgaccagaggctacaacatcaccccacaaggcatttctcaatcccgggtgccctcttcaactctccctcattctctcccacactactcaataacaccacctacacccacatctccattccttcacatcctgttcatgcctcagtctcccaatccaacctcaattatgagatgaatgaaaaatggagaatgcttttttttgagatggagtctcgctctgttgcgaggctggagtgcagtggcatgatctcagctcactgcaacctccaccttccaggttcaagcgactctcctgcctcagcctcccaagtagctgggattacaggcgtgcgccaccatgcccagctaatttttgtatttttagtagagacggggtttcaccacattggccaggctgatctcaaactcctgggttcaggtgatccacctgccttggcctcccaaagtgctgggattacaggcatgagccaccatgcccggctgaagaatgcctttttgtttgttcagtgtatggcggctacaatctactttgagatacttcagacctttttaaagaatgaattcctggctgggcgcagtggctcatgcctgtaatcccagcactttgggaggccaaggcgggtggatcacctgatgccaggggttcgagaccagcctggccaatgtggtgaaaccccatctctactaaaaatacaaaaattagctaggcatgatgacaggtgcctgtaatcccagctacttgggaggctgaagcaggagaatcacttgaacctgggaggcggaggttgcagtgagctgagatcacgccattgcactccagtctgggtgacagagtgagactgtctcccaaaaaaaaaaaaaaaaaaagaatgactgatgaaaccttagtgagggaggcacacgtgcatcctaacctaagcaggcggtccagggagagggcactggctctcgcttcagccaaccttgcgaagccaacctgagattccccatccctggaaaaatgcttcctttaagatctcccagatcatctttacatggctgtgctgtcaatgagcatttttgaatgttctcatttgctttcagaattcttcctgggcattatctgatcccctcagatctcacagatgccacatgcccaaaaaaccttgctgccgtttatttcttcctgaggtggagtcttcccttcagtggaaacagcccaccgttgctgccaccccttctgctgggacaccctggggactcgatgtcaacactgcaaatccctagaatttactgcagttctttttgctatggggaagagatggggtgagcagaagtgcaaaaagatgccttcttgccacctagtttctagtcactgccttcctctcccaaatgatgcctccactcatccactctaaagtcccaattcctcagctttcaggcagagagcccactactacaccactgtaagttgtgactgactagccctcccaggaacattggaaaattttgagggagagaaagaaaaaaggaagagaaggaatgagacagaaatctctcctagaaacagccacacatggccagcgcagtggctcacgcctgtaatcccagtactttgggaggccaagatgggcggatcacgaggtcaagagaacaagacaatcctggccaacatggtgaaaccccgtctctactaaaatacaaaaaaattagctgggcatggtggcgcgtgcctgtagtcccagctactctggaggctgaggcaggggaatcacttgaacctatgaggcggaggttgcagtgagccaagatcgtgccagcctggtgacagagcaagtctccatcacaaaaaataaataaataaaatacaaaaataaatagaaaaagaaacagccacacatggaccagaaagttgagcctctggtgacttgacttcaggtgctgcggcaggcaggtggcccagggagtaactggggagtgaaaatgagaatgcagcacatggaccaactcctgttgagcctcttagcaaaagccagccctgtccagtagagcattttccaactgttgcaaaaattaccctatgaacacctctctccccagagttcaaactcgcacctttgatgatactgcttcctgctgccattgcctattctgatgtcagagcagccattcccatggaaaatggaatggaaagctaaatggagagtgagtaggggttaagacttctctaaaataccgcggctgccaggcaatttcattaaggagaaacagagatggacaatgtcataaacattctccagccatcagaagaaaccacttccaggaaaagtaaattttgtggtcgtaaacactcacagcaagggccaggccacaggcagcgtggcactggcagagagcagtggttgaggtgaaagtcaccctggggcccaggtctcaaacttaccctggctagactgaaccagaacatttttccgtttcttttccgtaaattaatgtttaaaagttcccctccccacataatcccaatctcactttcaagagataatgctatctcttcagtgtatatttcttccggttgtattatgcatataaatctccagaccatatggacacacacacacatatgcacacacacgtatgagtattatacacatacatgtgtacagatatcttttatacatgtatacacacaggtgtacacatatgtgcatatgtgagatcatgctgagctcaccgttttccagttcctactttcacttcacaatagctcttggccatcttccaccacagtgtatttagagtgactctataaatagaacgatttctaatgcacctttcagatttcaactctttaaataaatgcgacaagggcacatctcgtggtccaaggtcgtgactgctaaggcccagagaacacaacaaatttgctggcttcagccgtgctgacctgctggaagatgggtacaggctcctaagtggatgctgccatttgtgcgcctcccagccacgcaccccaccctcatatacacactatcccttgaggaacatttaccttccttcccgccccaggtgtttgtgacttggtgggtagtgggtgacagagatgcacctgtgtcttcagaacacaggccactgaaggacagcaggcccggggctggtgggggcctgagcatgccctccctcaccaggctgaccaggcttgcatgcagtggggcagaggcagtggaactatccagaaaacatgcccatccccccgcccaagccatcacaatgggagctgagtacagggtcactaggacaaagagtgaatggaaccatcttgaaaacagcggtgatgtttcctgtctccgctggcacaggcctccgtggagcccacgttcttttcacagagttcaagttgctcaaagaaataaggagaggccacttgtgagcagtggtcctccaggtgaaacccagagggcgtcgggatgcccacaggttcctcaggaaactcatgcggggagacatgggggtgccagggacacgcctccaccccaccatggctgcccatagcagggtccgtggcaaagggaccaggtggcccatgggttagtgggagcagatgcccaaccacctcctccaggccccactgcccccttgggccaccacagagacctccaacttctccatcctctctgtctctccctctctctccccacttgctctcttcctcaagggccctttccctgtcaactaccactggcacccggctggaggaacagggcaggtttgcctgttagtacctgcggcaactcatcccccagcccctaactttgaggcgatcccattttcctcctgtattccctgagcttgacacagctgaatgtggaagaccccagggcaacaagaggcttgggaaggaaggtcacactggagtcgcgggggaagggtcacccaggcacaggtactcagcatagactgcagatgctggccagccagtcctacacccagcttactgcagaggcacgaccacacttctgctgcaaggctgggggagactctgtggtttcggtgaggaagaggacaaggaggtgagcgagccaggaacagcccccgcatgtctcttatcacgccttcattcccctctccccgcagcactgagcttctgtgttttctttcccccaagactgttctctcggctgctggtggcaaaggagagggctgcgggggaaggagagagaaaggggggaccccagatgatcctcctattccctaagctctcaaagtcttcagatatctacagctttgctgctctaaccgctcattgtgaaaagaatgagtcttatacttgaatacaaccctaaaatcaaaagaatgacatctaacccgctgttcaccataaatcttttttttttttaatttttgagacagaatctcactctatcacccaggctggagtgcagtggcatgatctcggctcactccaacttctgcctcctgggttcaattgattctcctacctcagcttcctcagtagctgggattaggggtgtgcaccaccatgcccagctgatttttgcatttttagtagcaacgggatttcaccatgttggccaggctggtctcaaactcctaacctcaagtaatctgtctaccttggcgtcctaaattgctgggattacaggcgtgagccacagcgcccagctcggcccataaataatttaaaagactgcatttctactgtctgactccatttctgtgaagagtccaggaaaggcaaatctctagtgatagggtaggctaccagggactgggggcccgggaaggtgggagaaaccggaagggactgccaatgggtatggggactcttttagggtgataaaaaaatgttctaaaattgattgtgatgatcaatgatctacaaatatactaaattggtgaatgtctggcatgtgaattatttctcaataaagctggtttcttttagagaaagtagttcaaaatttctgaggctgtttggtttttgtttttttaaaaaagcaaatcattggccccggcgtggtagctcacgcctgtaatcccagcactttaggaagctgaggtaggcagatcacttgagggtcaggagttcgagaccagcctggctaacatggtgaaaccccatctctactaaaaatacaaaaattagccaggtgcagtggcacacacctgtagtcccagctacttgggaggctaaagcaggagaactgctggaacccaggaggtggagccactgcactccagctatgagaggataaatgcccactattgtaaggcccaagctagtggtaatttattagaacaaccctaggaaactaatgcagaaaggcggaggggaaccgcaagctcctttgtgatccacccctttgtcttccgaaaggcttcgtttagattcagagccttctgttgcagtctcttgctccccctcctggctcaaaggaagaactgtgcccccttcagtcccacggagatttgatctctctaatgaagtgggaggagagaggagttcgcaaaacttagaaatgctgttgcaagaaaaaaaaatttttttttagacagggtgtctgtcacccaggctggagtgcagtggcttgatcacggctcactgcagcctcgaccgccagggctcaagtgattctccactatgccccgctaattttgtttattttttgtagggatgggtcttgctatattgcccaggctggtcttaaactcctgggctcaagcaattctcccacctcagcctctcaaagtgctgggattataggtgtaagccaccgtgcctagcagaaaaaataattttaatggtgcattattttcccatcttgagagaagagtgaagacttagcacttgacctgaaagcttagctccatcctatgccctcatcattcctggtaatttcaactccacgttgatgacccacacaattcttctcttggctctttggcttcctcatccacagagacttcttgtaacccaaccatacaccacccaagagatatcctggaccttgtcatcacaaaaattacactcttccaaaatcatggatttaaattttgtcctctctgattacaaagccctatctttcagcccactttctcaagtgccccttcaatatcacaagtcaccagaatcaagatgctaacacttgacccctcttatttcactcaaatctcgacttattttcttgtctaaccagattctttgtttcgtctattcgctctcacaaacaccaactcccctgatccattcttttactttcaactggcaaaactccaacccccaccaacttccacacacttctctctacttaagcccctcattctccttctcctcctaccctcccactcctgagagccttgcttcacccgtcactgaaaaactgaagccatcacagcgtattattaaccctcttgcatcgatagttttctttcttcctgttacaatggaggacttgtcactcctgtctaacccctccacgtagactctgggttgcatccccttttatttattttcttttagagacaggttctcactctctagcccaggctagagtacagtggtataatcatagctcactgcagcctcaacctcctgggctcaagcaatcctcccacctcagcctcccgagtagctggactataagcacatgtcaccatgcccagctaatttatttttatttttgtagacagggtcttgctatgtcacccaggctggtctcaacctcctgggctcaagtgatcctcccatctcagcctcccaaagtgctcggattacaggtgtgagccaccatgcccagcctctccatctcctttttgtctttcctaaatttcatttctttggttatctcccctctaatatgatcaatatgcctcattttgaccaattattctcactggcacacaggcatgctgtcagagccagcttcgtgggcatgagacctctacagacacacagcaccctgtgcctggtttaatattctgccgtcactgtttttaaattcttaataattttttaacaaggagccagtcctgcctgctctagtatctgccattttctctgcttcccctctctaaactgccaaaacagagcctaggtgagccatctctatttctacttgtatctctactttgtcacttttactaattctgtttttttagacagagtcttattctgtcatccaggttgaagtgcggtggcgcaatcacagtgagctcaagagatcctcccacctcagcctcccaattagctgggaccacaagcatgtgccactatgcctggctaatttttaaatttttgtagacatggggtctcactgtgttgcccaggctggtctccaaatcctagaatcaagggatccacccaccttggcctcccaaagtgctgggattacaggcatcagagccactgcacccagtccacttttactaactctgaaagtgtttcaatcccaacacttttctcctaaaaacaaaaaaccatcctcgtcaatgtttccatatggcctcaatttggtgacattcaaagaaccttttctgaagccatccctgaagactctcctcttgcagttctccactttattctccaacctggcagcctgttgctttcattcccagcatttttctcatgcaaagttgtataattgtgaacgtgttttttgccttctttcactctaagctctgtgggcagacatcatgtgtcctcgtccctgacacagtccctgacgctcagtggatgtttactgagtgaataaatgagggaatggatgtgcaagagagttcaagaacttgaaaaaagttcaagggatcagtaatgtatacactcaggaaaatttttaaaagctagaaagatctgatagtaaaaggagaggcaaaaaaactggataacctggaaagaaaatgagcaaataaaaaatcatttacattacgatacctggaaggataggtgggcgttgtcagaaggtggaatactgaagtgtaagatttcgaaaacacttctgctagtgtaagtgctggccagttctggggtggtcatgagtgggggtggattgagtaaattggaagtgaaggtcactgggattcagatcgaggaactgatctgaggttgctggataggttgctcaaatggctattcaagtcatcagatgaacaggagaagttgaagtcaaagggaagacgttgcagtgagtacagtggcacgtgcctgtagtcccagctactagggaggctgaggcaggaggatcccttgaggccaggagttcgaggctgcagtgagccatgaccactcctgtgaacagccactgcactccagcctgggcaacatactgagataccccacattttcagtgaataatcttgactaacacttataaagtgcctactatgtgccagatactattctaagtgctttgcatatatttatatattctatatacaaataatattaacaacaaccctatgaagcatattactgttatcatccccagtttatagatgaaaaattgaggcaagagaggaaactctggggcttggcgaggtggctcacgcctgtaatcccagcactgtgagaggccaagacaggcagatcatctgaggtcaagagttcaagaccagtctggccaacatggtgaaaccccatctctactaaaaatacaaaaaaattagccaggcgtggtagtgtgcagctgtaatcccagctacttgggaggctgaggcaggagaactgcttgaacctgggaggcggaggttacaaccagcagagatcgcaccactgtactccagcctgggcgacagagcaagactccatcttaaaaaaaaaaaaaaagagagagagagagagagaggaaactcggccaaggtcagacagctagcaaatagtagagctgggaaaggactccggctgtgtggctccagagcgcaaggcctctggtctcgacaggaagatgacagacataagagaccataatgctgggggttaaaaggtggaagagaagcaggaaccagatctgaagtcctttgtatttcatgctgagttttgtaatgaccctcttggcaattggcagactttgaaggaggtcaggccagggcatgacagaatcagattaatgttctggaaagatctgtctggctgcagagtcagacgggaatgaatggtctggaggcgggagggcccttcagagcctcttgcaacaaagagggactgatagtgggcaggcgcctacacctctgctttggaaaggaaatggggcaggtggcaatgtcggaaaaggagcccaggacggcacagcctgcaggagccgcagccgccccatggggacagttcgagctcacccggtccctaggcaagagagcacagtcctggccacctagcccagagggcatgatgggcccagcgagaaaccctggggcccccgcgcggggactgctcgaagtccgcccgggggccttgggagctgggtgcaccccttagaggagcccggcttcgtgggccccagcctggccttgggtctcccttcgccttctgagctcggggccggccgggagctgggtacccagcagagggcagcacaggcttgcgttcgtcccggtctgagcgccgtctgcacctgcccggggccctgcagctgcgcagcgcacggagcagtggtgcgctctcacccacccgcgagctcccacgcacatccaggtcctccccgtccagctcgtggctcaatacaatacctagaaggcctgggggccctcaggaagaccgagggacagcagccagcgcggctgggatgacagccagactcgggcatgcatcaacaggccaggacaagtggccggctccctcctctcccatgcccatgcctgtgatgctgccaaagggcagagaaatatcaaaaagctccaccgaatctcctgggagggaggcccctgccttgagaacagtcaaccagatacccatctggggcccctggggcagggggcagggcacggaagcaaaagcgtttagattctagcggagttttgaaaactacccacccagcagggaaaaacaaaaaggactgaaatcctggcagggagcttccctgactctggcctctccaaactggatgtcaaatcatgaatagaggtccctaggtccctcctactctagttttttgtttttataattgcggcttttttaactattatttttaattcttgtaaaacataacatttgccatgttaaccatttttaagtatacagttctattttgcattgttcccactctcgatttttactgggatttctcacgtacagaatgagacactgagaaacactataaggaaaagacagacctggagactgaggaaagtacattgggaattctaaggtgggcgtgagaggttttgcagccgctgtgccttacgaactttccagggcacctctgtcctgagggcttccactctgtacatccgtcatgccaccctccacgccctccccatacacagcccagacagaacccatggctcatctgggagtggtcagtgagcaccccaaagggatccctgcccatattcagaaacgggaacaaggctatttgaaaactttgcaatgttatggcagaaataatctttgcaggatgtaaatgaaaagttccaagcaattacgacaaatttttgagcaattaatgcactgggtctttagccttcaatgagctggaaagctgagcaagacagaacttgaacccctaataattataacagctaatacttacagagcgctatgagcctggcacagtgctaaccattttactcattcaggtctttgcagtggaaatgctgctattatccctgttttacagaggagaaaatcaaagccctgagggctagctggcttgctcaaggtcacaggggaagtaaatggtggggcctggatttggacccaggcagactggctccaataacatggcttatgatggcacccttgcctgatgctgtgctgggagctgtatagactgagccagttcccactctgggaggctcagaagcttgtggaagggtgagtctgctaatttttttcttggttttggtttgagatggggtctcacactgtcacccaggctggagcacagtggtgcaatcatggctcactgcagcctcaaactcccagggtcaagccatcctcccacctcagcctccagagtagctgggactacaggtgcatgccaccatgctctagctaattttaacattttttgtagagacagggttttgccatgttgcccaggctggtctcaaaatcctggcttcaagcaatcctcctgcctcgacctcccaaagtgctaggattacaggtgggagtcactgcacctagcccagtccgtcaactttgaataatgtcagagtcactggtcttggggacctagaattgccctaaatctctccattttgacagtaaaatttcacatgaatactttaacaaggcttatcaatgcaaccacaggctgtctacgtgcattcaccaacaatcctctttccaccagtccttctgtttcagccttagtacacacacacaaaaaatttaatgttgccaaaggacttgagaaaatccagaatgttttcatacacacatgtcttgggatgtgctgcctatggaagaccttcctttgcctgtcccttctccttcatccttgactttgctgtccagctctttaagggacttgagcctgagagcacatggccagagagaggacagcccagggaggtggtgttatctcttgataacaccagaagagcagagagcaaaagtagaaccggaagtgtggtctggttttcctttttcctgtacttggattttaaagaagcatatgagctcttatatttcaagctagtggtaggtagaaaagaaaaagttttgaaaacaatgttatttcaggtgcacccagcagctgtgcacaccatgactttaacctctcctttctttcactccatagctgaccttctccctcaacctatacctactgcattttcactggggaagcagcgtgagaaggaaacaagtagccatgctaattggtgacaacccacttctatttatttatcatcacttagctatacttatcagagaacaaaaaatatagtctttcatgcccagcactggatcaatttgcagctgaggcatttatgcttatacactttcctttttccctttgttatctgttcattattttcatttgtatatacaagttggtgatatttgattgcactttgaggccgaagcatttcaacagatgttggataataaggaagaaagaacacagaggccgccctgcctgctgctcaggtgggctgtgtttgtatctggttctttcaggatctgtttcatttttcagaatattgtcaaggttcacatggcccagtgcagctgcatttggtggcttttagaagtttcgcagtcccagccgggtgcggtggctcacacctgtaatcccagcactttgggaggctgaggtgggcagatcactggaggtcaggagttctgactgacatggtgaaaccccctctctactaaaaatacaaaaaattagccaggcatggtggcgtgcacctgtaatcctagctactcaggaggctgaggcacaaagaatcacttgaacccaggaagtggaggttgcagtgagccgagattgcaccactgcattccaacctgggtgacagagtgagacttgatctcaaaaaaaaaaatgcaatcccttttttcagggagtaggccagtgaggaatcttatcccagcactcatcagttaaaaccaactatttttggctttctcagcaatgggtcagattttgcagagggaataggatatgaattctgtgtttgggggggtgtcactcttctgggggttttctcctcgcatcctattggatcaacgtcaatgtccatttccattccctcagacccggtttttctacgttggcatgactggcatccggaggcccgataatttcttgttgctgggagctctcctgagaatcgcgggatattttagcagtatccctggcctctgccccctagctgctagtaacaccaacttccacccctcacctccagttgtgacagccaaaaatatctccagacattgccaaacgctccctgggggaacacaattgcccctgtttgagaatcactaaggtaatgggtagaagccagggattctgcaaagcatcctccaatacacaggacagccccccataacacagagcatcaacccaaaacgacaataactctgaggttgagaaaccttgccctgtttaacttggcagaagtcgagttttttggattttgcaacctaacagattcctaatacatccctcaataagatttttttgccctgatacaatcaaggagattgaaagaattctgttaaagataaacactttgaagagggaacatgtgcttatcctaaacctggggccatctgacactttgtagagatgtagcaaaccccttcgaagggaaaggggaactgaccagtgggatgctgaggttgtgataggcgatgtgacaatctcagtggtgacccaagaggccacctttccccttccacggtttctgtaaagagtctcccactggggacttcacagccacaatattaggagagggggcagcaataaatccaacaattcatgctgtgaggaggaagagtccagctgctcagtgtccttgggtcagatctggttctagaatctaccacaagagctaacaacaggacagaagatttgcaatcagcaccatctcagaggttctgggacacgtggatgccacctcctctctcagaagggagagactccactcctttccagtggtgccgattctgggatgttggaaactcggaggcattctgaagcagctgcctctgctgagaatttttttttttttttttttttttttttttttttttgagatggagtctcgctctgtcgccaggctggagtgcagtggcgccatcttggctcactgcaagctccgactccctggttcaagcgattctcctgcctcagcctcccgagtagctaggattataggcatgtgccaccacacccagctaatttttgtatttttagtagagatgaggtttcaccacattggccaggacagtctcgatctcctgaccttgtgatccacccacctcagcctcccacagtgctgggattacaggcatgagccactgcgcccggcccaagaactcttatcttgtccttgttctcaccttacaaaacccactattctgctatttcccagtgggttacaagacagaataagaacacttaagatagtgataccaatgctggaggtttcggtcaatctctcaaaatcaagaggatgatcaaaagtggggaactgttaaatcaagtttagcctaaatctgcctccttacatatttaagttcagcctacaggtttctctgtacataatgaactataacctaaatggaggtgtcaacagactgtagcctactcttgtgccaaccacctagtttcggtcaaagggggctaactgttcaaactactcaaataaggtaaacacgagctgtaaccaatccggatgtttcttacctcacttccatctcacttccatctcctgtaagtccatttccattttctgtctataaatcttctaccacacagctgcgctgaagtctctctaaacctactctagctcaagaggctgcccgatttgtgaattgttccttgctcaattaaactctgttacattaaaaataaaaaggctgggcgcagtggctcatgcctgtaatcccagcactttgggaggccaaggtgggctgatcacctgaggtcaggagttcaagaccagcctggccaacatggtgaaaccccatctccactaaacagaatacaaaaattagccaggcgtggtggtgggtactgtaatcccagctactcaggaggctgaggcaggagaatcgcttgaacctgggaggcagaggttgcagtgagccaagatcccacgattacactccagcctgggtgacagagcaagactccatctcaaaaaaaaaaaaacaaaaaaaaaaactgatttacttgagaagcaggagagacttccacttggtgtatgcagctcccagcaggattgctcttactaaaccaacacgagaaacagtttcaccagaggcagccaaaaagaactaattcgatgcactttggttgttttgaaatccattttccattctcagtgattgccatagccaagggtagctcccagtggccctgcatggcccacccagttggtagctgaatggatttcaaagggcttccgctgctttctagagaaagaaacctgtgcggctcccaggcctcaaactgtccatagctcaggaaagtcctgggaatgccctcctcgcccccaaggtggggaacacatcaagatacacagctcccattcgcacatgcaaactcccatggctgaaagagtccttagtccttggccttatagggattgatgttatggaaggattccatattacagagaatttcctctgcttgatgtcgttcagtctccttgcttcaatttcccagggacagaggttgaaaacagcccccaaatatgtccacattctgatcctcagaacctgtgaatgttaccttatatggcaaaagggatttctgcagctgattaatcttaagatggggaaattgtcctggatcatctggataggccaatggcatcacaagcatccttatagcaggaatgtgggaagaaccagacacaaagaaggcagccgggcacggtgactcatgcctgtaatcccagcactttgggaggccaagccgagcagatcacttgaggccggaagttcaaaaccagcctgggcaacatggtgaaaccccatctctactaaaaatacaaaaattaactgggcgtggtggtgggcggctataggcccagctactcaggaggctgaggcagaagaatcacttgaacccgggaggtggagggtgcagtgagccgagatcgcgccactgcactccagcctggcaacagagtgagactgtctcaaaaaaaaaaaaaaaagaaagaaggcaggccaggtgcggcggctcacacctgtaatcccagcactttgggaggctgaggcaggcagatcacgaggtcaggagatcgagaccatcctggctaacacagtgaaacactgtctctactaaaaatacaaaaaattagccaggtgtggtggcacgtgcctgtaatcccagctacttgggaggctgagacacaagaatcacttgaactcgggaggcagaggttgcagtgagccgagatcaggtcactgcactccagcctgggcgacacagcaagactccatctcataacaaaaaaaaaaaaaaggcaatgtgacggcagaggagagactgcagtgatgctctttgaagacggaggaagagaccatgagctgaggaacccaggcagctaatgaaagctggaagctgccaagaagcgtctcccctcagagcctgcagaaaaaaacagccctgccaataccttgactttagcccagtgaaactgacttcagatttctgttctccagaactatctaagaatttttttttttgagacagagtcttgctctgtcgcccaggctggagtgcaatggtgtgatctcggctcactgcaacctctgcctcccgggttcaagtgattctcttgcctcaacctcccaagtagctgggattacaggtgcgtaccactacacccagctaatttttgtatttttagaagagacaaggtttcatcaggttagccaggctggtctcaaacttctgacctcagatgatccacccacctcggcctcctgaagtgctgggattataggcctgaaccaccgtgcctggcggctgcagtcttttctatgcacagctcttgctgcttcctgacatgagaccttctcagcactttctgccctttcctgagaaactttttcccctcaacaatgaaatatgtatactgaatacccactccatgccaggcactgtgctagctggtaggggactaagatgaataacttcaggaagctgaacaggacacataccccttttggggtttaaatgtttatatggtttggatgtgtccgctcaaaatctcatgttgaaatgtgatccccaatgtggtaggtggggcctagtgggaagtgtttgggtgatgggggcggatcccttatgaatggcttggtgttgtcctcacaggaatgagcaagttctcactctatgagttcacatgagatctgattgtttgaaagaggctggcacctcctcctcctcttgccatgtgacagactggcttcctttggccttccgccatgataagcttcctgaggactccccagaagcaaatgtcagccctatactatctgtacagcctgcagaactgtgagccaaataaacttcttttctttaaacaatctagcctcaggtatttcttcatagcaacacaaaaagactaacacaaatatataacttatgtaatttttggccaggtacggtggctcacacctgtaatcctagcactttgggaggctgaggcaggcagatcacttaaggtcaggagttcaaaaccagtctggccaacatggtaaaaccctgtctctactaaaaatacaaaaaaattagccaggcatgtaatcccagctacttgggaagctgagacaagagaattgcttcatcccggaaggcggagggtgcagtgagccaagatcacaccactgcactccagcctgggcaacagaacgagactttctaaaaaaaaaaaaaaaacacaaaaaacaacaacaacaacaacaacacttacataatttctctttctttcctatagcagatgttggtactctgcccatatcttgcagggctcaccacttcaatgtgctcttccaaatgccaatatctgcatctgtttcctaagggttttctccagaggtggttctgcctatgtacccagcagcctggaggtacccagggattcacaccaactcccgcctcttcaaccagtgactgatatgagttagagcataaatccatcagctccttcatctcttaggtgggatcactgtttttgatacagggtctccctctgtcccccagtccagagcgcagtggtgcaatcacggttcactgcagcctcaacctcctgtgctcaagcaattttcttgcctcagcctcccgagtagctgaaactacaggtgtgccacctcacctggctaatttttaattttttgtagagacggagctcactatgttgcccaggtggtctcaaattcctggcctcaggtgatcctctcacctcagccttctaaagtgctgggattacaagtgtgaaccacctcacctggcttattttcatgtaatcatcagcttgaacctcaattgaaataatcaattctatcaaattagaaacgtgcaggtttacagagcacccacttgggccctagctcagctctgagcagcctattttcgactctaagagctgcaggtgaagatgaacttcccagaagcgtccttctggctggggttggggctgtcctggagctgtgaggggccatgctgtcttcaaagacaggctggaggagagaccagcagacatcaccttagtcatatggctaaagtaacatcaccagtaatgagacatgtcaacatcacatgcccctgatgtggcctgctaaagagagcacaacctcacttctgagatattcttgcaaaaaggcataacctccatctaatcatgtgaaaacatcaaactcaaactgaaagacggtctgcagaataagtgtcaggggtcaaggtcaggaaagagaggaactgtcacaggtaggaggaggctaagcagacaagacaagcgactacacgcgccatgtgtagttgagatctgggaacacaaaagggacattcatggaaagactggtaaaacccgaataaagtctgcagtttagtaaagagggctgtcctgatgttaagatgctaactttaggggaatttaggtggagggtagatgggaactcttttgtaagctttaaatcatcttaagataaaaaggctttttaaaaaaagcttcagctggggtccgggcatggtggctcgtgcctgtaatcccagcactttgggaagctgaggcagatggatcacctgaggtcaggagttcgagaccagcctgaccaacttagtgaaaccccatccctactaaaagtacaaaattagccaggcatggtggcacatgcctgtaatcccagctactcaggaggctgagggcaggagaattgcttgaacccaggaggtggaggttgcagtgagccaagatcaagccatcacgctccagcgtgggcaacaagagtgaaactctatctcaaaaaaaagaaaaaaataaaaggaaaaaaaaaagcttcagctgggcacagtggctcatgcctgtaatcccaacactctgggaggctgaggtgggaggatcacttgagcccaggagtttgagaccaacctgggcaacatagtgagaccctgtttctaaatttaaaaaaaataataattaattagctggacgtggtgacacgcacctctggtcccagctactccagaggctaaggcaggaagatcgcttgagcccatgagttcaaggctgcagtaagccatgatcacgccactacactccagcagtggcaactgagggagaccctgcctccaaaggaaaaaaaaagcttaaagacaggtaaaaggagacaaagaacaagctggaattagactctgtggcaaggaatgtggccttaagctctactcctaacagtcacatgcatagatgatagacttactctaaactttttcactcttctttttttgcctttcttctggacacttagaaatgtctccaacaggccaggcacagtggctcacacctgtaatcccagcactttgggaggccgaggcggatggatcacgaggtcaagagatcgagaccatcctggccaacaaggtgaaaccctgtctctactaaaaatacaaaaaattagccaggcatggtagcgggtgcctgtagtcccagctactagggaggctgaggcagaagaatggtgtgaacccgggaggctgagcttgcagtaagccgagattgcgccactgcactccagcctgggcaacagagtgagactccatctcaaaaaaaaaaaaaaaaaaaaaaaaaaagaaatgtctccaacagaaagtgcttagagttctgacccaggagaaataagaggtaaacagcctagtttccagcttcacaggcagcttagggggaagcaactcagcttcagagagctgcacttaactcttcaccaccacgactgacacaggcacaagaacccacctgcctctccaaggccctgaaagcccacccgatgtcgctttccacactcctatcctacatcctcctctaatcctcacattgacttgatttcacctatattcaaatactggggaggaaaagaagggacgatgtgagccctccagtcctccctgtcaccctgctcgtggactaatcctgagtcatttttcacaactgtattccttgccggtgttgaggcaaataagtccgcctttacctagaacatacagttcaataccaaattgtttacaacagttttattgctccagactttgagggaggctttgaagaactgcctgtaccttgtcctaactctattactcagattaatggtcggccagcgttccctttctggtcagtcacttccaggggattttgcaaagactcatgggttagtatttggaaagaacttaaacttcctcataaataaaaattcttatagctgaaaattctgatgccttataatgagtccttataaaattccaaggcacttgaaaatgtacattgctcccaagcatcgttattacttatatgcataagcagctaccattaggaacacatatgatgtgataggcagtgagttatgctcagtatgtgcgttagtccgttctcacactgctatgaagaactacctgacactgggtaatttatgaacaaaagaggtttaatagacttacagttccacaggctgtacaggaagcatggctgagaggcctcaggaaacttacaattatggcagaaggcgaaggagacgcaagcacgccctcacaatggcggagcagtagaaagaagaaagggagaggtgccacacccttttaaaccgtcagatctcgtgagaattcactcactatcacgagaacagcaagggggaaatccgttctcatgatccaatcgcctcccaccaggcccctcctccaactcaacatgagatttgggtggagacacaaatctaaaccatatccttatgcataggatctcattcagctgaaccctgttgctgcatcgatgtagggagataaagatcacctgtgccctggacttcctgagtcactggttgaaaaagaaagcaggcgaggcacagtggcccacacccataatcccagcactttgggaggccaaggcaggaggattgcttgaacccagaagttcgagaccagcctgggcagtataaggagacctccctccaaccccagtctctacaaaactttttttgttttttttgagacagagtcttgctctgttgcccaggctggggtgcagtggcacgatcttggctcactgcaacctccacctcccaggttcaagcaattatcctccctcagcctcctaagtagctgggattacagatatgtgccaccatgcccggctaattttttgtatttttagtagagaaggggtttcaccatgttggccagcctagtctcgaactcctgacctcaggcaatccaactgcctcagcctcccaaagtgctgggattacaggtgtgagccaccgcgcccggcctctacaaaacatttaaaaattagccagatgtggtggctcacacctgtagtcctagctctgaggcaacaggatcacttgggcacaaaaggtcaaggctgcagtgagccatgattgtgccactgcactccagcctgggtgacagagagagagcctgtctcaaaaaaagaaaaagcaaggagcacacttgtttttgcaccttctgggaggactgaggccaccagcagtggatggagcggacagaactcccaggcactgtgcctggcccagggcaggaactcaaaatgcaaatggatggcatttcttttaattatcgcaaagtgaaatgagccgttactggagataccaagcatgggtcagggaagcagaaattgatattgataatgcagggttctctgctcttccgtcgttgtagctaaaacatgcacagtattgacagaggctggaatcagctcctgaaatcaagccctttctttggctattctctgcctcctcaagtccacagcttctttccgaaagaagcccagttgtctgggtttgaaggccctgagcaccaggagcgcgtttgggagatgttatcggagtgctctctgtctcacccagagtttcccgggaacactgtcgaacactcctcagaagtacatttatggtttggctcattttcagagaaaaggacatgagggagcagagtcaaagagtcaaaagagcagactttcgactgtgggaaccagagtcactaagtacagagtaacacaacttgtgttactgatgctcgagactcagcggggcctttgcacgtgaatagccaccaggtggcagtgttattctctcgaaaggctaaaggctgtgtgtggcatgtgcctgtgtgtgtgtatgccttggtggtggtgtgtgtataatgtgcagtgtagtgtgtgtggtgtgtatgtgcgtggtgtgtgattatgtgcatgatgtgtgcgtgtgatgttgtatgtgtgtggcatggggtaaggggtgtgtatatggtgtgtgtgattcagtgtgcgtgtgtgaggtggtgtgcatggtatatggtgtggcatgtggcctcttgtgtgcacaaccctgtgtcgaagctgggagacagcttccttctcatccacccactaccactcagcccaacaaccagctcactctccttcaccctctgccactcacgcacacaccctcctcttgccaccatccctcttctccatttctagccaaaaattagcagggaggagccagaaagcccaacagagaccgtgaaacaaatatcaaattaaaagtattttactggctgggcacagtggctccctcctgtaatcccagcactttgggaggccgaggccggtggatcacttgagtccaggagttcgagaccagcctgggcaacatggcaaaacctcatctctacaaaaaaaatatttaaaaaattagccaggtatggtggcatgcacctgtggtcccagctatatgggaggctgaggtggaaaaatcacttgagcccaggaggtcaaggctgcagtgagccaaggtcacaccactgtactccagcctgggcaacagagtgagaccttgccttaaaaaaaaaaaaaagaaacacaccttgggaaggacaatgggacctcagttatcctctccttgttgccccattctctctcccacttgttctcgccccgacacccgagttgctcttcctaggagcccactccctctgactccccaagcccagctaggcagcggttaatgctttccagaaagaggtccccaaatttccttcattggcatgtgcgtttggaaagaggaccctagacagagcaaagacctcagaagaagcatcctccgacactggcacttcaggcccagttcatgttagactacctggatctagaggacacttcatggggaagcttcccattgccctgagatcacagcagtgcaggaaagcccacctcctctgtgtttgtggaaagctgggtcctgggtattgttcctctatgtgggtgatgcattcaataatgaaaagggccatcatgaaatgggtgactgagtctccccagtgtgtatttaagagcattgcaggccgggcacgcagctcaccacagaggccgaggctgggtggatggcttgagcccaggagttcgagaccagcctgggcaacatggcaaaatcctgtctctacgaaaaatgcaaaaattagccaggcacggtggtgcatacctgtagtcctagctactcaggaggctaaggctggcggatcaactgatcccaggaggtggaggctgcagtgagctgagattgtgccactgcactccagcctagacaacagagccagaccctatctcaaaaaaaaaaaaaaaaaaaaaaaagatattttctaggtcgaaataatgatctctaagaaagtggcaatatgagaattactaaaaacatcaatatatccctccagaagacatttatgttctttttaagacacttaatggcgtttagaatatatgctaacatctttttcatcgggcatggtcagaaaagtggtcacttttacaataatcgtgatctccatttggaagctcaaacctttacatatcaaggcatttaaatatcactactggggccagatgcagtggctcacacctgtaatcccagcactttgggaagctgaggcaggatgatcacttgaggtcagacattcaagaccagcctagccaacatggtgaaaccctgtctctactattaaaaaaagaaatacaaaaattagccaggtgtggtggcacacacctgtagtcccagctactcaggaggctaaggaatgaatcgctgagaatcgcttgaacccaggaggcagaggttgcagtgagctgaggtcaccccactgcactccagcctgggcaacagagcgaaactccatctctaaataaataaataaataaataaataaataaataaataaatatatgccaggcgcggaggctcacgcctgtaatcccagcactttgggaagctgagacagacggatcgcctgaggtcaggagttcgagaccagcctgaccaacatggagaaaccccatctctactaaaaatacaaaattagccaggcatggtggcacatgcctgtaatcccagctactcagggggctgaggcaggagaattgcttgaacccaggaggcggaggttgcagtgagcaaagattgcgccactacatttcagcctgggcaacagagcgaaactctgtctcaaaataaatgaataaataaattaaataaataaaaataaatatcactattggcaaaagctttctaacatgcattgcctatctaggtcacagtttgctaatgtcttgtagcctggatggttttattgatccccgagagaacttttattatcctgagggaaaacagactggaaagaggacgggaaatttgtttggctttggaatagtggtgggggaggaataaatgggaagaaggaacgtggggagagatggacgctaagcaggagagatggggcgagggagaggggaccacagccacgcagaatggaagagcaagaagagcagggagagcgtgaaggcgtgagaaccgaggcagggcaggggacttcagaggcagaagcccttcagaagctctgcaaatccaaatgctaagaagaacatgcagtcattttgacaagggcaggtcagaaaatgccacgcgtgcgcacagaggatggaaggccaggacccgccgccaagcagggctgtcggggactggtcgcctcctctgggcagcgtcaaagggcaagattggtctggtcctctttctaacacctcccacccgggatgcagccaagagtggctgcagcctaattttctacatgtaaacaatgacctcagtgatgcccacggggcccctctctggccttctccccctgggaaaagactgagttctcgacgggcatcccctccccctccggaaccaagggctctgggatgttgacagcccccgccacctctgagaagggcaggccgtggaaaaccatctcctcccttccttccccctctgcctttcctagctggggcctctgcacaatgcagctgggccaggccctgttgctaagggaaccagcagagggcccagccccctccccatagaaataaccccaagagaggagtgaaggattcacttgccctcatctccaggctttggaggagggtaggtgcctggccagcagagtggccactgctcactggcccagaggaagcaaggccaccagcctgatcccacttctccctccggcccatcttcactcccctctcctcaaccacaagccccgccaaaatagagacccccggctttgctcccctgctgcaggaagggagagccaccgccagacactgcctgcctggtcctcctgttctgatctcacccggtgcttggaatcaaagaggacctggcttccctctcgggatacgtgattttctttggttgtgactcattgtctgtaaatgttgctggagatgaatcagaccccacctgctacctgcggctgagatgctgccaacagacacagaaaggtgtgccgcagccaccacccgcctcctctctcccagctctgaaggagcccacagctcccatgggatgaggtcttcatcgtggctttcaaggccttccttagagcctttggatcagggaagcctgccctaaactgcacattagtgtccatgactcacctttgaaaaattcccataaccaggcctcacccgaccctgcaaatacagatgcagttactctgggcagggactcagagcaaggagttttttaagtgccccaggtcctgggctgagagcacctagtggctgtctcagatgctctagctcagccgagatccagtggcttgtccaagttcacattgtcggctggagagctggagcaacaacacaggattcatgccttgagcacagtgttctatcataggattttcctacttaaaaaagtaatttgataaaattattttggaaatgtatacaatatagaaaggtaaaaagaagtccattaaatcacccctaaacctcaacacccggaggtaagcactgttaacattgtgggttgtgtttttatttattttcaaatatttaatgtgtaaaacaggtcatacagaacacacagctgtgcgtcctgcccagccaaactgaccatgtttttagcaggctgttggcaaagagtgtcaagaatatcttagagctgggcatggtggcacgtacctataatcccagctattcagatggccgaggtgggaggatagcttgagcccaggaggtcaaggctgcagtgaactataattgcatcactgccctccagcctgggcaacagagtgagaccctgtctctaaaatatatacatatatattttttaattgacatttttcagcccactaattccatttctaagaatctattctggctgggcacagtagctcacgcctgtaatcccagcactttgggaggccgaggcaagtgggtcacctgaggtcaggagttcaagaccagcctggccaacatggtgaaaccctgtctctactaaaaatacaaaaaaattagctggtcatggtggcggacacctgtaatcccagatacttgggaggctgaggcaggagaatcacttgaacccaggaggcagaggttagagtaagcgaagatcacaccattgcactccagcctgggcaacaagagtgaaactccatctcaaaaaacaaagaatctgtcttccaagaatggtcagatgtaagcgaaaaattatttacagagactttattttattttattttatttattttctgagacagggtcttgctttgtcacccaagctagagtgcagtggtgtgatcatagctcactggaacctcgacttcttgggctcaagccatcctccccattcctcccaaagcacgggattacaggtgtgagccactgtacccagccagctttcattttaatgtaatttataatagccaaaattgccaacctcataaatgtaaaaagttagaggaatcgtctaataaattgtagttttgcatggaatactttgaggtcattaaaaccacattttcaaaaaatgtgtgatgcctatgataattgtcctctcccactatccctccctccatgtttgcctcgatgctcaatgcctgtaagcacgtgttccaggaatacccctcctctgatcctactgtaacccctttgaatgctacgaggccaattgatctttctctttcagatcactcgtagcatatattgtcagtaccaagtgttttggacggttttttcattttactattatttactatatactacttctatttgcttctctggcatgtatgtaagaatgtgtgtgtgaggctgggcacagtgactcatgcctgtaatcccagcactttgggaggccaaggcgggcagatcatctgaggtcaagagttcaagatcagcctggccaacatggcgaaacctcgtctctactaaaaatacaaaaattagccaggtgtagtggcgtgcgcctgtagtcctagctactcgggaggctaaggcagaagaatcggttgaaccagggaggcagaggttgcagtgagctgaaatcttgccactgcactccagcctgggcgacagagtgagattccgtctcaaaaaataaataaatatataaataatgtgtgtgtgcgtacatttgtgtccatgtgtgattgtgtatgtatttgtaagagagaaaaggaactcagaattaccaacggctcgagggctggaagtgtgacttacacatcttcattctttgccagctcttcagtttcagcatatcttaaactaaattcatctccctcaaatctgtgccaatgccacaaaaaccttttttttccgtgcgcaagactttctaaactggctcttcctcctgcattgccagttcattcggtgatatcaccccttctcctttgggccacccagatttaaatattttggaattcctgaccgtggaatcctaccattgtgttttttttaagtcttgtcatgtgtctttttctgttccgttgccaccatcgcaggcagcaattttccatcacttcaactctgtctccgctgagccatctgctggcagactcttggcccttcagactatctcgtgttcaaccacttgtttcagatatttttaccccatcacttctctggctaaaaagccaccgatggccacttataaacggtcattattgaatgaagtgctaacttcttatcctggcacatgggtccctccttaatttgatcccaacccatccatcttcctggttttattttatttatttatttagagatggggtctcgctatgtcgcccaggctggcctcaaactgctgggctcaagtgatcctcctgcctcagcctcccaaactactgagattacaggcgtgggccaccacacctggcccttcttcctattttatatcacaccacttcctgactaatatcccaagctcctgccacgctggtgtaagcaccaaccccagaacacaccctgtgtccttgggcctcctccgcttactactgactggtgagatcttggataatttgcttaaccacttccaccttaacccctcatctataaaatggggataatgctaatgacaccttcttgaactcctggcctcaagcaatcctcccatctaggcttcccaatgtgctgggattacaggcatgagccaccacgcctggaaacaccttctttacagggattgtggtgaaagcaaagcagatgcaagaatgcaacaaccatcatttatttgctcacagttttgcaactggggctaagcaggcagggactgcttggcagctgaggtggatcaacagggctggaggatctacctccatgtggatcactcggagttggtgacttggtgctattggctgggagttcagctggtaccatggtcctggagcctcaattgtactccacttggactttccaggtggcttagggacttcccatagcatgtcagctgggtctttctaagagaggggaagcagaaattgccaggcctcttaaggattagacctaactggcagagcataacttccatcacatcctatttgtcaaagccgtcataggccagcccagatcccagcgggtggagagataggctccacctctccaaaagggagtggtaggtgcatgggaggaaagaaaaaataatgacagctatctttgagataagtccccaccttagggtttctgcagccttgtctagtagaagagatgctcaacagtttgcatttactgaactcttaaagcttgttacttttgtcccaagattgcttggattgctgccacaaatcatgatttgactttttcctcttgctgtgattagtcatgatattccaagtaaatattaagctctttgagggcaagactcttatctacagtaaacaatttttattccccccacagagatgtacacattgttaactgtgaatatgcagcatttgacttattttcagccctagcacttgatttattgacagccgtagtacacggaagggaacacaagagttgcttttattgaatttttgttgggtcaggaggctttctgggctctgaggaagactcagagaaacggctcctttgttctccagccctgcccagcccagagccttccagaagggaaaactcagtgaggaggctgcagactgccgagggcgtgttgaggaaattccattcaagaccctcatttccgaaagtgctctgtgattagcccggctttgtgccagccccagtccagaggcagagaggccagcccttaggtcaccaaaagcatcaggaaaatacaaatgcgggcccctttacagcccggcacaggaggttaaaggatttgctttgtagtttgtttatctcacagactgaagccaattatcccaattactaaaaaaataaaataaagtttactacagattgtatttttaagttcatttaatctccaaaacaggctgctacacacagttttcctttggttccaacaactcacgcccagtctctgtggcagggaagacagcccctaagggtcacatgtccaagggccaggggaggtcagaggtcacttaatggttcccaaatgcgctagcaagtagtcatagatttgaactttgcattgttgctgcggacccagggccttcttgggaggggagagctgggggagctatctctgcagttcaaaggcgggcgctgtggtttcacttggcttaaggtttcagtccttgaatcctaaacactatccccactggcctcctgtgcatgggaggtggggggttgggacttgggatggacattctgtgtaaccccaaactgcaagccctgcagcttcacggtggcctcggagctgggagaccctcaggatcagcatcagaggctgaaaatactggtgactattttcagaagcccatgagtattgatgcagaatgcagaaggcccagaccagccaagagctcctcacctccaagcccagtcaggactctgggattcagaaatgcaccccaagttctagccttaaccaccagcagagtgggtgtttgctagacagtgtgagttgaaaaggaagtcaaaggtcccagatggtatggtcccctcaaataagcatctccacatatacctgaaaatctaccataagtatgatgtatatttatatctattgacatggaaagatgtgttaagatacagaaagtgcaaaatgcaagccacagatctgccaaggcgggcagatcaccagagttcaggagttcgagaccagccttgaccaacatggtgaaaccccatctctactaaaaatacaaaaattaactgggcatcatggcatccacctgtaatcccagctactagagagactgaggcaggagaattgcttgaacccgggaggtggaggttgcagtgagccaaaatttcaccattgcactccagcctgggcaacaagaaggaaactccatctcaaaaaaaaaaaaaaaaaaaaggaaagaaaagaaaagaaaaagaaaaaagaaaacactagcctcgggcttagaaagtttgctgaaaatgaagaatgaagattttctaggcactactcagacctgttaaatgagaatcttggaggcttcgggagagctgaggaagggtgtttttgttttgttttgtttttttcttaattgagactgaatctggctgtgacgcccaggctggagtgcaatggcacaatctcagctcactgcaacctccacttcccagattcaagcaattcttctgcctcagcctcccaagtagctggaatataagcacgtgccactatgcccagctaatttttgtatttttagtagagacggggtttcaccatgttggccaggctggtcttgaactcctgacctcaaatgatccgcctgcctcggcatcccaaagtgctgagattacaggcgtgagccaccacacctggcccaaggaaggtattttcaacaccctcttcaggcagttctaaagtaatgcgatccacctgttagggactaaatgtttgtgcccctcccccgcaaattcataggttgaaatccctacccccaaggtaatggtattagaaggtagagcctttgggaggtgattatgtcataagtggagctttgggaatgggattagttcacttataagaggaacatcccagagaagtcagcatctgcaacctggaagagagacctcacgagaacctgatcacgctggtaccctaatctcagacttccagcctccagacctgtgagaaacaaaattctgttgttttataaggcatgccatctatggtaattgcttatagcagcctgcaccatctgagtggatgtttgctttctttaaagtttctttgaccaggcgcggtggctcacgcctgtaatctcagcactctgggaggccaagggtggtggtggatcacttgaggtcaggagttcaagaccagcctgggcaaaatggtgaaaccctgtctctactaaaaatacaaaaattaggcgggcgtggtggtgcacacctgtaatcccagctactcgggaggctgaggcaggagaatcacttgaacccaggagacaggttgcagtgaaccaagattgtgctgccactctccagcctgggtgacagagcaaaactccatctcaaaaaaaaaatgtgaccactcaacccctctgtcccggccttgctgtccctgctggtccttcccccctccctccttcttatatgtgcccaggaaccagaaatagcctatcaaccctgaaggagtctaacaggccttgccacttaccaccagtccccagcagagcttcccggaatcattgtcctctcccttccccttgttcggttttctctttcactttcctaggctctttggctaggactggctgcagaagttgatttgcataattatttaaccctggtaagaacgaaagctgtaaaccaaattaggtatgccagcaggtagcaggtatagaagaagaatcacggggtacatctgaccctcgtccttgcttctcgtgatcctaggtaagttatttaacctctctaagcctctgtgtactcagctgtgaaatggggatagtcacacctgttcatggagttgttgttaagaagtttaaaaataaaatcagctttgggaggccgaggcaggcagatcacgaggtcaggggttcaagaccagcctggccaacatggtgaaatcccatctctactaaaaatacaaaaattagctggacgtggtggcaggcacctgtaatcccagctactcgggaggctgagccaggagaattgcttgaacccgggaggcggaggttgcagtgagccgagatcgtgccgctgccctccagcctgggcaacagagcgagactccatctcaaaaataaataaataaaataaaatcaggctaggcatggtggctcatgcctgtaatcccagcactttgggaggccaaagcaggtgaatcacttgaccaggagttcaagaccagcctggccaacatggtgaaaccccgtctctactaaaagtacaaaaaaattagctgggcgtggtggtgcacgcctgtaatcccagcactcgggaggctgaggcatgagaatcgcttgaacctggcaggcggaggttgcagtgagccgagattgtgccactgccctccagcctgggcaaaagaacgagactcaatctcaaaaaataaataaaattaaaaataaaaataaaatccatatctatgcaaagcacctggtgcctgcatggtaggcaccatggatcacatggttgctaaagtagctattaccaacctgaatcaaataactcttagaaaaaaagatctgaggcacattctcaaactcccccattagtaataataaactttattaagtcttctccccagattttccaagttagtccctctcaggttaaggcccaggaaagtgacatttggcagccacttgagataactgatcacactttgagaaactctagtctaaggctttgatgagcaagacagaaataactgcagttactgagttctcctgcttagtttattactaagcagtcagccatttgtattgcacaacatcacagttggctaaggtttggtggatctaagctgggcccagccaggcttggttccaagctggagtttgcatccaggtgtgtttcatatgtccctcatccttcctggactggcaagtccccaaagcacgttcctctcatgtcaccattgctaacattccaccagccaagcaagtacaagccatgtccaacatccaaggaatgactactgtaacatacctcagaagcataaagaaaaattggccaggaatggtggctcatgactaatcccaacactttggaaggccgaggtggacgaatcacttgaggccaggagttcgagaccagcctggccaacatggtaaaaccccgcctctactaaaaatacaaaaattagccaggcatggtggtgtgtgcctgtagtcctagctactcgggaggctgaggcagaagaattgcttgaacccggaggcggagattgcagtgagccgggatcactgcactgcactccagcctgggcgacagagtgagactctgcctcaaataaataaatgcttgcttctgcaaacgaggaatcagcacgctatagcctgcaggcaaatctggcctgcagcctgtttttgtactatccacaagttaggaatggcttttccattttttacagcttgtaaagaaaaaatgaaaatgcaacagagaccatatgtggcccacaaagcctaaaagatttattacctggcactttaaggaaaaagtttgtttatctctgctatttgccatcaaaaagtcaagggttttttctgtcctttgccttcctgcacaaatagaggtgggtggtttcatatttttgtttgtttttaagttaaaggggatttaaagatgtttctaagcatggaacagaagccagtggcgataaaggacgggagcagttggaaaaacagaagagagggatgttaattaaaggagcatggtcttgaaaagaatggtttgaagaagcaagtggaggggaggaaaaatgtattttcctctaccatcttacattcatggcagcagcccctataacaaaagagaaaagcatacaaatgtatttaatgtaactttaccatggcatgaagccttcaaaagaaaacaaaaatccaggccaggcgcagtggctcacgcctgtaatcccaacactttgggtggccaaggtggggggatcatgaggtcaggagttcgagaccagcctggccaacatggtgaaaccccatctctactaaaaatacaaaaagtagccgggtgtggtggcacgcgcctgtagtcccagctactcgggaggctgaggcaggagaatcgcttgaacccgagaggcagaggttgcagtgagtcgagatcgtgccactgcactccagcctggcaacagcgagactccgtctcaaaaaaaagaaaatgaaaacccaacgaaacagttaaacctgagtattttaatgctagatttgatgaagggtatactagtggagaaatatgaggtagcaaaaaactgtgatctaatggcaataaactgggggaggcttggcaagcttgttcagattctctgcctccctgggtcttcagagatgaagacgctcttgttctctgggtagaaggagggtatctgttacatgaggatttcatgacctgcttcagggaaaggttagaaaatccttcctaagtgttataacctgcttcagggaaaaagcagagaaagtcagatcttcctgcacaaactctttttttaaaattaacttattttttttagagataaggtcttactctgttgcccaggctggagtgcagtggcaccatcatggctctctgctgtcccaagctcctgggctcaacccatcctcccactgcagcttcccgggcagctggagctacagatgcaccactgtgcccagctaatttttaaattttttgtaaagatgggcatctcactatgttgcccaggctagtcttaaactcctggcctcaagcaattctcccaccttagcctcccaaagcacagggattacaggcacacaccaccgcaaccggcccacacattatttcagcttaaaatatttgagggtagaatgtcctgaatcccaacaaagggtcacctctttctctaaggctggtggaaatggcttaggatctcgtccaatggagaagacgctgggatgggaggagtgggataaaggtgcgatgggcctgtcaagaagaaaaggaaggctgggcgtggtggctcacgcctgtaatcccagcagttagggaggccaaggcgggcagatcacctgaggtcaggagtttgagaccagcctggacaacatggtgaaaccccatctctattaaaaatacaaaattagaccagcctgcccaacatcgtgaaacccccaactctactaaaaatataaaacattagccgggcgtggtggcgagtgcctgtaatcctagctgctcgggaggctgaggcagaagaatcacttgaacctgggaggcagaggttgcagtgagccgagatcgtgccattgcactccagcctgggcaacaaaagcgaaactccatctcaaaaaaaaaaaaaaaaattagctgggcatagtggcatatgactgtagtcccagctacttgggaggctgaggcaggagagttgcttgaacccaggaggcagaggttgcagtgagctgacatcacgccattgcactccagcctgggcaagaagagcaaaactgtctcaagaaagaagaaaaggagaggaggccaacaaaggcaggcaaagacaggactgtccatggggcagtggtacccacctactggtcaggaaaacctgccaaagacttgcaaatgggcaagagaatcctggtgaccttgtggtagtagagtgctgggtgtttctagagggccttccaggaatgatctgactccagaggcatgtgtcttgggttgtttgtgattggctaagctatttaacaattctgtagggataaagttgtagaaaactgacaacataaattttccttgtccatcggaatgcacagattcctgatcatagcaatgcaaaagaatcatgtctttacagaaaaaaaactctgtaaattaaattctcatttgaaccaattttagcagcttactggtttccacattcaccaatgaattaaaatctttgatacatgttcattttatatttccatgagtcaggattttactttcttgaaaactagaatttagcataggtcttttaaaaacaacaataggccagttgcagtgactcacacctgtaatcccagcactttgggaggctgaggcaggtggatcacctgaggtcacgagtttgagaccagcctggccaacatggtgaaaccccgtctctactaaaaatacaaaacttagccgggcgtggtggtacgcacctgtaatcccagctactcgggaggctgaggcaggagaattgcttgaacctgggaggccaacgttgcagtgagctgagatcacaccactgcactccagcctgggcaacagagcgagactacatctcaaaataaaaaataaagagaaaacagaaaaaaaaaaaaaaagaaaaaaagacaataaacagtcttggagattaaaaacaaaacacaaaagataagatggggccaggtgtgatagctcatgcctgtaatcccaacactttgggaggccgaggcaggaagatcacttgaggccaggagttcaagagcagcctgagcagcatagtgagaccccatctcggctaaaaatttaaaaattagccagatgtggtggcacgtgcctattgtaccaactacttaggaggctgaggcaagaggattgcttgagcacaggaggtcgaggctgcagtgagccctgatggtgccactgcactccagcctgggtaacagagtgagaccctgtctcaaaaacaaaaaggtggccgggcacggtggctcacgcctgtaatcccagcaccttgggaggccgaggtgggcaggtcacgaggtcaggagatcgagaccacggtgaaaccccgtctctactaaaaatacaaaaaaattagctgggcgcggtggcgggctcctgtagtcccagctactcgggaggctgaggcaggagaatggcgtgaacccaggaggcagagcttgcagtgagccgagatcgcgccactgcactccagcctgagcgacagaccgagactccgtctcaaaaaaaaaaaaaaaaaaaaaagtgatttttaaggtttaataggccgggcagcctccttccacgagcactgtgtgtgccacacattgcctaggaattaagaaaactacaatttgcacattgctttctcagctgtaggagctgtttttcaaccctgtgagtttacaaaactgatagtaatgattcctgcacagacatgcaaatgaattttgtccagttgaggtgcaattgatcccaacctgctaccaccaccacctctgaagccagttttgcctctattaataaaggtactcactcagcgttcctaactgactatatatttatgtgtcttgctgtttagcgtctccttcaaattggtttttaaagctttactggctcccccattaattaatgagttaaataaaatccttgacacatatctattttatagctgtatgaaactcatttcattttttaaatgattttacaatgtttttaaacaaataatctgtcaggattctctctgaacctattctggttctggaggctgcctgattcgcaaattaaaaaaaaaaaaaattatctgtcggccgggcgcagtggctcatgcctgtaatcccagcactttgggaggccgaggtgggcggatcatgaggtcaggagttcgagaccagcttggccaacatggtgaaaccccgtctctactaaaaatacaaaaattagccgggcgtagtggcgggcacctgtagtcccagctactcgggaggctgaggcaggagaatcgcttgaactcgggaggcagtggttgcagtgagccgaggttgtgccactgcactctagcctgggtgacaaagagagactctatctcaaaaaaaaaaaaaaaaatctgtcaactacatctaaggtatctcattaatgagtcactacagcctcgtgaggagatctcgactgccattgttatacccccattttgaggatgacataattgaggcaccaagatcttaaggtcacattagcagagagtggcagagtcaaggctgggacttgggagtttctgactccaagtctcctgtcctttccactgttaagttaaaaaaaaaaaaaaaaaaccaccccagggatgtaacttcttggcctgccaaaagtagactgcattggaaattaataagactgcaggtgaggaccagtgccaacaagaaactggtatctacttattttttcttctctaataggttcaccaaacccaaattctcaaaacctgaatgtctcacaagtactttccaaagtctttttttttttttttgagacaggatctcactctgtcacccagcctgaagtgcagtggcacatcacagctcactgcagcctcgacctctcaggctcaagcgatcctcccacctcagcctccctagtagcagggactataggaggatgccaccactgccagctaattttttttatttttgtagagacaaggttatgccatgttgcccaggctggtctcgaactcctggactcaagtgatcccccttgcctcagcttcctaaagtgctgggattacgggtgggagccactgcacctggccttcaaagtcttactgttttgtttccactacaaataaaccctcttcagacgtatgttagcattttgggtggcttcactcagaaggactctgcatttttctctgtgtgttcactccttttacatgagaagcccaagatttaatgggcaccttaggaggataagccagacattgtgcaggacaaacacttcacacatctcatctacaggacataatctctactgcccataatctctactgcccttcagtcagcaaatattaattacagaagggtaataatgttagcaacccaaatatgaaaacgggctgggtgcagtggctcacatctgtaatcccagcactttgggagggcaaggctggtggatcacttgaggtcaggagctcgagaccagcctggccaacatggtgaaatactgtctctactaaaaatacaaaaattagccagtcatggtggtgggcgcctgtagtcccagctactcaggaggctgaggcaggagaatcgtttgagcctgggaggcggaagtttcagtgacccaagatcgcaccactgcactccagcctggacgaaaaagcaagactccatctacaaaaaacaaacatgtaaatgaacaaagcaacagaggagctctccgtcaactcgcggggtttaacagagagcctcacagatgattgcagtccactaagccaaccaagggttggtgggagcatgagggatctcatcattgaaaagaatcattgaaagcttaatagagctagagtttatgttgagacttgaagaataggtagaaatttgcctagtaaataaggagatgtcaggtcgggtgtggtggctcatgcctataatcccagcactttgggaggctgaggcaggcagattacctgaggtcaggtgttcgagaccagcctagccaacatgatgaaacctcgtctctactaaaaatacaaaaattaggccgggcatggtggctcatgcctgtaatcccagcactttgggaggccgaggcgggtggatcacaaggtcagaagttcaagaccagcctggccaacatggtgaaaccctgtctttactaaaaatacaaaaattagctaggcctggtggcacacacctataatcccagctactggggaggctgaggcaggagaactgcttgaaccaggacccgggaggtggaggttgcagtgagccgagattgcaccactgcactccagcctgggagacagagcgagactccgtctaaaaaaaaaaaaaaagccaggtgtggtggcgcatgcctgtaatcccagctactcgggaggctgacgcagaagaatcatttgaacccaggaagcagaggttacagtgagctgagatcacaccattgcactccagcctgggcaagaagagcaaaactcagtctcaaaaaaataaaaataaaaaaaagaaagaggaagagagagcacagggtatttaggaggcagaaacagtccagagtggctgcaacaattgataggtaggggagattctgaatgtgaaactagacagacgttcaggaacaggtcatggcaggccaagaggaggaagcgtctctgcagacaaacataaagtcatgaagtaaggctgaagcaagggctgagcatacgtcctgcacaaagggtcacacaggatacctgccaaggagggaaaggcaccttcaagaacacagtcataccctgtaattgaatcaacaccaggcccatctcaacttcgcacccacacccaaacccaagataggttccacggtactcagggtagatatgcaggtgaatggaagctaagaaattgatttgtacagttgtaaacattttctgtcactggattatttctttgtgatctgaggtctccaatcttttttttttttttttttgagagggagtcttgctctgtcacccaggctggagtgcagtggtgtgatctcggctcactgcaagctccgcctcccgggttcacgccattctcctgcctcagcctcctgagtagctgggactacaggcacccaccaccacgcccggccaattttttgtattttagtagagacggggtttcaccgtgttagccaggatggtgaggtctccaatcttttgctatgatattttaggttgggaaagaagagggaacatgttctgtgaacctaaaggagagacattgtcctaacaaagcaaactggtaaatgtagcaacattaggctgggcaaagtggctcacacctgtaatcctaacactttaggaggccaaggcaggaagatcgcttaaaaccaggagctaaagaccagcctgggcatgtagcatgaccctgtctctataattttttttttctttaattaactgggtgtggtggtgcacgcctgtagtcccagctactcgggagactgaggtaggattgttgcttgagcccgggagggcaaggctgcagtgagctgtgatcataccactgcactccagcctgggtgacaggaaaaaaaaaaaaaattaaggggaatggatgtttttgccatccatttatcaaggtctttgggatgctaattggcaggatgcagacggcccccttctgagcagtgtttctggggacctctcaggccatagttcagtgagcagtgcttctttgcttcttttccctctgcccatctgccattgcccaacctccctgccacccctccccacctctcacccttcagagagcggaaaagttggtagttggaatattttcttcactgacatcctcatcttttgggggtcctggggaagcatgtgcagagataaaaagaagaaattaatctgttctcaagagagggtctgcctcagctgcctgacagcttaatctccccagggttcttaaacattccttttattttaatgtgctggctttttataaaatactgttgaaaagaaacagaattttggataattgggcagtagcaacatcttttaaaggaaaatggatacagtctattaatggtatctgtaataaacaccttagggaacagctcattaatttttagcaacaggagccatttagtcctatatcctctccttaaccaaattctcgcttcttgatttttttttctcccattgattttgatgtaaaaaggaaagggaggactcgctcctctatacgtgcccatctctctatagagcatctttggggccccaggaccacctaaatgttgggggttatgttatcattggagccaccaagctcatccctgatgccatccttatcaccacatcccattgccccctgtctcttttttttttttaagatggagtctcactccgttgcccaggctggagtgcagtggtgtgatctcggctcactgcaacctctgcctcccgggttcaagcgattctcctgcctcagcctcccgagtagctgggatcacgggcgcctgccaccacacccagctaatttttgtattcttcatacaggtgggttttcaccatgttggccaggctggtctcagactcctgacctcagatgatccacccgccttggcctcccaaagtgctaggcgtgagccactgcacccagccgccccatgtctcttctcagaacatctctgaagtgatttttcagtgattttccatgccccactcatctgaactttaatcctgcatttctctgtgccagcctacatttgttgtcctcacaacattaaaggttcttgactgcacccactgtgtctctattccatccagcccaatgtctgactctcagaaggttgtgttaattttccattgcgcatgacaaattatcactgcggggcatggtggtgtgcacctgtagccccagctactcagggtctgaggccagaggatgccttgagtccaggagttctgggccttagtgcactatgccaagtgtctgcacttatcaggtgtctgcactaagtttggcatcaatatggtgacctctcggaagtgagggaccattaggttgcctaagaaggggtgaatcagccccggccagaaatggagcaggtcagaactcccatgctgatcagtagtgggaacgtgcctgaaaatagccaccacactccagcctgggtaacatagtgagaccccttctctaaaacaaaataaacataacatagtgagaccccttctctaaactcataacatagtgagaccccttctctaaaacaaaataaaaataaacaaattaccacaaacaccgaataggtgttgaaaccagcacctattttaaactcacagttttgcaggtcagaagtctgggcaggcccatctgggttccctgctctggtatcacaaggctaaaaccaagacgttggctaggctggactctagggaagaagctgcttccaagttcattcagcttgttggcaaaatttagttctgtgcagctatgagactgaggtccctgctaccttgtgggctgtcagccatgggtcactctcatctcctagaagctgctctttggtccttacctgtgacctcctccatcttcaaggtgcatcaaattcttatgctttcaatctctctgacctccctttttgccatcaactggataaaactctctgcttgtaatggatttgtgattagattagagcccctggaaaatccccctttgattaactctgaatcaactgattagtgaccttaatgacatctgcaaaaccacattttgccaggtaatggagcctaatcagggtattcctagaccatgggatgagaacaggaaatttcatgaatggggtcactttaggatttttcctaccacaagtgtctcggaatatacgcaagagcaagaattattggggtaggatgatctccacccaagcaatttctgtctactgtccttgctatgacaaatcctgacctggcccatgaccggctaacaactgtgtagacctaactggatgccatgatcccaactgggtacctcatgtacacagtagagggagccgagtgacaccaacactcacatctggttccctctggcaagtccaagggttatctaatgcactagcccctcagccacactcagagactgctttcctaaattgggacagagatcattcttgatcctttagctttaaaagacaccatttcacattccctaaactcatcccctagagcctagactctagactggtctagggtcctttgcttgagagtaaatcttttccattcacccctcaatccttggtttcttagtcttttaatttgtattttgtagccaggtgcagtggctcacatctgtaatcccagcactttgggaggccgaggctggcaggatcacctgaggttgggagttcgagactatcctgaacaacatggagaaaccccatctctacaaaatataaaattagctgggcctggtggtgcacgcctgtaatcccaactactcaggaggctgaggcaggagaattgcttgaacccgagaggtggaggttgcggtgagacgagatcacaccactgcactccagcctgggcaacaacagcgaaactccgactcaaaaaaaaaaaattatattttgtttgttggaccagagatctccctgctcttggatctggtgtccttacccattagtgcataccctcccctgtacccacagcttccttccttctctctgcagctcccaaaagcctttcttcttctctaactacaggtgtgagaacctccactccccaccccagatgcccctatttcagtgtcttgccacaggtctctcttgctaactctgtatgtcaaatgcctggcacatggcagccatcagtttctatcctcaaattgactaaatgattgaatgtatgaatgaattggtgagttgagtcatctattactctatcagcaccatgggactgcctctctgtttataggatcgttcattcatgtatccctaggaatacaaagataaatgtgaataggataaacatttttcctagactgttgaagaatttgtgctcagtataagatctggggcatttcatacctttgggttaagttttctgagcccaaaaatgtctttaaaaatcaacttctgtgcttactttggcagcacatataccaaaattggaacaatatggagaagattcacatggcccctttgtaaggatgacatgcaaattcatgaagcatcccatagtttaaaatagtaaaataaatcaacttctagaagcacaagctactgtcaaatttaatcattatgactccaggtctgccaatccaaagagtgatcgaatttctttcttttgtgaaatacagcattctctttgtttttcactaaaagagacacttaaatttgcttcccaccaggtctgaagctggtgcctaatgtggctgaaaatgttattgagcccagtgaggaaatccaatgccctcgggctgccgggctgaatggcagccctgtttccaagggcatcctcctttgtctgcctggagtctcaaatgacatgtttggacacaaagcctcttaggtagaaattactacattagcagacattcctaatttgcagctaggtttattatttcaaagtcttttatcacgattagacttcaatgaggttttacagctgtgcagcaaccctcatttggaaatatgttttattatgctgtttattagtttttctcgtttatctttcttttttaaggtctcctctttgaaagacagccatctgcgttgaaattttccagggaggattttactctcttcccatcaaggtcattttgtaacctctctgagatacttatcgttatgagtttaaaacctttctatgtgaagacagcagagaggagattgctgacggggcctaggaaagtcagagtccttgtggaactgggggaaagagaggccattttcctaacgactattattctgaggctggagattaagtagctccttatacaggctgctttaggccaaggaactctggagcataggaatcataggagagcaggtgtgtttcccccactcactaactgcattgattatattttataatgattatgattgtggttatgatttgtttttaaactgagtttcgctcttgttgcctgggctggagtgcaatggcacagtctcggctcactgcaacctccgccccctgggttcaagcaattctcctgcctctgcctcttgagtagctgggattacaggcgtgcgccaccacgcccagctaaaccccacatagagacgggatttctccatgttggtcaggctggtctcgaactcccaacctcaggtgttccacccgcctcggcctcccaaagtgctgggatcacaggcatacctggccaattttattattttcttttttttctctctctctattttctctttctctctttctctctctctttctttttttttttttttttttttgacagagtcttgctttgtcacccaggctggagtgcagcggcccaatctcagctcactgcaagctctgcctcctgggttcacgccattctcctgcctcagcctcccgagtagctgggactacaggcacctgccaccatgcctggctaattttttcgtatttttagtagagacggggtttcaccgtgttagccaggatggtctcgatctcctgaccttgtgatccgcccacctcggcctcccaaaatgctgggattacaggcgtgagccaccgcacccggcctctctattttctatattcttgatgctctggtatctgggggctcgctgacttggaagagactgcccttcccagggttagccaatttttagagagagcaaactcgtcccctggtagtgggcctttcgtatgcaaactaacggatccagatcccatactccaagccaccttctttacctggctcttacactccaggaggcaaaattcttttgccccaatcatcccacggccagatactagatgactcgagacaccctctaagccccagagcctgcagaaattattccaactggccaatcctaaacctgcctactctgttgaccctgccgtgcccaacccctcctgtgaaaaccacagtaaagtttctcaccctcgctttcccctggccctttctgcctcctgacccacctggtgttacccgataggatcctgaatgctgggccgaggctcctgtttctaaggaactctgagtataaaagctatcttttcaatggtggtcacctcctgatctgttggcctcaccatacctgaataataacaaaaccaacatcttaaaacacagctccaatctcacactcccagaaagtgagaaacagaagagaaaccaaaacctatgattaccagttcaatccagaacactgagagacagaggaggctctgacggagaagggctgcgaccaacatcttctgactgtgaacactgtccaagtcagcttcatcaagagcttggaaagtggacgttttgtcaggctcattttgccgatgggcaactactgttatgggtggtgagtccctacgggtctgtagcatcctcacttcttgcctcctcagataaaagaattcgaccgagaggcataaggcagaggagagacccaggcaagttttagagcaggagagaaagtttattaaaaagctttagagcaggaacgaaaggaaggaaagtacacttggaagaaagccaagtgggcaacttcagagatcaagtgtgcggtttgaccttttgacttggagttctatacattggcatacttccggggtcttccatccctgctcctgtgattcttcccttgggtgggctgtccacatgcgcagtggccagcaagcgcttgggaggggagcatgcgcagtgtgtttactagagttgtacgcatgctcacttgaggcgttcttctcttaaccagtgaaatagtgaaatgtccctagaaggtcatatacaagttaaactctgtcattttgcttcttctttttttttttttttttctttttctgagacggagtctcgttctgttgcccaggctggagtgcagtggcacgatctcggctcactgcaacctccgactcccaggttcaagtgattcactgcctcagcctcccaagtagctgggattacaggcacccgccaccgcgccaggctaatttttgtatttttagtagagacagaatttcaccatgttggccagactggtctcaaactcctgacctcaggcgatccgcccacctcggcttcccaaagtgctgggatttcagggctgagtaaccaagcccggcctaccgttttgcttcttaatgcgcatgctcgggcccactcgcccacctcctgagatcttatccggaagctgctgatcaccagctttaggtatttctgtttattgggagattgcctttccctggtgctggctgggaccaattattatttagagagacggctaacaaccacctgcccatcacctgatggttgcctgacattcctggtgtgtgggtgggtgggcagcactctctgccctgctcatgcctgagtagctacctacagtaacactatgacttcaggaagttaaatagtttgtccagggccacaaagccacactagtaggcactacagccaagatgaaaactcagtgttatttaattggtactcagtgctagcccaactccaatctttatctcaactcctaccctctgcacctcctacttcatatgggagcttctcctggtttctattcctgaatagttttgctgtctgtcaaacgccttaaaatggaagacatgactacttatggtcttgcgccttctgctaattgtatttcagacaatcagtggtttttcctgatatctgatgtcctgcagtgtagacttctttgagctacatgcagcaggggaagaggagtcctgggcatgacttatctgcatagaggcagtttacaattgaatcaaggacacacaatgaacacaacagaagcaggactagataatacaggggagcaggccaggtgcggtggctcatgcctgtaatcccagtactttgggaggcggaggtgggcagatcacctgaagtcaggagttcaagaccagcctggccaacatagtgaaaccctgtctctactaaaaatacaaaaaaattagctgggcgtgttgggcacctgtaatcccagctacttgggaggctgaggcaggagaatctcttgaacctgggaggcagaggttgcagtgagccgagattgcgccattgcactccagcctgggcaacaagagcgggactctgtctcaaaaaaaaaaagataatacaggggagcatttagtcagctgccagattgcgaggtacaaaatatacaagtagaaagagtagaggagaccattgaggacttcctggactagatcaggactttaaaggatggaaaacagttgggtaaagaaaagatagaaggattgttttcggatgatatggtggttcttcaaaaattgaattaccatactatatggtttggctgtgtccaaaaccatatattttcggtacctcatgtaagtggaatcatacagtatttgtctttttgcgactggccgatttcacttagtataatgtcctcaaggttcatctatgttgcagcatttggcagaattttctttttttcaggaagaataatatcccatcatatggaatagtgttccataatattccaaaatatgtacgccacattttgttgatctgttcatctgtcagtggatgcttgggtcgcttccaccttttggcaatttttaatagtactgctatgaacatgcatgtacacgaatctgtttgagttcctgctttcatttcttttggattatatacctggaagtaacattgctcgatatatggtgtattagtccattctcatgctactaatgaagacatacctgagactgtgtaatttataaaggaaagaggtttactttatttatttatttacttctttttgagacagagtttcactctgttgcccaggctagtatgcagtggccccatctcagctcactgcaacctccgcctcccgggttcaagtgattctcccacctcagcctttgagtagctaggattacaggcacccgccaccacacccggctaatttttgtatttttagtagagacagggtttcaccatgttggccaggctggtctccaactcctgacttcaagtgatccacctgcctcagcctcccaaagtgttgggattacaggcatgagccaccactcccggcactaggggcctgttgaaggccaaaaatagttcaaggcctgctcagagaagcagtttcctaattgccatgaggcaagtacctccaggcagagaaaggattttagaactggaattaaaatcaaatcctggcctggggtggtggcactcacctacaatcccagctcaggaagctgaggtaggaggatcccttgagcccaggggtttgagttcagcctgggcaacatagtgagacctgcatctctagaaacaaataaaacaggtggggcgtggtggctagctcctgtaatcccagcactttgggaggccgaggcaggtggatcacttgaggtcaggagtttgagaccagcctggtcaacatggtgaaatcccgcctgtattttttttaatataaaaaacatattcaattaaaaaaaacaaaaacaaaacaaatcccagtgtgattatttggatgtactgtttcttgagctagattgcttaattctctttttttttctttttttttgagacagtctcactctgtcacccaggctggcgtgtaatggcatgatctcagctcactgcaacctccgccttctgggttcaagcgattctcctgcctcagcctcctgagtagctggaattacaggtgcctgccatcatgcccaactaatttttgtatttttagtagagatggggttccaccaggttggtgaggctggtcttgaactcctgacctcgtgatccacccgcctcggcctcccaaagtgctgggattacaggcgtgagtcatggcgcccggcacttagttctgtttattattattatacccttgtctcaacacccattgctgggctcattaaaacccacgggtcatcctaagaccacttttcaaaatttcttgaccagttctttctcaaaaccccctagcaagaagctaaaatagactttctggtcttcccttgtttccttaccattccctgaaaatccagcgacagaggccagtagcaaaaatgaggaaaagtcaggatgcaagcagagaactcatgtgggattttaaattaattgagagttatttatatcagtttttattccagagatttcctggtgtcttgttagccgaagatgatgagtatgcagtttgacaattttttttttaatgagcctgttttttttctttttttcttttttaaagataggagtctcattatgttgcccaaggtggcttcgaactcctgtgctcaaaggatcctcctgcctcatcttgctaagtagctgggaaaatgggcctattttgaaaacagttaattgtactaatgaagcttgataaccttataatagattttcttttgaagttcttctgccaaaacatggtgaaataataggcacatttctctgttagtcatatttataatccgggattctttctgagcaaatgtcactctccattcaggctgctgtggaatatcatctatctttgcaaatatttactttcacacctcccatttcaagtgagttttctaacaatttaagcccttgtccacccttctttggatgatccaccacacctggccccactgcagatttcataattttattttatatatttatatatttatttatttatttatttttgagacagagtctcgctctgttgcccaggcttgagtgcagtggcggggtcttggctcaccgccagctctgcctcccaggttcacggcattctcctgcctcagcctcccgggtagctgggactacaggcgcccgccaccacgcctggctatttttttgtatttttagtagagacagggtttcgccatgttagccaggatggtttcgatctcctgacctcgtgatccatccgcctcggcctcccaaagtgctgggattacaggcgtgagccaccacgcccggctatttatttattttttttcagagacagtctcgctctgtcgcctaggctggagtgcagtggtgtgatctcggctcattgcaacctccaccttccaggttcaagcaattctcctgcctcagcctcccgcaaagctaggattacaggcgcatgccaccatgcctggctaatttttttgttttgttttgttttgacacagagtctcgctctatcgcccgggctggagtgcagtggcacgatctcagctcacagcaacctctgccttctgggctcaagggattctcctacctcagcctcccaaatagctgggattacaggtatgcaccaccatccctggctaatttttctatttttagtagagatgggatttcaccacgttggccaggcttgtcttgaactcctgtcctcaggtgatccacccacctcggcctcccagagttctgggattacaggtgtgagccactacgcccggtcagcatcagtattcttgcgctatggggccatcatgaagtgaaataagaatgacttgaacccaagcactgcaatacagagacagccgatgtggtaactgagagggctccgatgtgactcatgagtggggacatctatggcatggagatgctggacaaagggaggaatcccaccgcaggtgcaaggcttcatcacactactcagaatggcaggtgcaacttaaagcttatgaattgcttatttctggaattttccatttaatatttttggaccttagttaacggaaggtaactgaaaccatggaaagtgaaatcatggttaagtggggctatgataaattgtgaccaccaaaaacaacagaattcataactggcacgatgcagctatttctccactaagggccctgagtgttctttgagtgtaaaatttgtgtttctattttggtggttatctaaaaaaaagctagcatctgtgtgttgcagatcatctggctgattaccgcacagctcgaattctgcttcatgatgcctgcattcacattttgtcttggattccagatgtactggcactactgagatgctgaaagctcgggatcccctataactgtcttcttcatcaccaacccaagagtacagctgcagaattgcaaagccagttcttcagtgtaacatgcatatttgatgatcggtgtccaccaaattacaggcttttatctttttaatctttgggagtgagagtagttgacttttaatttatgaatttgtattaaaagcaaaaatgtctggagaaaagcggtaaactggaaattatgattggtgtaatttacaatagaaataggcaatttcgaataaagagcagaaaaccatacctaatttatgcatgaggacagaatgcatgctgaaattaagacaagattgacactgaaagactaggcagaaaaaaaaaacagaacagaaaaagaagagaagagtggtggaaatgtcaacagattcctagtggaaatatttgctcacagccatcaagctgtacaagtttgaaaaagtaagatcaacaaaatatattacaaggatctttctgaactggctctcaaccttttctttttccctcatcccattctatttatacacatcacagtcccaagaataacacaagaaattctccaagtttccaagaagggaagatggagtggagggcgcccaccctatctccagtggacatcccctgggctactcctctcctgatgagaaaatgctcacttcagccaagtgcagaatggtcccctttgttttcgtgggtatcagtggagaatgagatccttcatgtaagtaaaatttcactgtcactcattaggatggctaatatccaaataaacagaacagaaaataacaactggtgaggatgttgggaaattggaatccttgtacattgctggtgggaatgtaaaatggcgccattgttgtagaaaacagtaatgacgttcctcaaaaacttaaccctaaaattaccatatgatctagcaattatgcttcagagtatgttcccaaaagaaatgaaagcaggcactgatatggcatggctctgggtccccacccaaatctcaccttgaattgtaatccccacaagtccagggagggacctggtaggaggtgattggatcatggaactggtttcccccatgttgctctcatgacagtaagttctcacaagattcgatggtattataaggggctttcccttcactcacactctctcctgccgccttgtgaagaaggtgcctgcttcccctttgccttccactatgaccataagtttcctgaggcttccccagccatggggaactgcgagtcaattaagcctcttttgtttatagattgcccagtctcaggtaatatatcaggcagtatctttatagcagtgtgaaaacggactaatacagggactcaaacagatacttgtacttccacatttctaacaactaaactgtggaagcaacttaagtgtccactgatagacgaatggagaaacacaatgtggaacatacatacaatggaatagagttcagccttaaaagagaaggtcattctttttttttctttctttctttttttttttttttttttgagacagggtctcgctctgtcatccaggctggagtgcagtggcgtgatctcggctcactgcaacctctgcctcccaggctcaagtggtcctcccacctcagcctcccgagtagctaggactataggtgtgcaccactatgcctagctgatttttgtatgtttttagtagagacagggtttcacaatgttgcccaggctaattttgaactccagaactcaagcactctgaccacctcagcctcctgaagtgctgggattacaggcatgagccaccgcgactggcctaaattgtctagcttttaatctgcctcattgcatctgacagctacaaactacaacccttccctgttcctgaattttcttccaaaacacatctgtaatgccactgccatgcctgcgaagcactgatgactcttcatcagaataggcagaaattcacctcccaatccgaccccaatctacctccaatttacctcatctcctgcacccccatccctaaccccatgcatgataatcatagtcttttttttttttttttgaaacagagtttcgctcttgttgcccaggctggagtgcaatggcgcaatctctgctcactgcaacctctgcctcccggattcaaaggattcttctgtctcagcctcccaagtagctgggattacaggcgcattccaccatgctggctatttttttgtgtgtttttagtagagacaggatttcatcatattggtcgggctggtctcgaacttctgaccttgtgatcgccttggtctcccaaagtactgggattacaggcgtgagccactgcgcccagcctttttttcatgactttaatactctaaggaatggcacagctccaaatcctcacaaatatacctcattctttgtagtatatgtttctctgccttatgaaactgtacgctcctcaagtccaaattaattccaacgtcaccttgattggtcccacactgacctctagcctaaattaatcactgtctcctcaggagattcagcatatttgtttctacgttggatgacctttgcataaggaaccaaccggctgtttgctcagaaggaggctgtggcagcataggcacttacactgtcatattcaacacactgaattctagatacctgcctggctgtctcttctgctgcaggatcaagtcttatttagttttctgtcccagtgtctaacacagtgccttgaatggggagacactcagccatcatttactaaattgaaatgaattgtgagaatgcattgcagatgcacctgaattgggagttaccaaaaagagagaaaagaggaaattgtactggagtcaaagataaatttaatctaattcatatttatgatcacagagatcatgtcagcatatgaaactctagtgcatgaattagggcagcagaccccaacctttctgggaccagggaccggtttcatggtttcatggaagacaatttttccacggaccaggggtggggaagatgaaactgttccacctcacatgatcaggcattagattcccatacagagcacgcaacctagatccctcacatgcgcagttcacgataggattcctgctcctatgagaatctaatgctgccgctgatctgacaggaggcggagctcaggcaataatggctcaccagccgctcacctcctgctgtgctgccggttcctaacaggccacagaccggtaccttcacagaagaaacaacctgggccccttgcctattgttagtgtgtcccttcccacagtcacaccctcttgtacctgtccctgggaggaaaacacaaggtatcagtaagtttgaaattccccggccgggcgcggtggctcacgcctgtaatcccagcactttgggaggccgaggcgggcggatcacgaggcaaggagatcgagaccatcttggctaacatggtgaaacctcgtctccactaaaaatacaaaaaattctcgggcgtggtggcgggcgcctgtagtcccagctactccggagcctgaggcaggagaatggcgtgagcccgggaggcggagcttgcagtgagcagagactccgtctcaaaaaaaaaacaaaaaacaaaaagaaatttcccatccatgagtttttcactttttcatcttcttggtgcagggaattccaagtatttaagaaagcaaaatgaggccaggtgcagtggctcacgcctggaatcaatcccagcatgttgggaggccgaggctgttgtatcacttgaggccaggagttcaagatcagcctggccaaaatggcgaaaccctgtctctaataaaaaatacaaaaattagctgggcatggtggtacgtgcctgtagtcccagctactgaggaagctgaggcaggagaatggcttaaacccaggagacggaggctgcagtaagcctagatggtgccactgcactcccgcctggcgacagagcgagaccgtctcaacacaaaacaacacacaaaaaattctgtacacatctcttttgtattgcatgcatacggatggatggatggatggacgcacaagtattttactttgaataaaaagaagtattacctttcttgctgagcacggtggctcacacctgtaatcccagcactttggaaggccgaggtgggcagatcagaaggtcaggagtttgagaccagcctggccaatatggtgaaagcccatctctactaaaaatacaaaaattagctgggtgtggtggcgggcgcctgtagtcccagctactcgggagtctgtggcagaattgcttgaacccgggaggcggaagttgtagtgagcagagatcatgccactgcactccagcctgggcaacagagcgagactctgtctcmamcaaaaaaaaaaaaaaaaaaaagaagtattgcctttcttacatctcccacagtccagaatgatgtagctccatttctaggctaaacagaaagatggatcttcctgaaaacatgatttaaacataatttctttttagggctgagcatggtggctcacacctgtaatgtcagcattctggcaggcagaccagcctgggcaacaaagcaagaccccttctctacaaagtaaatacataaataaattagctgagcatggtggtacacacctgtagttccagctactccagaggctaaggtgggaggatcgcttgagtcctggagtttgacactgcagtgaactatgatcacaccactgcactccagcctgacagcttggctcctccctagtgatttctaatgtgcatccaaagtcaagaaccactgcatataaacagttctgcagcttgtatttttgttttgtttttgtttttttaacaatatgtcttatagatccttgcataggaatacgtaagagtgctctctttttaatagctgcatagtattccaccaggtgatagagtatgaaggcatttatggacatcagatagttctcttctttttctgagatgaagtctcactctgttgcccaagctggagtgcagtggcacaatctcggctcactggaacccccacctcccaagttcaagcaattctcctgcctcagcctcccgagtagctgggactacaggcacgcaccaccatgcctggctaattttttttttttttttagtagagackgggtttcactatgttggccaggctgatcttgaactcctgacctcgtgatctgcctgcctcggcctcccaaagttctgggattacaggcgtgagccaccacacctggcctgatagtttccaatattttgctctcacaagaaatgctgaaacaaatcaccttttatatctattgttttgcacatatgtatatacagctgttggataaagtcctacaaataccattgctgagtgaaataataagatcacttgtaattttgctaaatatttgtaagttcgctatttagttaactacttgtaattttgctaaatcttccatgataaacatttgatagacattattaaattgtcctatgaggtttaattttttttcacaacaaatcagatatgaacaatcagagtttgcaagtcctgattacacagagacattaatcatggatcatgcaaactccaattatcctgttctatctgccctccaaaacgaggaacaggtaaggattatcccacctgatgataggattacattattaatccaggtttataaaaagttttcagagtgacaaagtgtgattttattttagagacacatatgcgagaatatgattactgtgtttggtttaaatttcaaaaagtgacaagagattgtagaagtggatcatttgtcattgttagggttacagtgtctttcctgatagggctggttggcggctcagtttcttgttctttcttgtcattaaagagttttgttctcagaaaggaaataatctgtgctctttgatgtggttcagaaaaaagagaccaacaccacattttaaaactctttgtggcagatcgtccacgagcagctctttaagagaagcagctcacagagctctggctcaaacaagagaagtttttagagaayatagagaatgtctgactctggaagaatttcctcaagaaaacacaaaagcaaagaatggaaaatgcaaacacaattattcttcctctgatgggaataactttccagctcaaatgaatatttatttgtttgtgtgtgtgtgtgtgagacagggtctcgctctgtcacccaggctggagaccagtggcacgatctcggctcattgcaaactccacctcccgggttcaagcaattctgccacagcctcccgagtagctgggactayaggcacccgccaccatgcccagctaatttttgtatttttagtatagacagagtttcaccgtgttggccaggctggtctcaaactcctggcctcaagtcacgtgcttgccttggcctccctaagtgctgggattacaagcatgagccatctcccccggcctcaagtgaatcttaactttgaggctatgccagaagctgaagacagtaaatcaagcactaaattagaaacacactcttcagatgggcacagttgctcatgcctgtaatcctaatgctttgggaggccaaggctggaggatcgcttgagcccaggagttcaagaccagcctgggtgacatagagtgtagagaccccatctctacaaaataaataaataaataaaaagtaaaaaaaaaaaaatcagctggatgtggtggttcactcctgtagtctcaactacttgggaggattgcttgagcccagaagtttgagtctgcagtgagttatgatcgcaccacagcactccagcctgggtgacagagccagaccttgtctctgaaaaaatatataaataaaataaaaagaaacatgctcttgcacaaaaaagtattttgctttaggagcaaaaatagacaccttttggacatttccacatttttatacgattgaggattccactctataacatgtctctcttctccttccttcttgaattctcctttctcctyctcctctgagagagagacaacagacagacgcaaagacagatacatggagatacagagggaaacagaacagatcttctggcatgacatgtttttaaaatagctgtcaggatgtgctgagagaaatggaccatcataaaatagatcatttttatgtcaaatgagtgttacsatatgtttatgtttcttttcttttcttttcttttcttttctttttttgaggcagagtttcactctttcacccaggctagaatgaactggcawgatctcggctcagtgcaacttctgctacctgggttcaagcgggtagcagaggttgcctcctgagtagactcagcctcagcctcagcctcccaagtatctgggactacaggcatgtgccaccatgcctgacaaattttggtatttttagtagagctggggtttcgccatgttggccaggctggtctcgacctcctgacctcaggtgatccacctgcctcggcctcccaaagtgctaggattacaggcatgagacaccatgcctggccagatattcatatatatatacacacatatatatatatacacacacacacatatatatgcacatatatatacacacacacatatatatacatatatatatatacacatacacatctctctctctctmtatatatatatattttttttttttttgagatgaagttttgctctgtcacccaggctagagtgcagtggtgtgatcttggctcactgcaacctccacctcccgggttcaagcaattctcctgcctcagcctgccgagtagctagaattacagacgcgtgccaccctaccaagctaatttttgtatttttagtagaggcggtgtttcaccatgttggccagcctggtcttgaactcctgacatcaagtgatccacctgcctcggcctcccaaagtgttcggattacaggcgtgagccaccgtgcccggcctcctatatttcttgaagaaattcgagcatcagctkttgaattgtatcagttgaagttctgtgatagaaagcaatagaaattgactcatgaatgtaagccaaaaaaggttgtttcaatgacactgagaagctcacaaaattaaaagcaggaaccaggacaggtctgagaatcacagtggcagaggcctgtaagaaacttctgttggggatcttgctatccaatgatttattcaaattcccaggaaaagtaatctgattgcattagcttcaccacgtgcctacctcttgtgatcaggggctgagtctgacacyggcaaggggagagggaagttgagaaatatcatggccatactgcaaatgctgccccccaaatcactcagtaatttttaaccatgcatattggatctgggtaaataaaagtgctatattgagatgctaatcacagctatataactttgctcttcatgaaaatgggtagaggctgggtgcaatagttcatgcctgtaatcccagctctttgggaggccaaggtggggggatcgcatgaggccaggagttcaaaaccaacctggccaamctggcgaaagcccgtctctaataagaatacaaaaaattagccaggcctggttgcacacgcctataatcccagctactagagaggctgactcacgagaatcacttgaacccaggaggcagaggttgcagtgagccaagatcgtgcctctgcactccagcctggatgatggattgagactctctctcaataaaagaaaatgggcctggcgcggtggctcatgcctgtaatccctacactttgggaggctgaagtgagtggatcacgagatcaggaaatcgagaccatcctgggtaacatggtgaaaccctgtctctactaaaaatacaaaaaatttggccgggcatggtagcacgtgcctgtaattccagctactcgggaggctgaggcaagagaattgcttgaacctgggaggcaggggttgcagtgagccaagattgtgctactacactccagcctgggcgacagagcaagactttatctcaaaaaataaaaakaaaaagaaaatgggtagaaatcttgattaggattagacctggacaaagatatttccaaaagtcccttgtgaaactgaaaagtaatgaacatgtttcagtcttcagacagcgtctatcattttttttaagtgtttaaaaagtaatgtgccaatctttgtactcctatgttcatagtagtactactcacaatagccaaaggatagaagcaactcaagcgccccttgtttcttccattcatgaatgaataaacaaaatgtagtgcgtacatacaatggaacattcagccttaaaaaggaaggaaattccgacacatgctccaacattgatgaacctggaagacacgatgctaagtgaaataagccagacacagaaaggcaaagagtacacgattccacttgtatgcggtatctatgayaaaatagtcaaattcatagaatcaaagagtggaatggtggttgccagggacttgagtaggaggcaggggggaattattgtttgatgggtacagagtttcatttcagttgttgttgttcttttgtttttttgggttttttttggagacagagtcttgctctgttgtccaggctggagttcagtagcgagatctcggctcactgaactccgcctcccaggttcaagcgattatttttgcctcagcctccagagtagctgggatgacaagcgtgcgccaccacacccagctaattcttgcacttttagtagagacgggagtttcgccatgttggccaggctggtcaaacttctgacctcaggtgatctgcgcacctcggcctctcaaagtgctgggattataggcgtgagccaccgggcctggccgcatttttttttttaaggctgtgggcaatagtagagatgcctgcagcacaactaaggagggtgaaaaaggaggtgggaggactattgtcagacagccttcctataccacagatttctgcaatggattagtttggctgattccaagtatcatagttggtcattctttaatttatagaataaaaaaatccatgagttctaaaggaacatttcaaagccaggaaaagactttttaaaatgtatgttacaagtctagctggtaatccgaagccctcctgcattgacacgggctttcctctctgagttgctctgcagagcccaggaaaataataaaacctttatgaccaagagtactatttcatttcctttctaaacgaaacccatgaaaggccacccatgctggctggtgtggatgcaagcgaaacttaactgtaaattgaagcaactatatttcttctgcctctatgttgaaaaaacaaacaaaaaaagaataaaacaaaaatgatataatttaaatatacagcaactgctggttttcatcttaataatttacagttgatgaagctgggaggttatctgttggtttttcatgtggttagtttcaaaatatgacttatcctctccaggccatggctttctggcttgttcaatttacttcccccagttctttggcccctcttctgcacaaatgccctcccagccctcaaaggccctccccgcttctgaaactatctcccacaaccatcaagattctttctaggctgggcgcagtggctcacacctgtattcccagcactgtgggaggccgaggtgggtggatcacctgaggtcgggagttcaagaccagcctgacccacatggagaaaccccatctctactaaaaatacaaaattagccgggcttggtggcgcatgcctataatcccagctacttgggaaggctaaggcaggagaatcgcttgaacctgggaggtggaggttgcagtgagccgagatcgcgccattgcactccagcctggacaacaagagcaaaactccgtctcaaaaaaaaaaaaaaaaaaaaagattctttctagaaagacttctatagaaaattttttctaggctgggcacagtggctcatgcctgtaatcccagcactttaggaggccaaggtgggcagatcacttgagcccaggagtttgaaaccagcctgggcaacatggcaaaaccctgtctcttcaaaaaatccaaaaatattagccaggcatggtggtgctcacctatggtcctagcttcttgggaggctgaggcaggagtattacctgagcccaggaggtcgaggctgcagtgacctccggtgattgcaccactgcactccagcctgggtgacagagtgagatcctgtctcaaaacaaaaacaaaaacagaaaaaaaacacacacgaaaatcttttctggaaagtcttcttggacctcttcagatctcttcctccagtgaattctgtgacactaattacttttttccccccatgatacatagggctttgggctatgaaagtataattttcaaaaagataaaagcctgactctcatacaaatgtagaatgaacacatgtcaattatgtatgtaactaattcacaagggtgccaggaggatgtaaaactagttcaaaggagaattcaaagaacagaggtctatgtagtcagacaggaaaggcagccaaaaataagcttttttttttttttttgagacagagtctcgctctgtcatccagaatggaatgcagtggcacaatctcggctcactgcaacctccacctcctgggttcaagtgattctcctgcctcagcctcctgagtagctgggactacaggtgtgtgcccccacacccagctaatttttgtatttttagtagagacggggtttcaccatattgtccaggctggtctcgaactcctgggctcaggtgattcgcctgcctcagcctctcaaagtgctgggattacaggcataagccaccacgcccagccaagaataaattttctaaatcacaggcaaaattggttaatgtcctaacgggcaatagaacggtaaccttccgagttatctcggatactcttggaaatctactagttaacatgtaacttgagagaatctgagccttcgtcattagtaaatagcaagaagacaaaagtgtatctcccagtattaaataatccttgggtgggctctgggctagatatgctccagtatgatattgaaatctcccagtattaaataatccttgggcgggctctgggctagctatgctctggcatgatattgaaagatatgcaggagtcctttcagcttatatccaagtttttggctaatttgccttcactgggtcaaccaccccatttcataagaggaaatacaagtctggagagattagtttacttgtctgaaatcacacaattggtaggagctgagctagaacatgaaactaagtcggtgtggctatagattatacatctccaaatgcatactaaagggttagagatccgcagccagtggagttagcagagaacacgtctcacttgtgtgtgcacgtgggaatccaggggatatggaattttttttaaccaggggataaaaaactgtttttttgagacaaggtcttgctctgtcacccaggctggagtacagtggtgtaatcacggcttgctgcagcctagacttctgcggctcaagcaatcctcccacctcagcctcctgagtagctggtactacaggcatgcaccaccatgcccagctaatttttttacttcttgtggagatggggtctcagtatgttgcccacgctggtcccaaactcttgggctccagccatcttcccgcctcagcctccaaaaagctgggattacaggtgtgagccaccacgcctgaccaacaaatgcttattgattgtcgtgaaagtccagtggcctagctagactacctttcaataccactggtgagaaacaacagcttagtagtatataactagctgatcttaggtgccatttagcgaaagagttaaatgactgtatgttttattttattggctagattgtaattttgaggccaggtgtttgagaccaggtgtttgagaccaggtatttggaattcacacttacccagtaagtatttgttgagtactatctgtggcagattaccttgcctctattttttttttttttttttttttgagacgaagttttgctcttcttacccaggctggagtgcaatggcacaatctcggctcactgcaacctctgcctcctgggttcaagcgattctcctgcctcagcctcccaagtagctgggattacaggcatgcaccgccacgcctggctaattttgtagttttagtagagatgggatttccccatgttggtcaggctggtctcgaactcccaacctcaggtgatctgcccgccttggcctcccaaagtgctggaatgattacaagtgtgagccacctcacccagcagattacattttttaaaggtagccacacctacatatttatcccacctcacatgcccttcctacaccctttccagggaaaggaaacccaggttcccccactgcttgtatctgagcaatgactgctctaagggaacacagcagaagtgatgcagtgatgctccctggtttctgaggctaggtagtaaccatgagggaggaaaatagggtttagacaaagggaatctaaagcagattcacactggcttcctagaactaaatcaaaaggaaaaccccaactttccacacctaagcaatgaaaggacaggaggctactccctttgcaaaccctgcccccttttttctgtgtgacagatggaaaatcaaaagtacctctgattggttgctttctgcaaccaatcagactgactgtgggccactacttcatttacatagggtgtaaccaagtgtgtgcggaataatccgtgagttcttggtcttgctgacttcaagaatgaagccgtggaccctcgcggtgagtgtacagttcttaaagatggtgtgtccggagtttgttccttcagatgttcagatgtgtccagagtttcctccttctggtgggttcgtggtctcactgacttcaggaatgaagctgcaaaccttcacagtgggccttacagctcttaaaagcagtacatctggagttgttcattccttccagtgggtggtcttgctggcttcaggagtgaagctgcagaccttcacagtgttacagttcacaaaggcagcaaggactcaaagagtgagcagcggcaagatttatcacaaagagcaaaagaacaaaactcacacactgcagaagcggacccaagccagttgccaccgctggttccggcagcttgcttttattccctcatctggccccacccacatrctgctgattggtccactttacagagagctgattggtccattttacagagagctgattggcctgttttgacggggtgctgattggtgcatttacaatccctaagctagacacagagtgctgattggtgtatttaaaatcctctagctagacaaaaaagttttgcaagtccccactagattagctagacacagagcactgccccccggaaggcaggtgaggcccttggagaattccagcgcggtgtggtagggccggcagtgctgagggacccggcgcaccctctgcagctgctggccctggtgctaagcccctcactgcctgaggccggcagggccggcttgcagggcccgcggaacccacgcccacccggaactcatgctggcccgcgagcgccacgcgcaggcccggttcccgcctgtgcttctacttcccacacctcccctcaagcagagggagccggctccggcctcagccaggccagagaggggttcccacagtgcagtgtcgggctgaagggctcctagagcatggccagagcggatgctgaggccgaggaggcgccgagaacaagcaaggctgctggcacgttgtcacctttcacaaggaaccaatgggaaacctttagagggtatttaaaccccagaaaattctgtaaaggggctcctgagcccctatgctgagccggttcccaccttgtggagtgtacttttgttttcagttccttttgttgcttcattctctccttgctttgtttttgcgttttgtccaattctctgttcaaaacgccaagaacctggacatcctccaccagtaaccaaacggttatagtatcacctggttctctatcttttcctctgtccggatgcttgccctttgaacctaaccaccacattgtgagaaagcccacttggagagactctgtgtggatgttctgaccaacgtccttgggccaccagccagcagctccatgtgatgaaccccagacatgggagtgaacagggcttcagatgatttcagcccacactcttcaagtcttcccacggaggcccagacatcgtggagcagaggtcagttacccctgctgtaccctctctgaattcctaacccacagaaactaagagagataataaatgacttttgttttgttttaagctacaatgttttggagtcacttcttccgcagcaataggtaattaatacaccagctatgttcttggcaggttggcattgctggtttaacttttcatccgcagttcaaatgtaagcgtcacgaggttttttaattccagcttcgccaagccatgaatttgacccttgccaggagcaggggctcacatctgtaatcccagcactttggcaggctgaggcgtgaggatagcttgagctcagaagttcaagaccagcctgggcaacatagcaaggcccctacctacaaaaaaaaaaaaaattagcctggcctggtggcatgtacctgtaatcccagctacttgggagactgaggtgggtggtttgtttgagccaggaagctgtgttcatgccactgcactccagcctgaatgacaaagagagaccttgtccaaaaaaaaaaaaacaacaacaacaacaaaaaagaactctgctaaatgacatttcagcaactgttccagccaacgcataatgacattttatagggaactgctttgctagaggggagatgtgcacacttgtagcattatgaaggtctccggaggtatccctttaagctctcaatggccaaccgtgcttctttatgttttcccaaggctctgagctcagaagttcccagcctgtgaggtatgagagtttcccaagtcttctgccaaaaaacctcagttcaggagaaaaataaactcaagagtcctctgattaaaccagtctttattgcagtctgacttggagcttttggccttagtggcaaagaaggtgattaagtagttttcccaggaataggcctaattcagctaaagtggactttcaggaatattctgtttaagagcatgagcacatgctactacaaagagcagcttttgttttgttttgtttttgtttttgagacgggtgtctcactatgttgcccaggatggcttcaaactcctaggctcaagagattttccgagtagctgggactacaggtgtgcaccactgcacacggcgctaatcccattttacttatccatgtgtttatttactgtctcccccactaggatgttgtatttgtctgttttcacgctgctgataaaggcatacctgagactgggcaatttacaaaacaaagaggtttaatggacttacagttccacgtggctggggaatcatgtcggaaggcaaggaggagcaagtcacgccttacatggatgacagcaggaaaagagagcttgtgcaggggaactcctctttatacaaccatcagatctcatgagacttactcactatcacaagaacagcagggaaagacttgcccccatgattcaattacctcccaccaggtccctcccacaacatgtgggaattcaagatgagattagggtggggaaacagccaaaccatatcagatgtgaactccatgccagcaggaacctctgttttttcacttatatatctctggtgccaagaggctatcaaataataagggctgaataaataaatgatccattttcacatacttttaggtcattgtgtaaacatggtactgctactactactaataataatatcaataataccaacctgggcaacatagcaagacttcgcccctacaaaaaaaatcaaaaacattagccaggtgtggtggcacatgcctgtggtcccagttatgtgggaggctgaggtgagaggattgcttgagtccaggaggttgaggctgcagggagctgtgatcacaccagtgtactccagcctgcatgacagagcaagaccctgtctcaaaattaataataatatcaacagtaacaacaactgtttcatatggttaaaataaagagatggtcaaaagtatgatttcatgaatcacacagcttattgccatacaaagtttttttctttatcaaaatgctaaacggggaagaataaaaatctcacagaggccggatgcagttcacacctgtaatcccagtactttgggaggctgaagcgggcagatcacctgaggtcaggagttcgagaccagcctggccaacatggtgaaaccctatctctactaaaaatacaaaaattagccaggcatggtggcgggcacctgtaatcccaactactcaggaggctgaggcaggagaatcacttgaacctggtaggtggaggttgcagtgagccgagatcacaccattgcactccagcctgggtaataagagtgagactctgtctaaaaaaaaaaaaaaattacacttgatagatgaagtacattaaaaaaaattacacttgatagacgaagtcacatagtgagtaagctccaacttcgagtccagttgttaaaatggagttgcccaattaggatggaggcagtcttctgtggatgcaaagtctaatcaatgtttctaggagaggttctaggaagagatggcttgaccaatgcagcagagatccatgacaacacacaggcccctcaatgccgggggcggggacaaaaattatctcatctaattctcacagttgttctatgtagatattactactctgcccattctacagtaaagaagtcgagctttagagatagtacaagttggatattcctaatctgaagatcagaaatttgaaatgctctaaaatttgaaactttttgagactgacaatgctcaaaggaaatgttcattggagcattttgtattttggattagtgatgctcaagtggtataatggaaatattctaaaatccaaaaaaatctctaaaatctgagacacttctggtttcaagcatttcagataagggatgctcaatctgtatttttcctcaagtcacatgattgcaagcaaaactaagctcaggcctgactccaaagccagttttcttttcttttaatttctttcttttcttttagatggaatctccctgtgttgctcaggctgatctcgaactcctgagcccaagcatgcatcagcctctcagtagctgtgattacaggcattgagtcaccactcctggtaaagcctattttcttaaagtcatacaatgctgtctccctgcctaaaaaacagtttggaaatcactgctctagacagagaagccactaatctttgttggttgatgatgaagcactgtacttggcaatggaaataccacatgacctagctctggttgtatcctatatttttttttttgagacagaagtctcttgtcccccaggctagagtgcaatggcacgatctcggctcactgcaacctctgcctcccgggttcaagcgattctcctgcctcagcctcctgagtagctgggattacaggcgcctgccaccacgcccagctaatttttgtgtttttagtagagacagggtttcaccatgttggccaggctggtctccaactcctgacctcaggtgatctgcctgcctcggcctcccaaaatgctgggattacaggcgtgagctccaggccacttctgatactttgaattttccatctgcccagcaggaaagggggaggggtttgcagtagcctctggtccttttgttacttaggtgtggaaagttggggttttccttttgatttagttctaggcagtcagcattaatcggccttgggttccctgactccagaccctattctcctgcctcaggaccaggcaactagaggccactgctacagacccaaaccctctggaattatttaagatatccaaccctaaactgttgactctgcctggcctggcctttcccgaggaaactccagtacacgccctggcttcagctttccccttgctcccacttccatctccagaccaaaacctggagcttctcctgtggccctgtgtggcagggtatgcccccttctctcaggaaatctctcagataaaagccatctgttaatgacgttggcctctctgtgccatcactcaaccatgtccacaaattcgaatcccacaggtacaaatttcaaaacacgggacaccctgagttaatcaggggagaaactgatttaggaggcttcctgcagaactgagttgatggtttccaaaactccttttattctatcacaataataccttcatagtcatatgcactcgtttatttatttcagctcaacttggaacctgcaaactctgaaacaagwtattaaaatcagttttttaaatatggaactatacccatcaaagtatttcctactctatttcttgcctcattcaacatcttcttgtcgattgattcatgtaactgccaaagcccagagtatttcaggagcagagactccttagtttccagaaatatttttctcatggttcccattaataaattttagtggcggctgggcatggtggctcacgcctgtaatcccagaaatttgggaagctgaggaaggcagatcactttaggtcaggagttcaggaccagcctggccaacatggcgaaaccccatctctgctaaaaatacaaaaaattaaccgggcatggtggcgcatgcttgtaatcccagttactcgggagtctgaggcaggtgaatcacttgaacccaggagaggcagaggttgcagtgagctgagatcacaccactgcacttcagcccgggcaacagagtgaaacactgtctcaaaaaaaaaaaaaaaaaaaaaaaatatatatatatatatatatatatatatatatatatttatttatttatttatttatttattggagcacacaggcacccagagtaaacattatattcgctgacctccctggcagccatgtgtggccatatggctgagttctgaccaataggatggatgggtgcaaagtccatgtggctcacaacccatctcttctctcttcctcattgtcccttcttttttttattatttttttttttttggagatggagtctcactctgccacccaggctggagtgcagtggcgtgatctcggctcactgcaggctccacctcccgggttcacgccattctcctgcctcagcctctggagtagctgggactacaggtgcctgccaccacacccggctaatttcattgtcccttcttgcatcctggatgctgggaatgctgatgccatcacattggaccataaggactggttcctgaaaacttctgggagcagattgcttatgcttcaatttgtcatcttgttaaacaactgttagctggggttttctgccactcgcagaaaagccaaatcattactaattcagtggcaaatggtgtaagtgaagcaagcactcaaggaggtggcagtgagtgacaaaattaataactacatggcttagctgagattgcatcctaaggacaagaaaagcaatagtaataatggcttgctttttatagtgctttataattttaacatacttgcaaatgttttttctcttttgatcctcataataacctccttggccagagaaataacaggactttggtgctattctccaagctgaaagccatcctcttcggccctgaggacacagctttttctgccataactcactgtctccactggctcaattagccaattagtggcattgtagagggctgagatgttactttttagtttccaataaaattctcaagttggtttcaattctccttataatgatgataaagtcaaagctcagaggaactgaacgatggccccttaaaatttatattttgaagccctaactcccaatgtgaatgtatttggagattggccctctttaaagaggtaattatggttaaatcaggttacaagggtggggcttaaggcaataagactggtgtgctgaaaaaacggggaagaggctggccgcagtgcctcatggctgtaatctcagcactttgggaatctaaggcaggggtttgagaccagactgggcaacatggtgaaaccctgtctctacaaaaaatttaaaaattagtgtaggggggtgccaggcgtggtggctcatgcctgtaatcccagcactttgggaatccaaggcgggtggatcacctgaggtcaggagttcgagaccgacatggcaaaaccccgtctccactaaaaatacaaaaataagcagggcacagtggcacacgcttgtaatcccagctacttgggaggctgaggtgggaagattgcttgagtccaggagtttgaggttacagtgagccatgattgggccacaacagtctagtctggcaacagagtgagacaccatttataaaaaagaataataaaattttgaaaataatataagaacaaaatattaataattccaccagtgtcagaagatagaggcctaggcctctcaacttccaacccaagatctttccagcagcccaatctgcttccttgaaggtgtaaagataggcctcccaccgtcccaaatccgtatcctgtcatttagatgtttaggggcttatgatagcactcctatgtgtaggcatgaacacaaacacatgcttaattttggactattattcatcagaaaaatagttttttcacataaataattgtaatcaaggtgtgtttgaaagtcaaaaaaatttgtcaaaataaatggaaaagaaaccatgggggaaatcacaagaagataccacttcatacccactagggtgactataattttttaaaatgggaaataagtgttattgagcatgtggaaaaatcagagccctcagacattgctggtaggaatgaaaaatgctgcagccactgtggaaaacagtatggcagttcctcaaaaagttaaacatagagttgccatgaaccagtggttccactcccaggtatataccccaaagaactgataacagaaactcaaacaattattttacatgaatgttcacagcgttatttacagtggccaaaaggcaaaaacaacccaaatatccatcaactgttgacttactggataatcacaatgtgatatatccatacaatggaatattacttacctacaaaaagctacaaagcgccgggcgcagtggctcacacctgtaatcctagcattttgggaggctgaagcgagcagatcacaaggtcaggagttcgagaccagcctgaccaacatagtgaaaccctgtctctactaaaaataaaaaaattagttgggcatggtagcgcgcctgtagtcccagctactcgggaggctgaggcaggagatttgcttgaacccgggaggtggaggttgtggtaagccaagatcgtaccactgcactccagcctgggcaaaagagtgagactccatctcaaaaaaaaaaaaaaaaaagatacaaagaggccagcatgttggcttacgcctgtaatcccagcactttggtaggccaaggtgggtggataacttgaggtcaggagttcgagaccagcctggccaatgtggtaaaaccccgtctccactaaaaatataaaaattagccgggcgtggtggcacatgcctgtaatcccagctactccggtggctgaggcaggagaattgcttgagccagggaggtggtggttgcagtgagccaagagcgtgccactgcactccagtctgggcgacagagtgagacttcatctaaaaacaaacaaacaaacaaamaaaaaaaaacaagtaaaaaaaaaacctacaaactgattcatgttacaatgtggatcaaccttgaaaatatactaaatgaaagaatacaggtacaaaggtcacatgtcatatgattccatttatatgaaatgtctagaataggcaaatccctagagataaaaagaagattgatgatacagagtttcagttttgcaagatgaaaaagttctggagattttgggccaagtgaggtggctcctgcctgtaattccagcactttgggaggccaaggagagcagattgcttgagctcaggcattcaagaccagcctgggcatcatagcaagaccccatttctattaaaaataataattttaaacaagtcctggagatctgtttgacaacaatatgaacatacttaatatatttaacacttggttaagatggtaaattttgttgtgttttttcatcacaatgtttttaaaaggtatgagacctagactttgccctctgtgtggccctaatttcttgggggtaaatggcaagtaatttagtactatttacaaactattttcatatacatgatatatcaggtgctccaggcagtccatgagatagatagaataatccctctatatccatgggggttggttccaggaccccctgaggataccaaaattcacagaggctcaagtcctttaaataaaatggcataggacgggtgtggtagctcatgcctgtaatcccagcattttgggaggccgaggcgggcaaatcacctgaggtcaggagtttgagaccagcatggccaacatagtgaaaccctgtctctacaaaaaatacaaaaaaattagctgggcctggtggcacgtgcctgtagtcccagctattcgggaggctgaggcaggagaattgcttgaaactgggaggcagagattgcagtgagccgagatcgtgtcactgcactccagcctgagtgacagaatgagactccatctcaaaaaaaaaaaaaaaaagcatagtactttgtatataacatatgcatatcctcccctatactttaaatcatctctagattacttataatatttaatacaatgtaaatgctatataaatagtcattatattgcattgtttagagaatgaggacaaggaaaaaaagtctctgttcagtacagacacaaccatccttttctttttttctgaaaaaaaaattttttttttttgagacagagtttcactcttgttgcccaggctggagtgcagtggcgtgatcttagcttactgtaacctctgcctcccaggttcaagggattcttccacctcagcctcctgactagctgggattacaggcacctgccaccacgcctggctagtttttgtatttttaatagagatggggtttcaccatgttggccaggctggtttcaaactcctgacctcaggtgatccacccacctcggcctcccaaagtgctaggattacaggcgtgagcctctgtgcccggccttctgaatatttttaatccacagttggttaaattcgcagataaggaacccatagttacagagggttaatatcatcaaacacttgttttttttttttttttttttgagactgagtctccctctgtcgcccaggctaaagtgcagtggcatgatcttggttcactgcaagcttcgcctcccaggttcaagccattctcctgcctcagcctcctgagtagctgggactacaggcgagcaccgccacacccagctaatttttgtatttttagtagagatacagtttcaccatgttggtcaggctggtctcaaaatcctgacctcaggtgatctgcctgccttggcctcccaaagtgctgggattacagatggagccaccgtgcctggcctcatcacacacatttgcatgaactgaggctgggattcaaagctggatcttcctggtgctctgtacaatccagaatgtgaccttgccctcctggacagggctgtgtacattccatgtgttctgatgggctttggtcccagaggggtgactttatttccatatgactgacagtctcaggaggactcccagaattggccacaagctgctgccctgggacatacctctcctgagactggggcggccctgagggagtccacagcttctgaaagcttcccctttcccagacagcctttgggctagcactgtgcccaggggctaactgcgctgtctttgtggcacccctctctcctgcccggtgtaggcaaggacctagcaaaaagagctcttccaggcaagaatcagccaacaccattggatggcccagtagcagttgtcccagtagcaattcttggcagcaagagatggggaaagaaaggagtccagggacaatacgttaaataaagatatcacttctgcatttaaataggatgctaatgaagcccatgggccagactccaatttctgcagtttggaggatctttgttctgagtgcttaaatggtggtgtttgtgggctattaatgtaaactggttcagagttgaatgtctacatgttttgagagagaggcctcagcttgggcaccagagctccaagacccccatttctcaactaaccactgcctcttcctcactgctgctgcccccaagctgaaaagggtcctttccctttagcttatattggagaaatgcaggtgggccaaccattcagagtacttagatcagcagtcccatcagaaccacacagggccaggggagagtgtttcccaacaaaaggaggggctgttgagacaatagcaccgtcttcttccagaccatcccccctccacctgagtcctcatggagactacgctccagccacgatacctacagtaaaccttttattcaagagtctgaactcagaagcatccaaacaatggatctattcttttttttttttttttttttgagactgagtctcagtctgtcacccaggctggagtgcagtggcatgatctcggctcactgcaacctccgcctcccgggttcattggattcttctgcctcagcctcctgagtagctgagtagctggtactacaggcgtgcaccaccatgccctgctaattttgtatcgagctcactgtagccttgacctcctgggctcaggggatccttccacttcagtctcatgattagctaggactgtaggagtgcactgccatcccctgctgatgttttcttttttgtagagacagggtcccactatgttgctcaaactggtctttaactcctgggctcaagagatcctctagccttagcctcccaaagtgctgggactgtgggcgtgagtcactgtgcccagccatgattcattttctaaataatacatgagcattccagttgctccacatcctctccaatatttggtgttgtcagccttttaaatgttagccatctctggccgggcgcagtggctcacgcctgtaatcccagcactttgggaggctgaggcgggtggatcacgaggtcaggagattgagaccatcctagctaacacagtgacaccctgtctctactaaaaatacaaaaaaaaaaaagtgttagccatctggtggatgtaaaatggtatcttctatgattttaattcgcatctccctgatgacgtatcatgatggacactttttcatgcgcttatcagccatttgggtttcgtttactgtctgtgtgggaacagccagtatatgcagtcagtgtttggagaaccatctcatcagcaaagcctgtgatgtgaagaagaaaaaaactttttttttctttgagacagagtcttgctctgtcgcccaggctggcgtgcaatggcatgctctcagctcactgtaacctctgcctcctgggttcaagcgattctcctgcctcagcctcccgagtagctgggactacaggtgtgcaccatgatgctggctaagttttgcatttttagtagagacagggtttcacaaggttggccaggctggtctctaactcttgacctcaagtgatccacccgcctcggcctcccaaagtgccgggattacaggcgtgagccaccgcacccggccaaactactttgttaatccactgaaatgtggtcctgtttcaagagttagagcattaagtaccctgattaaatataatcccctcaactctttcttttctcagcatttagtttgcctttgcacatcactagtaggccttttgttttcacctcttagatccaatgcactttctttctcccaaatctggggagaaaatgtgttttaaaaaaactcataagaggccaggcgcagtggcccacacctgttatcctagcactttgggaggccaaggcagacggatcacctgtggtcaggattttgagaccagcctggacaacatggcaaaaccccgtctctgctaaaaatacaaaaaaaattagctgggtgtggtgacagagtgagaccctataagaaaacaaaaaacaaaaacaaccaaccaaacaaaaaaatcctctactgctcaggtcattggaacatttattctgttttatggaatgaagtgttacccgattctagaattgtaaataaagccaattaagatctttcaaactaagtttgttgtaattttgtcatttgacaaatgtaatggttatatcctcaaaagacagacaggagtcagggactggccagraaactaaaagtttaagcctggattcagattatagggaccaagggaaacttccctttcaccctctgaaggctcgctgaaaaatcagctcccaagaggcagattaattggagaaaaggcatacacattttatgaactatacacgaggagaagcacagagtgactgcccaggccccagagtggttcggaagcttatactctatcctggcaaaacagtttatgggaagggggaggaagacgaattctgttgaggggttactaggaaggatgaatggatcagggaacagagattaatttgtacagtattttgtgaaagtttctgttggtgtggctggattcttggtcttacaagaaggggaagaaaaagcaattgtttattttgatgggtctggttcttaggcagataaaggttttgggagagatgttgaggggggatatcagaaagaccttgaggcttcttcagttcagcatgtcaaagcaccacatttgggtgtattggtctctttcttttctttcttattttttttttttagacagcctggctgtctcgtatttttaaagtacttttaaaaaaggaattttttggtggggtgagatgttttgctggagtgcagtggcatgatcacagctcactgtaggttggaactcctgggctcaagtgatcctcagcctccagagtagctgggtctatgggcttgcgccactgcacctggctacatttttgtatttttaatagagatagggtttctccatgttggcaaggctggtctagaactcctggcctcaagtgatctgcccacctcagcctcccaaagtgctgggactacaggcatgcggcgccacacccagctaattaaaaaaaaaatttgtagagacgaggcctcattatgtttcccaggctttaggttcaagagatcctcccacctcagcttcccagttagttaagactacaggtgcgcaccaccacgcctggctaagtttttatttttgtagagatggggtctcactatcttgctcaggctggtctcaaactcctggcttcaagcaatcctccctccttggcttcctaaagtactggaattgcaggcatgagccactgtgcccagccgggtcttggtttctgagcctcatcaagatgataatcgtgaacaactaagacttcatgaaggcaaagtcaacaggacttagagattaagctaatgtagagaatgaggaaaaataaagacaaaaatgacaccgaggttttgaactcaatgattaggtgaagttaacagcccttccttccaaaggaagatctgatttgagggaaggtaatttatgggttggacatgctggtgggatatccaaatgaaaattgccagcagacaactagaaatgtgggactgacgtgtgctgtgtctcatcttccatttcttcattcctgcttttgaataaaactaatctgactaatcagtttgaactaagtatattaagaaatgataagcccggcgcggtggcagctcacacctgtgatctcagcactttgggaggccgaggcgggtggatcacctgaggtcaggagtttgagaccagctggccaaaatagtgaaaccctgtctctactaaacatacaaaaattagccgggcatggtggtgggcacctgtaatcccagctacttgggaagctgaggcaggagaattgcttgaaccagggaggcggaggtcgcagtgagctggggtcacgccactgcactccagcctgggcgacagagtgagactctrtctaaaaaataaaaaaagctctatgtccaaatataatcacattgagggctaggtcttcaagaagatatgaatttgggaggcagatacagttcatctcacagcataacatttgtttgtcaaaactcatagaactatacaccaaaaaagggtgaatttttaagctgtatataaattatacctcaataaacataatttgaaaagtaaaaagaggcctggtgcagtggttcatgcctatgatcccagcattttgggaggccgaggcggaaggatcacttgagcccaggagttcaagaccagcctgggcaacctaaggagacctcatctgtattgcaataaaaataatcagaaaaaaaatggaaagtgacaaaaatggtgaagggggagtaaatcctgagaagacaagaagccagacagtgctgagctgaccctggacttccaagcatgccttccacatggagcgggctctggccctgcccttttgtgtagggatttcatcctatacagttcactggtaaaattaactagattgggcttctttctagaatgagttgcatggatgtttttaggcttgaggtgagaaatcgaaatagagaaattcagatgggtggaattacctaacactatcaaaaatcctagctcccacgctgttaatccgggtgacagtcataggctttagtgtcaccagcttcaaaatagctcgggtcagcgttgcctgggagctgctgattcagggctgcctgcgcaactgtcgaggtctccaggagctctgttgtgcagaggtattccaaaccctcggaactgtccttggctgaactgcctactcccccaggccttctgagctctatttgaagagcttgcaatttaaagaagtgaagaaccagcaaatacataggggtgaaaatgaaaaacattttctccagggttaagctaagtcctggggttaagacttgttagtggagcccacctgctatccttttaaatagataaaagacttttcagtctcttaccgtgaaaaactacatccactcccccgcccctgccactctcccacaccctgcttcccccacccccaaaaccctataattaaaaaggctcttttcagactggaacacaattcaagcacaatcattatgaaaaccctgccctgtttcagtggttactgacaactccctttgtgtaaatctcattaaatcaaaccagggactcttatgtttttgtgtgtgacaatttctaggaagagaaagctatgtggatttaagaaataatgttgcaaatcttaggtatgagacttctttggattagaaagtaatattatttatctctctgaagccactaacaaatcaaccattaaaaatgggttattgtcacccagcatcctttctctaccctggtcgtgttctctatgtttaataggaaggggaaacagagtgctttccttgatgggctattttattttcaggcctttaagaagacaaatgaatgtactaaaaatattgccttagaaagtattttcaattcattttcatgctatacatgtttggtacttacgagctatttgcttctatttgataagaaaaatgattcttcttcaaaacatacacaacaatgggttttctttacaccctgaaaagcttgaaaagtaaaatgattcttatatcaaattaaagacaacagtgagattcccctgaaccttacagaatagcctacaacatagactacttacacattttttctgggcattgaagttgtggtagctgttaattatcttttcttttccttttaatattgttatttcttttttcttttttctcttttctttttttttgagacagagtcttgctctgcaacctctgcatcccaggttcaagcgattctcctgcctcagcctctcgagtagctgggattacaggtgtgtgccaacacacccggataatttttgtatttttagtaaagacagggtttcgccatgttggccaggctggtctcgaactcctgacctcaaatgatctgcccacctcagcctctcaaagtgctgggattacaggagtgagctactgtgcctgggcaaattttgttatttctattcccattccagaatttgcaaagttcttaactgtaaaaaggttcctcttcttttgtatctttttccatcagtggatataaatggctttgacacttccttaccatcaaatgtctaaatagactccactgggcgtaactgggtactaccaaaaaagggcacttgtatgaccccgtgttctggtttcttgagcttataaatgcatgtgcctttctttgttttctttggctttttcttgccactgtgctaagtcctagtgactggaacaagctcctagaggggttcatttaaaggattaatgtctgcttactcacacgtcttatggggatcttcctcataccttgcctcacccaaatgcatgctgattttctaactttccacatggttctgccgtcaataacaaatcttcaagttaaaaaagaggggtacaaccaggatgagaagaggtgcatagctagaatggagcatctgaatgccacacagcccagaggtgctcccctctccacatctccaggcttctcctggtgcctgctctccaaccccccatgttctcccagggcttctgccttgtacttctatttgcgtggatttcattccgctattgatttttttttttttttttgaggcagagtctcgctctgtcgcccagactggactacaatggtgtgatcgctgctctctgcaaccactgcctctggggttcaagcgattctcctgcttcagcctcccaagtagctgggactacaggcatgtgccaccatgcccagctaatttttgtattttcagtagagacaggggtttcaccatgttggccaggctggtcttgaactgctgacctcaagtgatctgctcatctcagcctcgcaaagtgttgggattacaggcgtgagccaccgcgcctggccttattccacatattgttgcagagcgtatctcccttgtctttatcctgcaccagactataaggtgtcatccttctgggtgctcccccggccccagcacactgctctggccacaatgcccatgcgatgaagagaatcttttagtatcaaggaagtattgatgccggagaatctgcagctgttgagccatggtcagatacactttgcagaaaaaaaaaaatcaccttctggtagaataatcttccaagagagataaatacatcaagcattagatcagaaccagaaatatctttaccctgaatgagatcttgaagacctaggaaaaccttaggaggcttaggagtggagaaaaaaagagtctcagacaaagggaggaggaaggagagggcaaaagggtgcaggattacagggccacaccctcgtgagattgcgtagtgattagcccagtgatgatgaatatttatgcagacaatactgattattttacaaggattcatttgaataatcatgaatatgtttccatgcatttgcacctaatgggatggtttgcagtctttaatgaggcattggcgcgtgtttgaagagcaagggagggcagagagatgggaaagaacaatgcaggtcacaacgttcatgcagcattttcttactgtactgacctcttgtccctgaagtcctgtctgtaaagaacgaggtgggaaatgtctaaagcatgcctcggggtgcctatccgtgcataggctaaaatgctttgctgtttcttctaagcctactctgctcttgaagagagggaaaaccttgacgctttctttgacctctcaggccctccagtttcaggaattttgcaaggtcacatggctatacaatggcaaaaccttttccgctgggcgcggtggctcaggcctgtaatcccagcactttgggaggccgaagcaggcggatcacgaggtgaggagatcgagaccatcctggctaacagtgaaactccgtctctactaaaaatacaaaaaaaaattagctgggcgtggtggcaggcgcctgtagtcccagctactcgggaggctgaggcaggagaatggcgtgaacccgggaggcggagctttcagtgagccgagatcgcaccactgcactccagcctgggcgacagagcaagattccgtctcaaaaaacaaacaaacaaacaaaactttttccaaggtcacatggctatacattggcagatccatgccttcagatccctgtctcttccaagcacctggggtgaagtgccacctttgccagggtcagtgctgggttgcgggattgtcctaccctaattactaatgggctgctcctttcactggcaaaattgtaacagggttttaagtaatctgttttgttcaatggtttgaggagagcaaccgtttgtttcttttcccttcagtcccttgcaagatgttagtttttaagggagaactggcaggacggcagggttgggggagcaggaaaggcctggagggacaggagcatctctgtgacttgcggagtagctcagcgggcgggaggagctggggccgcaggaggactcccgaagtggattagtttcaaccttcacatactgagatgacttgcatcgcaaggaaggcggacctgaaatcagcccgcaaaaggcaggggcctacaccgcaaggcccatttagttaatttctaccaagagtcccaagcatgctcgtatgggcgggacaggcaaggggtggccagctgatcccgcacctggagctgggccattccagctcttccctttccggtctgcaatttgaccttggacgtgccttctagctctgcaagcttccccagttggagactgggctgtgtgaggccgaaatgcaacttaggctgtaggcaagtgcctagccggggtgcagacaaacacaagggagctattattaggcagtttctgtcggcggaagcggaattgcaatcgggtcgccagctccgcgggagagggagcgggggcggtaggcggcggttcagctggcggctgcgtccttccccacgcggggatacacctgccacatcagctggcacctcccgcggggaaaggttctgggttcctcacggtcaaagcaggattccgactgtagtgtattttcccaggttctaaactcaccgacccccccttgtgattgacacattctttctttagatatgctaataccttcaattagattactgtctaggcttgccttggccggcaggctttgtctcctaaggggactttgcccatctcaggccttttacattagattttttaatagttcacctctaaggaggcacataaccttaattcttcagtggtatcttaatccggatattcccaaccccgacctcggtgcatccattcgcgtgttcattcaacaaaggcttcctactgtgaccttaggctttttttttttttttttttttttgagacggagtatcagtctgtcacccaggctggagggcaacctccgcctcctggattcaagcaattctgtctcagcctcctgagtagctggaacttcagacacacgccaccacgcctggctaattttgtatttttggtagagacagggtttcaccatgatggccaggctggtctcaaactcctaaccctgggtgatccacccgccttggcctcccaaagtgatgggattacagttgtgagccaccgcgcctggcccagctaatttttttacacagaagaacctccatctaattttccgaatctatgaactgggtttttcggtgtctcgttatgaagatgaaataaagtaatccttgaagaaggattaaatgagaaaagcttgagtaccatagtgtatggtgtctagcaggcactcgataaatgtgttcagtgggtgaatgaataaactttacctgtgattcctgtcactcctgcagggtgcctccggcactgtgctactctttggggaagtaatggtgaaccagacacaggaggtcctgccctcagggagcctgtaatctactctgtgagggatagagacaaataaagcaatcccagggctgggggataaatgccaacaacttgcgaaattctgagctgactggagctcccatcaggaggacctaaccagtgtagaggtctccacagctcccaggaggaagtgggctctaagctataacgcaaatggtgagtaagmgttagccaggcagagggggaggatctgagtgatagttaagggaccgccctgatgcaaaggcctccaggcaagaaagtctttcttccaaccaaagagacactgaggaactataggaatgttgcttgccaggggatttgggccaaagaggctggggaggtaagccagggctggactttggagggctgagtaaatcctaaagtcttaggattttatcctaagagctatggagtgtttaggagataggggtccacaggctcaataaaaattggaatatggggccaggcatggtggctcacacctgtaatcctagcactttgggaggctgaggcgggcggatcacctgaggtcaagagttcaagaccagcctggccaacatgttgaaatcccgtctctactaaaaatacataaaattcgctgggcgtggtggcgggcgcctgtaatcccagctattcaggaggctgaggcaggagaatcacttgaacctgggaggcggaggtggcagtgagccgagatcatgccattgtattccaacctgggcaacaagagcaaaactctgtttcaaaaaaaaaaaaaaaattggaatatggtaatcccagctattcaggtagctgaagagggagaatcgtttgagcccaggagtttgagagtttgagtctggcctgggcaacatagtgggactctaaaaaatatatatttaaaaaaacaaaataaaactggcgcctggaggaagaggtaaaggactgcgatgactcagggctttcaagttcaaactccaaatccaggagtatgcaacacatcagggcgccagactgcctgggattgagagtgactccttgcttgaaaaagtgacctaacctcatttgcaaacttggctcatcacaagccccaagtcgtaggtttgtgagagacagtgggtgaaataattacagaatgaactacttacaacagtacctggcatagagtaagtgctccatagtgttggctattatccattctactcagttcccagaagtcacaggtcctgcagacccagctatttttatttatttatttatttgaaatggagtcttgctctgtcacgcaagctggagtgcagtggcatgatctcagcacattgcaacctctgcctaccaggttcaagtgattctcgagcctcagcctgccaagtagctgggactacaggcgcctgccaccacgcctggctaattttggggttttttgttttgttttgttttgagacggaatcttgcttttgtcgcccagatggagtgcaatggcacaatcttggctcactgcaaccgccgcctcccaggttcaagcaattctcctgcttcagcctcccaagcagctgagattacaggtgcccaccaccacaactggctaatttttgtatttttagagagatggggtttcaccatgttggccaggctggtttcaaactcctgacctcaggtgatccgcctggcctcggcctcccaaagtgctgggattacaggcatgagctaccatacctgtacccagcagagctagctgtttaaaacaccggggaggaatgcagggggagggggaaatttacaaaccgcaggatgatgtaaactccaggaactgcgaactcctccttttataatagtttagtcatggtccttgcaaatttggttgattgatttcagtagctgattagaaagcagaagctgccaagcaggtccactaggaatggcagaagcagtaattccttcttccaggagtacagctcgaggaaaactgtggaagtaccataaggaacagaggcaagaccccagaagtatagcaaactagcagatggtggccatttagaacagagggcaagggtcttatgcatccaaagtacactaaagacttcactgtattgtagtacaattattgagcacttaaaggctctgttcagattccagcttgcccattacagtaggaggatgtttcaggaacttgagaaataacattatgtcggacaatggaatcagaccaggcacggtggctcaagtctgtaatcccagcactttgggaggccaaggggagtggatcgcttgaggccaggagttagagaccagcctggccaacatgacgaaactctgcttctatgaataatacaaaaaaaaattagccagccttggtggtgtgggcctagagtcccagctactcgggaggctaagccagaagaatcgcttgaacccaggaggcggaggttgcagtgagccaagatcgcctcactgcactccagcctgggcgacggagtgaaactgtctcaaaaagaaaagaaaaaaaggcatacctgacaatttatttgtatgaaggcagatgttttctagtgtgttccctcccttagtcccccggggagtggggggtgagatttgggacaggcaaaagaaaaaggaaatttggcttccctctgcatgaaaactcttaaaattcaaaccttagcaagaagcatttactttctgctgctggatagaaaaggggtgcttttggggctttaacctcctttctggcttcctgcctctgtaaaatgcccatgagaggaatgccgggggtcacaagagttacttagcgagtaaatatacatgagtgattgagagagaattacaaagtctcctctaagtaatggagtcaaaactaacaatactcagttgtcagaacatctgatggagctgcccatactatcaccccagacacagccaactattttaaagacgagcctttgaggacaatatctgatggatataatttggttttctagcttatgggaactgagctcaatggacagtaacagtgaatgaagttggaggaaggaaatgcagtgattatgggtgggggatacttggcaaggcaaggaatgaataggggtatgtttaaaaaattatttttacttccaaatttatggcttaattttgatttgtgttaggatttgttagctgttatttgcccggggtttggcagtttggtatgtactggtggtcttaatctggtatctggaccagaaaacaaatgtttgcatccttggaatccccgttacaattgaaaaatttccgaggagacagccaaggccagatgggaatgcggcatggattgccccgttagcacttaaatcctctgttggtgcagtcttgctttgtgttttctttcttcattccttaacacttagcagtgcccagcctkataaggacccagaacactagatgttggggattagagcagtgaatccaatagaccacacctttgccacatctgctgagggctgtttgcattataatatgtaggaaggcatcacagagcaagagactgactgcctgtgagagtgcaagaggggaccaaactcagtttgtttttctttctttttttttttggagatggggtttcactcttgttgcacaggctggagtgcagtgctgagatctcggctcactacaacctccacctcccgggttcaagccattctcctgcctcagcctccctagtagctgggattacaggcatgcgtcatcacgcctggctaattttgtatttttagtagagacggggtttctccatgttggtcaggctggtcttgaactccctacctcaggtgatccacccacctcggcctcccaaagtgctgggattacaggcatgagccaccgcgcccggtctgttttttcttttgagatagtctctgttgcccaggctgcagtgcagtggcacgatctcagctcactgcaatctccacctcccaagttccagcgatcctcccacctcagtctcccaagtagttgggactacaggcatgcaccaccatgtccagctaatttttgtatttttttttctgtagagatggggttttaccatgttgcctaggttggtctcgaactcctgggctcccctgaagcgggagaactgcttgagcccaggaattcagaaccagcctgggcaacatagcaagaccccatctctacaaaaaaaatgtaaaaatcagctgggcacagtggtgtgtgcatatagtcctggttacccagaaggctgaggtgggaggatcacttgagcccaggagttccaggctacaaaaataaaagaagcctcgctgtggtggctcacacctgtaatcccaacattttgggaggccaaggcaggaggatcgcctgagcccaggagtttgagacaaacctgggcaacacagtgagaccctgtctctccaaaaaattggtttaaattagcaaggtgaagtgatacatgcctgtactcctggctactcagaaggatggcttgaatctgggaggtcaaggctacagtgagctgtgatcacgccacccaccacactgctatctgggtgacagagtgagaccccgtctcagaaagaaagagagagagagagggagggagggaggaaggaaggaaggacagacggaaggaaggaaggaaggaaggcaggcaggcaaaaaggaagaaaaaagaaggaggaaggaagaaagggagggaagggaaaaagtgcatatttgctatttaaaggacaataataaaaaggtgttttttttgtttgttttttgttttttcttctgtgacgggtttcctacaacagagacagggacaaaccaagaagtgtggtgccattgagtaacaggctggtggtggaggacagaagaggaggacctacatttttggacctcctgagttgggagttgtgggacacaatgcaattcattatgatctggaattagaggagagatccgatctggaaacatagatgtggaatcatcagaatagacctgaggccctgagagcaaatgtgtttctccaagaaatgcagttttcggaaagatgagggccaaagatagaccctggagaacagtccatatttcacaaaggaatgcaggaaaattagccaaggaggaagactgagaaggaacggctttatggaaagagagaaagttgtcttggaagctaagggaagagaattttaagaatgggctggtgtgcagtgctccctgcagaatttcctaagtagggggagtctttcagtctatagagttatgtagtttccctgagggagatagccaaaaaaggggccagggggttatcctatgccccaagagaaagggcctctattccttttaacttaatttgtatttaaaggataggtgtaggatggcctaggtaaaagaatggacagacaccaggcgtggtggcttacgcttgtaatcccagcactttgggaggccgaagcagatggatcacttgaggttgggagtttgagaccagcctgaccaacatggaaaaaccccatctctactaaaaatacaaaaattagcctggcgtggtggcatgcacctgtaatcccagctacttgggaggctgaagcaggagaattgcttgaacccgggaggcagaggttgcagtgagccgagatcacgccactgcactccagcctgggtgacagagtgagactccatctcaaaaaaataaaaaataaaaaacccaaaaatcccagctactcgggaggctgaggtgggagaatctctttaacccggaaggcagaggttgcggtgagccaagatcacgccattgcactccagcctgggcagcaagagcgaaactccatctcaaaaaaaaaaaaaaaaaaaaaaaggaatggacagatggacagcacctgcaagggcttatttaatgcttccttctcaaagttacttagtattactattattattttttgaaatgaagtctctctctgtcgcccaggctggagtgcagtggcgtgatcttggctcactgtaacctctgcctccccggttcaagtgattctcctgcctcagcctcccaagtagttgggattacaggtgtgtgccaccatgcccggctaatttttgtatttttagtagagacagggttttaccatgttggccaggctggtctcgaactcctgacctcgtgatccacccgcctcggcctcccaaagtgctggggttacagacgtgagccaccacacccagctcaaagttactaagttttttgttttgttttgagatagggtctcattccatagcccaggtgggtgtgcagtggtatgatcacagctcactgcagcctcgacctcctgggctcaagcgatcttcccacctcggccttccgagtagctgggaccacaggtgcacaccaccacgcccagctaatttatttttattttctgtagatacggggtctccctgtgttgcccaggctggtcttgaactcctgggcaaacggtcctcccacccaccttggcctccgaaaatgttggggttacaggcatgagccactgcacctggcactacctagttatatgcacagtgcagggtgcctaaggcctgaggtagcttaattggttgtagtttatgctctgattttttcacaggctacagtcaagttgactgactgttatgtaggatgcctcggttggacaagatggtaaaagaggctctgccagaagggggtacccaggaactctttttttttttgagacagagtcttgctctgtcgcccaggctagactgtagtggcactatcttggctcactgcaatctctgcttcccaagttcaggtgattctcctgcctcagcctccccggtagctggaactacaggctcctgccaccaagcccagctaatttttgtatttttagtagagatggagtttcactatattggccaggctggtcttgaactcctgacctggtgatccgcccgcctccaccccccaaggtgctgggattacaggcatgagccaccgtgcctggcccaggaactctttttcaatggtgcaatgtagactcttgaacatttggtcagaggttgagacggaaattccaaaagggtgtggtgagaatatactacttgtgctgttcatgtggccttgtcaaacatagcacgggtatgatatatttccttttttatttttcttttttgagatggaatctcgctctgtcacccaggctggagtgcagtggcacgatctcagctcactgcaacctctgcctcctgggttcaagcaattctcctgcctcagccttccaagtagccgggattacagttgtgcgccaccacacccggctaattttttatatttttagtagagacggggttttaccatgttggccaggctggactcgaactcctgacctgaagtgatccacccgcctcgacctcccaaagtgcttggattacaggcatgagccactgtgcccagccgatatattttgttgagttatctatctgatacttggaatgggtttattcagggacacatatgttttatttccccaagtctagactgttggtgaagtgacaccatagagtagacgtatttttacagtgcagagcaaatctgagcttgtccacttacacaatttttctaacccagtgacctttgtagtctttggatcacacctcaaaattttttgagtattcatctcaattattcacttataatttataaaaactaacttacagcttaaatatagttagtactatcctaatatgtacattacaaaagatatacaaaaatagaaattaaaaaatattgaaatgatggactaaacaataccattaacatttaattttatttactagcagtagaaaataatttgctcttactacaatgcttaatatttgaggtatgattgaatatgcttctctttttttttttgaaatattggcataatagtgtgataaaatgatttgaggattttactctgtttagtttttttcaaacttggttgtttaaagggctgtcctagtgggagaggatgccttgcaaagttttctgccagtaggaagagacagattatttttaccatttacttttttatttttattttttgagacggagttttgctcttgttgcccagggtggagtgcaatggtgctatctcggctcactgcaacctctgcctcgctggtccaagcgattctcctgcctcagcctcccgagtagctgggattacaggcgttggccaccacacccgggtaatttttgtatttttagtagagaaagggtttcacaatgttggccaggctggtcttgaactcctgaccgcagatgatccacctgccttggcctcccaaagtgctaaaattacaggcgtgagccacctcgcccagccgtttttactgtttacttaatcataatgctcattgctcaatctcatccttcagctatgcaaaagattttagttgacatttgggtggtgagtcgctctttgccagtatcactcaattgtttctgcaacataaattggaaagtgttgaatttgcattttgatattttaactgaatcggtgatacattttgtgtgtgttggaattttcgtaatttaaccccagaattttaaattcctgtatagaagctactccattcgtggttactgttcctgttctaaataaaatgatataatgttttgattaaagagatcatttattgttgataatataccttctctgctaaacactttttttagtggttcataaaaaataagtgttttcaggtgtgtcatcacgagaacaggggcaagcagataccttaagcagaggcattcaacagttgcacaaacctcccacactgtgtaatctattctaatgtgtgtttctttaaatctacagcaatattttcttgcttttttttttttgagacagagtctcactctattgcccaggctggagtgcaatggcgcaatctcggctcagtgcaagctccacctcctgggttcaagcgattctcctgcctcagcctcccaagtagctgggactacagtcgcctgccaccacgcccggctaattttttgtatttttagtagccaggatggtctcgatctcctgacctcgtgatccgccctcctcagcctcccaaagtgctgggattacaagcatgagccaccacacttggcctacagcaatattttctaagcatcttccaactgtttgctgacgaatgtattttatgttgcagccgtattttctggttattattttcatattttagcatttgttttttgtttatatatgtcaattattattattcatttttaaacttttccagaaataaccaagtttttccagaaacttttcccagtgacatgtgacttctagtcttttggtattaaataagaaacctcaaaagagacttcaaaatagtcatcgttaagtttagcagaaaatgttaaagtatttgatcatcttttatctttgtcattggaaaaaaaaccccaaaccttataggtgttaatcctggtgttctgagcacttaacttttagatttttttttttttttgagacagagtcttgctctgtcgcccaggctggagtcaagtggcgtgatctcagctcactgcaacctccacctcccgggttcaagcaattctcctgcctcagcctcctgagtagctgggattacgggtgcccgccctcacacccagcgaatttttgtatttttagtagagacggggtttcatcatgttggccaggctggtcttgaactcctgacttcaagtgatccacctgacctggcctcccaggatgctgggattacaggtgtgagccactacacctggccaatacacaggacttagatgaggaggttgtgaagggtaaggagagtcttccagaaagcggggccggcatgtgcgaaagcctgacagtgacaggaagtaggtgatattcaaagaacaaaaaggcaagcctggatcttgaaatgtgaggatggaggggcagggacatgggcaggcaaatgggtcgaatcgtgaagaaacttctaagtcacagttataatctggacctcattctaaggacaattgagtcatctggaaacatttgagcagaggagtgacaagatggtatcgttggagagattcctcaaggtttagtgtgcagaatgcattgaacgttggccaggttggaggcaaggactcagtgaccagttccacactgggatgatgggcctgaggttgtgtgtgcgtgatgtcagccgagagaagggattgggatcaatagacacttgagaggtggaaccctcccagcctgtggtgatggagcagatgagagggaatgagggtcgttttctgagagggcaggtactgtggagatgaatctggtgtgggtgggtgtctcgggctgcggtgctggaaacagaccctgaataatctttggagatataattgtgaaggactgaggaaggcaggattagaaaggaggagttgacccacagtgctatggtgattgaggcctcagccaatttacagggagctctggggctgggatggcccttcagagttggcccaaataaaggcaagagggccaagtttttctatctctacatcagccagatgttggctgcttcttggaagtgggtgtagccttgggcaagacagtttccaagaactgtcacaagacggtggccaaagcaatttgcagtgagggagtcagctgtgagtagtcggcagccaatattcttagcagctaggggatgagggtgtatactctgaagagagaacctagacaaaacactactgtatccactacaatagcaaaagagcttaggtttaattggggacatatttacttttaggtgcctctgggttcattatccattccttagttcactgataattaatgtcagttatgggatgtacaaagcattgtgccaagtggtggtgatggcagggatgatgagggcaggatgggaagatgaagtcaatattagcgcatgcatagtgctcagggtagtgtctgcactgcaggagaccagtgagattccttctcaggaggaactgggtccccatttcctgtgtgttcccttctccttcaggtaggccctcaaaggattaagccttttcctttctcagatacctccctaggttcttcttctttctcttcccctcctctaggacttagagagcagagaacaaacccaaacacaagtttcttttaaggaagcccagatgtaatataaaaaagttacaaagggttaggaaatcttataaagttctctacagatttctcctttggcccagtttctgcagatgaatctttaccaggatcccaatccccgtacttctggctctcctttgactcctgaagggagggctcatagaaactacccacttttctctgtccctacccttctcaactctttccttggacaaggccagctttccagcatttaggccttcagagacagcaggaggtaaggattagtggattcatccagtagccaggacctaggaggtcattcaaatatcgaggggcctcctaaataatgcccaatgctgagcccaacccccacccgcttcgggtctctcggttaaaggcctttgcaggcatttccaaactgaggttcagaaaaggagaggtggttttgccacagaaatctatgaaatcacgaacaaaggataaggggaatcctctacagtctatttctggcaggctaataataatttaaacttggttatgatttctttcaagcgtatgtttttgaatataaaaaaacctgattctatccatattttgatgttcttaaaaagaaaaggtagacttttgttttttcctttttctttgctggctaccctgctacaaatctttaaattatggtgctaggattgaaaggtgtaataatttctttaaaaagaagctaacacatttaatatattaatctctctataaacccctaggcttagcttggtttcaagctaaaaatgtgtagttcaaggcatgagactgctcggtttagtagttagttccacagggcctctggatggtgagataaagaaaaggtgtttccttttttccttccactgtccctccaggaacacaccttttgtgcgctctacctaacacacgaatttcctaatttcataagggcatttggagggaaagtatgatgatatttacaggcttctgcaaagccggcttccagccacaaaagattaaagaaaaaagctaggattttgcaatacactgattggaggaaaagccaagacattgagagttagcaataaaaacagcaacaacaaaatcgcaaagggtttggaattcctttagtttctatttggcataagaatcatatgatttctttgttctgcccttccttatcgactgcactcaaatgatagttttatttcattcttgcagtcgagtgactgattctattgttgctcaaagcagagaggtgcacaagagagccttacatatgtagaataatagaatgaacctttttgtattgtgtttttggaagaggggtagtgtccgcttaaaaaaaaaacaacccagaataaatgctgtcttttcagctgtgaaatttagtgattttgcaaaatggactaagacgggtgctttgcttttaactactggtctacctggcaaaggggtttctctgaaatcctctttacaaaaatagaactgagataacttgcaataaaatatcttttactttttgtttatgatatttaaaagcagatgcaatgttatttgttgccatttgtgcaaatgatcaattgtgcttctagaccaaatttcttccagccgaggctccggctaaatcactgggctttgtacaaagccctgctcaaaaaagtgtttggcatgatgaagccacgaggcagttgtatagctgaaggctctttatgataagcatttcagactttagttttggtagtacaactcttgtaaccattcaagtgctgctttgctgtcatttcaactcttaaaagaagggaatgggggaggggcaagagagtcttctaagtaaacaaagatcccaaatccatgaaacctaggatttatcatggtatgtacattatgaaattccatatattgtaaactgtgtagcatgtcaagatttcacattagcaggtcctagtgtactcttcaatgcacatacggtttttatatgcatattaataaaggcccatctttgggagaagaaaaaaggctccctttcaaatgaaatcaagcccaggtaaagctgaaacccaacccacagagtactggcaccgttttcaggccaaaagaagacaagggtttcaatttcatcatcttgtaatgctgataaatgcgatgctgtgactggcaaaatttgcagattacataggtctttctaaacgtgtgtaaatatgcaaatatgtattccaatttatgtgcaattccaaacaatttgctgtttgaaattaaagaccaacaactcttctgtgagacaataattcgggtcatttacatgaaaagtcttaaacagcaaaaatgctacttgcaatttacatcatacagtgctcccatcacagagaacaatggcttcctcaatggaagttaacgcagtagagaggtatactgagattttttttttaacttttcagcacagtttgcaaatactaaccaatgaatcaaatttaaaataaaatagaaatgtttcttatgcttggtcatcactgctacttgagtgttatttttgtgtcttcagattcctatcaaacaggagtgaacctttttaacaggttatggtgacattttttcagctccttccattttgtcctatttccagtgtcagcacaattagcttgacttgggggtttctgtctggttttaaaaacctttcaatggagtgcacgtctgtgaacaataaaggaacgaggacacggggctgggaaaacagcatacctcatctggaatggaaatctatcgtctctcgcccttgcacgggtcacgattatacaccttcgtgacctttagcgggcttacatatgtatctttttgtgttccgcaggctatgaccacctgctgtatgtacaatatgtgcttgttacatttgtacaccatctcccttctagaatttaaagacctagctattacatcttgtttactcaatatcattcccccattaaggaaaaaaaaaaacctacatgaactgaacatgccatgtttcaatctggccccagtggctttttctctgaaagcaaacgtgtgtcttttacaccagggctttctccccaccccagggggtgtcttccatccttttgtggctcagttgaaggcgaaaagggctccaaaccactaactaaccagaggagagccccttcttccacctccagggagaatttcagatttaatttgtccgaagatagcgtgctctcttcttactcatttgccatcattacgaggaaaacaaaccaccaccttggcttcaagatcctgggtagaggctcacggtcttttcaaccatctttggcgaggccttgcttccttccactcgagtaagtcgcggcttggggccacggaaaggactgggtgagagcccgcaatgtcgttggaaaaaagcagccctccctgcgccccctcaccagccccaccaccccgctccactcccggggcgaagccgcgagccagcggccccgtatgggcgagacttggcaggtccgcggggcgccttctcgccgccgccggactcggggctccgcagcggccgggcgtcggcgcccgccggccgcggggcttcgcgctgccgccgcccggtcccggagctcccttcccccaccggccgccccctccccctcgcccgcgctcccttttgttcgctcgccgcccgggccgagccgccgccgccgccgccgcccggcccggcggcgaggccgctccaccgcacacgcacacacagaccccggcagcgggaacgcagatgacacgcccgtaacatggaagccgccgccgccgccgctccgacgacagcagcagcagccacagcagcagccgccggcggcgccgcgctgaacaaaggtcatccgagctgcggcccagacgcccgggcttgaccgccgcgaaggccaaccccgggaagggggtgggtgtgcgcctctgggggtgcggggcggcgggaggcggccggggcgaacgaggggcgcagggcagccggacccaggggcgcgggtgggcgccgggcagaggcggggtgcggcccctcgtgcccactcctgcgggccggggtgagcgcgtgaggctcaggcccctgggcctgcccgcagtggcctgtcccaccctggccttggggacagccggccttcgcgccccgccagctggcttggggggccgaggaggaaccgcccgggctaggccccgcaggttacgagacgggggccacgtgagcgcggctctcctactccccccgccggcgccggccgggcacagatgcgtttccagaggcctccgtgccccctctcccactggccctgccttcgccccccgccccctccccagacagccccagttttcttcccccgaggtgaagggatttggacttctccccccaggtgcttgaaagaagagaaggttggaggaggaggaggagactggggggctgctggtggtggtgacagggctgggagagagaggagagggacggaagggaggagggggctgggtggggtgggggtgacagcagagaggagcctggtcaacaagccagcaccactgtgctaggaggccaggccggctctgcagccgacgcatcccgtgtgagcagacacacatagctcgctttcttgggggctctttgtcagccaccaacacagagagcacacactgacacacacgtacacaaagatctgagccaggttgtgggaggtaagtgggggaaggagaaggagggggaaacagtgtctgcggtgggctgtggggtggaggggaggggggatgggccctgaggggctctggggtgcttgcgaggtgagcatttccaaggctgtgtgctcgtggggtggggggacacacgatgaccttctcctcctcaggaagacctaagagggaagagcaaaccccagcgagatcccccctgtgctgatgattttcagggacttgttggcaactcagcgagggttgccatagcttttttatgtagggtgaccagaaccggctgaaactggtttgaggcagatcagctcctgaacacaatgcagtcactgagctactacagtaggatagcagcttcctcccttcatggcagccaaaagcagaggagcttgcaggaaggtaccatccctacacagtatgtgaatgcacacttagacaccacacagcactggtacgtgactaatggagccctaaaagattctgggtagagaagatggaaaaaaaggtgcaggtttgcagggtctgagattacttgggcttttcctgcctttttcttttgcttaagggatggacaaggagctgagatttatgacccttattagagaaaaaaatgtgccttgctagggtggggacacttggttgatgcagtctctctctctctttctcggtgtttataacaaaacaaaaccaaaatgaactgaggggtttgtaatggtagtttgtttgttgctggagaatgctactttgcatgctttttttctcttgcagggtatgttctgtcttgtgctttttcttttagaagctactaaagggtgttggggatgcttctgactattatgaaggccaaaaggtaacaatatcgttctaggaaatgaacataaatgcattccagtgatgctgttagccatacatgctgtcttttttttccttgtaggcctgttgactggggctgcttttaaccctttcctatttgctgagaatgcagccgtgtgacagtaactgaacattggtctaaagtctttccaaaaggtcaaggttcacaaggtgagatacgctgttttgagcatgaatttaaatatttatttgcagatccatttagacacagacggaccgtggattgctacccaggagataaaattgggttcagagtggagaagaaatgctcttaatgttatcccagtttaatgggattagagtgactttatgatggtattgcgatcaaggcgaaatctgaatgccttcattaaatcgcatgtgtctgggcaattgggagagtcaggcctggaaggaagcgagtgtggagaatggtaggcgtcagggccttgtggagaatgtgctgttttgcataagacgaaagcagtacacatgtggcattttcccgatgattataagaaaaggaagggcttcaccaaatcgaggcagcctagccacctttttaggatttgaggagtctgaaggtagatttgccttttgttcattcatcacctttcttttaccttgctctcttgtgttaacctgaaaggtttttcactccgactcaagtggtggaatgtcttttattgattttgggggctgttgacggtgagttcgccattggattctttgtggcatatgtttaatgtggaatactaatgcaataccagggggaagccgggtagtctggcttcatctgtgaaaagatgcctgttaactcaaagctgtactggaatgggtggtagaaaatgtctgatgcctttaaagatcgcagttaggtttgagcaggcattttaatgcaccttccaaaaccagaggttggagaggagaggagagaaggaaggagtgaggagagtagcaaagtgaagaacaaaggctgagggggcttgcaggagaacactcaacattttgccttgggttccttgtgaaaagaactgcaacttccccaaacaggaaaccagcagctccagaatgggatccagtgtgatctcaacaacagatagaactggtcctgcctttctgctggtttttggtaaaagtacagtcaagaggagcccatagaagacatgactgaaaataaaattttcccctacttcgaagtgggcattttgttcctctccgtgttcagcagaataggggcttttcagcagtgccgaggatcttggaattggttaagttgtgtgctggcagttggtgggcaggatatctgcagtgaaggacgtcaagtatgcaagggttttattgttaaaatgtttttcatttggctacagaacatccactatgtgataaaactggcaaaagggaaacaagagtgcatggttagctcaggatactttatggagtatttaatagagataaatgtaatcttggacggatataccagtaaatagcttacatgatggaacaaaattctttacaaatcactgtgctaaaattggttttcaattctccatcatttctgactgccagaggttctgtgtatgagtgtggcaggaatatgcttgcaaagcagatccgaatccacgctgcgcgtggtgtgctgcttctgcgtttctgatgtcaactaaaactcagatggctaatatgataaaccttaattagcttaatacaataagctgttttattatttagtccttcattcttgtcttttgagagtcagtgatttttgtttaactttgacagctaaccccttgccacggctatacagtgcgaatatgttttaaaaaacctcttcgtagggcattgcatgtcatggaatgttctggttttctgtcttggtggtttttagctttgttcctctccctcccccttgaagtctcctgaagatagcatttgttttgcatttagaccaatctttccagctgcaaatgctgctgagggttggagagctggttctctggggcgggagtcatgagctcatcttggattggagcttgtctcaggtgttgatctcatgctgaggtataacaatgtagcaggcccaggcctccctggagtggggagagtcttctgggctggggaatgtggatgtgagtgtgcaggatgagctagggcatgttccttcctgggagagccaggggggacccggtgcctgcagttcctgtcaccgtggagcccagagcccagcccctggtcggcagtgcctgtagcaggctctaaagacgacctgcggtccatcccctccggagcaggaatgtgtgggtttggctgaggagagcacactggaaagaaagtgtaactgggtgttgaacccttcttgtttttatcctttgcctattcaatcattttttccatgttaaagaacactggagccagggtgtttggaactctcagcgcaacctggttcaggagcacacacgctctctttttcttctgttcttttctctcagcgattccctgcccccacccaccttgactcattttaaggaaggtctaggaaggaggttgccaacttgtcagtagaatcttctgatgcctttgactgtgagttagaattttagggtttgtgttctcccatctcccatttatttcttctcttgaaatgttctcttggacttttccgtgcaatacagtcgctctccagttggctttgaacaacctttaccgtatccttggtagaactccagctggctgttaacaggtgaagcagaggttgccaacacaagggaaactgactccattccccatcatgtactcctaatcccaggaccatcagaacaagaactacagacttgataaacattatggaaacacacaccttcgtgttcattttattttagggctgatctttaactaagtcatggttaaagaattagcttaaaaaaatttaaaatttgtgtacaggaaaatttactctgtggtgtaccgttctgtgggttttggcatatgtgtagagtcacttatccaccaccacgggcgaagcagaacaggcccatcacaccagagcatttcctcttgccgcccctctgtagtcagcctctcctacccctggcatccactgtctcactatagggacatggttctctcgtcctagagtttgggctttctagaatgtcagatagcaagatgcgtttcagattcatccatgtttctctgtgtttcgatacttggttctttgtcattgctgagtagtattctgctgtatggatgtaccacagtttattcatttgctgggtgaaggacattagggttgtttccagtttttgctaattgtgagtaaagttgctgtaagcatttgtgtgaaacaggtttttgtgtgaacataagtttttatttctttttgctaaatgcagtcacgtgtcgattaatgcaggggtacattctgagaaatgtatcattagacagtcttgtcattgtgcaaagatagaatgtacttacacaaacctagatggtgtagcctactatagcctactatatacctaggctatatggtgtagcccattgctcctaggttgtaaacctatacagcatcttactgtactgcatactgtaggcagttttaatacagtggtaactatttgtgtttctgaccaatctaaacacataaaaggtacgggaaaaatatggtattataatcttatgggatcactgtgtgtacgtgggccattgttgaccaaaatgttggtttgcgttgcatgactgttcctagaattggggtggctggatcacatggtacatacataagagttagaagtttgaatgaaaataaatccaacttgtaactcacaaaaaagatctagcgttgacagctgcagttaagactcgccgagaaagagatcgtagtgaacattgtctgaagacacacgagagatgatcatgataatagaacactctctaatgggatgacatgctttgtaaccctgaactaatcagaattagccaaaagtggaaacagaaaactgcaagtggtaaaatatcctttatttcctgcagcaattatttttaatctcttcggaaacatttggcagtctaatttttacattcaggttcaataaaacacaaaacaacaatagaatagaaattttggaaagtgataccacagatcattgttgaaatcttagttgtgtgttattaacttctgaattataatttgatttatggactgccaaagtattggggtcattttattaataatatttgaagttattcagcttttatgtatttttaggaactgaaaatgtttaagcaatattcagtgaaagcagtgaagaggggagattttggaagatttgtttggaagattttggaagatctgtttttttttttttttttttttggagttggagtctcgctttgttgtccaggctggagttcagtggcgtgatctcggctcactgcaacctctgtctcccaggttcaagcgattctcctgcctcagcctcctgagtagctgggattacaggtgcgtgccaccatgcctggctaattttttgtatttttagtagagatggggcttcaccatgttggtcaggctggtctcgaactcctgaccttgtgatccgcccgcctcaacctcccagagtgctgggattacaggtgtgagccactgtgcccagcccaggttgttttttttttttttttttttttaaggataaaatagctttcaggattgggaagaacagacaaaggtaatggtggtacagatggaggggagcccaagaagtgggacatgatgttaacctggggattgccttgtcatttaacagatgcttactgagtgtttaagcactgggcattgtgctaagcacaggagtgcagagggaaaagggccccagggagaaaaatctagtggaaggagcccccagaagctatgataggaatgtgaataggccgcctcatgccaagcgtccacagaggagctgtgaaagactggtaagaatatgtgaggcagtcagagcctgggagagcatctaagtccatgcagcacacgtggaaaggtctggggagagcttggtgtttcgagtggggtgtgggtgtgcgaggggatggagctggaaggcagttgagggtcacctgatgaggccttttggtgcagtgccttgaggatggacttctgtgtaggcagaaaagacggacctttcgttacaaaggtcctgtggcagccccatggaggttggaatagaggctgtacaggctggaggtagggaggccaaagagggaaccggcaatccaggagagaaaggatgagggtctttcatcccaggtgttgtttgtggggatggagtggtaggtgggggctgcttcaggggccaggtagtgcctgattggaggagtaaggctgcttcttaggtggctgtctgggggttgcttggagactgggtgttctgtctttgagatagcaaattccgaaggcagaatagatttggaagagtggaggtggagggacttgatacagtgagttcagttttgggctccaattgcctctggctctgtgagtctggaatttaggagggttgcttgggctggaggtcaagattggtagtaatgaacataaaacagagaggatagaagaaaggtgttttaaaaggggttgggtttgggtcccctaagatagtggcttacgtagtaaaaaccataaacgaagcggcaggggtggctgaagaacttagaacctgtgctttagcaagttggagggcagaagattcccaggaaggtagaaaatgtagctaaaacctgcagatgctgcagtaggtgatggcactttacgtctgttatcccatttttctgatttttaaaccttttcttagaggtggggtcctgctatgttgcccagactggactcaaactagctggacttgaactccttggctcaagggatcctcctgcctcggcttcccaagcagccaagtagctggcactataggcatgcaccaccgcagcagctattatgttacctcatttgataccgaaatgatgagaggagctgtacatgtttttccctgtggtaccagtggggaaacagacagagaccctcccagctcgtaagtggaagtggaaacaggatttgaaacatgctccttctcactgtgctgttctgccttgggggagcacagttggtggactgaggggtgagcatggaagctgtttcagggtgtggaggtgcccagagagggcacagcaggtgctaaacagcaaagacactggcgccgttcacgttggaggtgatagctgatgactgccagcgtgagaatatgcagtggagaagtttgaggtacactcagggcctttgtatttagccagattttcctgattgtagtcagcacagagagcagggcatctgtatttgcaccagagacatctctagaaatagcatgttgaaaagacttattttattgggcactggggtgaggatacagattggaggggagaagggctagaaagatgtatttgttttatgtattctttgaaaaggctgagaaaatcaaagcaaattgaaagtggtgccgagaagaatcttttgttccaacaataaataaacacagtttaaagaattctttgaatcatcttctacggcaggaagttctatattctggctgttttataatgagggagagcaaattctgtttaatctaaatctggagactgaaataagtaatttttagacagacgcagagcggcttttttagctgtctcacatattccttatgaaggatcactctttaaggatggtcttcaggggccccaaatgcagattttgtattcttctgttttcagtcagttattattacagctttacataattagagcttttagacatcttgagtgatccgtagagacctaaagataaaatcagggtgttgtggttcttgaactgttttcttaccatcagcctttgcattttgggacacaaactcctcctttccccaaggctgactcccggggctagtaatgggtattgattttatcattttcttttgtgaggaacaaattctttctagggatttcaatagtaagaattagatagttgaaaaacctaaaaaggttagaaaattcaaagccctctgttttaaaggaccccatagctggaagtacttcacacatttgtagttatctcattttctacagtgagcccacattggagggtggggccatcaggtaaccaatagcaggtttagaactggaacccagcactatagtcctagcccaagaccgcattcatcattaccttctctctgccttccaacatttatctttttttttttttttttttgagaccgagttttgctgtgtcgctcaggctggagtacagtggcgtgatctcggctcactgcaacctccgccttccgggttcaagcgatcctcctgcctcagcctcctgagtagctgggattacaggcatgtgccaccacgcccggctaatttttgtatttttagtagagatggggtttcaccatgttagccaggatggtctcaatctcctgaccctgtggtctgcccaccttggcctcccaaagtgttgggattacaggcgtgagccaacacacccggcctaaaatttatcttatgttttatttttttgaggcagggtctcactgtgtcacccagactggagtgcagtgctgcgatctttgctcactgcagccttaacccccagggctcaagtgatcctcctaccttggcctcccacctcagcctcctgagtaggtgggaccacaggcacatgccaccacgcccggctaattttgtttattttttgtagagaagggatctctctatgttgcccaggctggtctcaaacacctgtgctcaagtgatctgccttccttgacctcccaaagtgctgagatcagaggcatgagccactgcacccaactatgttttgatggtatttaatcctcctcctatttataatctttatgtgaacctgaaaacacgatttgattaagttaagctttaccgaggtacttgttgagaagctggtctttgatgattttgctgatttttttttttgttttttctgggatgaagtcttgctctgtcgcccatactggagtgcaatggcgcaatcttggctcactgcaacctctgcctcctgggttcaagcagttctcctgcctcagcctcccaaatagctggtattaaaggcgcctgccaccatgcctggctcattaattttttgtagttttagtagagacggggtaacaccatgtctctatctcctgacctcaggtgatccacccacctcggcctcctaaattacaggggtgagccactgcacctggccagttttgctgatttaacctagcaagaatgggagaggtaatttgaaaactgattttactttgtgttctggtgaaatctgagtgataaaggccacggagattttcacttgcctttgcccagctctcaatgatataaacctgattgcctgtcagtgatgtaaacctgtgttttgccacttactagctgcgggaccttgaacaggttatgtaaattctaaaccatacgtttcctgagggttgttaggaggattaaatgcatatataaagtgtttagcagaatatgtggtgagcccttcctacaatcttagctgttgttttgtggtctttggtctctgttttgggagagtagccttagtcccaggactttttttttctttcttggagggtattgtctcctgtcctgccttacctcattggcaagtatatttgtttttgaccatgaaaacagactgtgtgtctcctccttgtcgctagagttttagttacagctgccctatatcaggttaaaagtgggtgaagtagacacaagggtagtgtatttgttcctacttggctctactttcatttgtggttggagaatcttgtctgaattttgtatttatttatttatattttattctattattttttttgagagatagttttgctcttgttgcccaggttggagtgcaatggcgcgatctcgcctcatcgcaacccctgcctcccaggttcaagcgattcttctgcctcagcctcctgtgtagctggggttacaggcgcccaccaccatgcacaactaatttttgtttttttagtagagactgggtttcaccatgtcaggctggtcttgaactcctgacctcaggcgatccacccgccttggcctcctacagtgctgggattacaggcgtgagccactgcgtctggcctgaattttgtatttgtaatctagtacttgaacatttttttgcttctggaaaaattttccactgagtggctgtactttaggttgtctgtgggtgcaatttacgttgaccaaagtttaaaacaaaacaaaacttgatggtgaaaatatgccaggttagcaaaagcctatattctgaccctttcccccggcacttcgcttcccatgtttgtttgaccatgcctagatacttatattctgcacactgggatttgggggtgatagaagggtgagtggagaaggatctatgaataattattttatttctggaactactctgttcagtagtgtggtagccactagccacatatgactactgagcacttgaaatatggcaaatcctaattgaaataagctgtaagtataagatacatatcaggttttgaagatgtaatgaaaaaaaacagaatatcttgttttttatattgattacatgttgaattcataacattttggctatttcacctttcccccccctttttttctctttttcaaaaaattaaaacttttttttcctggagatgagtgtcttgctgtgttgcccaggctggtctcaaacttctggactcaagtgatctttcccactcaggctcccaaagtgttgggattatgggcatgagccactgtgccaagtcctttttttcctatttttaaaatatgactgctagaaaatgtaaaactagatatgtggcttttgttatacttcccttggacaatgctgttctggaatggtgggtggacattcaaataaatttagcaatgaaatttttctggtgccctgcagtattcatatttgttgataacattgagtctctccttctgttaacaaagatagtgctagtttggcccctttttctctctcaggtgttcctaattcacctgtctccatcacaggtctacacagccacactgggttggtgtttgcttcattatggaaagggaaccagtattaatcacaggtttgctgtgtgctggatgccttatacttactgtcccctgtaaggttatacttcacattcctgttgagactcacagcttgagtgaccagctgaagaatgctccactagtaggtgatcgaccctagatttgaaccagggtctggccagctttgaaattcttttctgtttctaccactttgtacatcttttccgtgtaaaagctccagtttgctgctggtgttccgtacctctcgggagcccttgtcgtctagagtgtatttctcacactttagtttgcatacaaatcacttggggatctttttttttttttttttttgagacagagtctcgctctgtcgcccaggctggagtgcagtggcgcgatctcgactcactgcaagctctgcctcccgggttcatgccattctcctgcctcagcctcccgagtagctgggactacaggcccccgccaccatgcccggctattttttttgtattttttagtagagacggggtttcaccgtgttagccaggatggtctcgatctcctgacctcgtgatccgcctgcctcggcctcccaaagtgctgggattacaggcgtgagccaccgcgcccagcctcacttggggatcttgttaaaatacagataatgattctgtagggctgggatgggcccaagactgcatttctaagtagcctcctggtgccattgaccctgctggttcatggcctgtcacgctctgagtagcaaggctctctgctcctcccttggtctcggacctgcttcctctctgcttccaaagcgataagattctccaggccttccctgacaccacagggacttaccctctagcttggcatgtgatgctagcagggagcagacatgggggccaggactgttttttttgatcacagatgcccagttctggcatgaatgctaatttctgagtactcaggatctgaatggatccggggtttattcctctccctacatttctgcattactccacctttgatattgtgatccctttgacacttgtagtcggatcagatggaaaagaattttaatattgtgattgcatccaggagatggggcaaaggtgcctgttatgacttcatgaagactgtcaggccttaggtcagcacagacaagtgactttgggcctagtgcaatggctcacgcctgtaatcccagcacttcgggaggctgaggctgaggtgggaagatcacttgaggccaagagtttgagaccagcctgggcaacatggtaaaccccgtctctacaagaaataaaattagctggctgtggtggtgtgcacccgtagtcctagctacttaggagactgaggcaagaggatcacttgagcccaggagttagaggctgcagtgagctaggatcacactactgcacttcagcctgggcaacagagtgagaccttgtctcgagaaaaaaaaaaagcagaaaagaaaagtgactgtgtttggttcacggattcagtatccagtgagagatgcggactgaaggcagttagcttgccaccgtttctgcccccttgcctgatgaggaatagaggtgacttgggagttttccttagaatgggggttagaagagccacttcatgtagcagtgttggaaaacggctagtcacatcacctctccagcacgtgatggagacagcctccattgggtccttgggtgaagctgtcctggggaaggttgccttggggcctggaccaaacaggagattgagttgcaggaaggagttcactgtgttatatgtttaaactcttatgtaagagactggagaattttacttagtgggtttattttactttgggaaggcacattgattaaatcagctatagcaataaataaatgtctgttgcatgagttcagttttaacttccccatctctctacaagaaagtctgccatttcacagaaattctagttgaaatttagatcttactggacatctgggcactgagagttctgtgttatatgaatctggcacattgaattggatttattaatcgttggctaagtctgtcaactccctgtgctgtgcagaatcctgtgcctggcatggtgacagtatcggctctgggcctgtgagtgtggcccttatggaatcacagattgttggaaggggagtggagtggggtttggaagaatagggacaaggttgggtgtgtcctaaggatggtcaaggctgtggggccagccctggattaaggaagtggaactatggaagttagtcacagttggggggtgagtttagaatgtagctagggcagaatgttgccatagcatgccaagagtcagggtaagttaaagagtcagagactgggcaggttggctgggcatggtggctcacacctgtaatcccagcactttgggaggctgaggtgggcagatcaatagaggtcaggagttcgagaccagtctggccaacatggtgaaacccagtctctactaaaatgacaaaaagtagctaggtgtggtggcatgcacctgtattcccagctactcgggaggctgagtcaggagaatcacttgaacctgggaggcaggagttgcagtgagctgagattgagccactgcactccagcctgggcgacagagcaagactccatctcaaaaaacaaaaaaaacaaaacgaaaaaaaaccactgggcaggtagaccttcagaggacatcagaaggccaaagatgatgggcacaagtccggtgaaataggcaaggacgggaacacatacagatgcaggacagatggccatgcacaagtgcatgatggcaggagtcggcagtccgaaagatctgtgatctgtggtgctgataggagaggcccccctgaaggactaccatggaatgaatgagtgagttggtgaatgaatgaagaccatatgagctaccagttccagtgatcactggataactgcagcctgaagtggagccaacttcacccagccttcacgtggagtggtgactaagggcccccgtggcccaggtggctgaggtgaggggtgtgcattgggagaggcagtagctccttgcctggcaaagttcatacgagaaggctctgaaagactagattgtttagagtttgcatgatttgtaggacatgatcaagctatgcagtaagaaaggcagctcattctgaggcccagggttagcagctgtcaggaggacctgacatcaagaactcaagcgtcatcttgcactaagcttactccgcattcttttgaggaccacatgcccttggttgtctcttttgcttcccccttagtagaacttctttcctatacacatgggcaaacaatgctgttccacagctcctgtgtctccatgtcctcattttaaatactagtggacatcacctgtagtcctctgtcctacttgcagttctcaaggccaaaaatctcactgggcctggtctaatcagctgtggagggcaggttgttcttgttcttagccctaaataggtgacagtagcctttagtgaaggtggccagtggggttgtgaggcacgcccggcggggcctgctacagtaggagccatagaggcaaatctgatacattagcgtctcttgtgtctggccaaggcgttcctcattgtaaaatgcgatgctttctagagaatgtcattgtgagaaaaaaatctttgttcagacattggcaaaacaattaattaaatgagtagagtcaatgagaagtgagctatgcatgtttattgggtaagtgtaaaagctggcggcaaaaagacaatgcaagtggcgactgcctttttcattttttttgagagggagtctcgctctgttgcccaggctggagtgcagtggcacagtctcggctcgctgcagcctccgcctcccggattctcttgcctcagcctcccaagtagctgagattacaggtgcttgccaccacgcccggctaatatttttgtatttttagtagagacagggtttcatcatgttggctgggctggtctcgaactcctgacattgtgagccacctgccccagcctcccaaagcgctgggattacaggagtgagccaccatgcccggctgttggcagctgcctttttctatagcatgtactcttgttcatacattaaaaacaacactgttggccaacgattgtttttttcagtggtaggggtggattttccttcgttcattccgtctttcgtctgttctccttacagccttgagcacagagttgttacttgactgtactgttttgggggtgtagtttgtagctttgccttaattcattattgtgagaaaggaacttacctgtaagtaaattggatttgtgtccttaacttttaacactgttttctgacatgcttacgtggattctaggggcaaggacaggatgaatacaaaaaagggaaggattggatccaaatagaggttctgaaaaagatgttttggtggaagtgtgaaaaaagagagggatggagttggacaaaaaagaaaggtgatccagagagggaatggtgggaacacttaccaggagaagaaagtgtgcagaggccgctgagcatagctgtctggctcgatagacacttgtttgttaagaaatgatgaaaagcaagagttgcagtgaagatgagctaacgggtgacttggtcaccttggtagaatgcagctagggaaactctgtttatttggagccattttgagatctaagtcgttaggcctcagagcagtgccgaaaagtgggtcatcttattatcccactttattcctgaggaacttgaggctcagagaggttaatggatatgccaaggctaagttggagttggcatttgtacccggatctttctcaccctgaagtctgtaacctttaccgttctttaatacaattgccagagtggatgagctcttttgagtgtggaaagtgaatcttttttctgttttctctttactcagaaattgcaaaaacagtatgtctagcttgcagtattagctccataaatgcatagcaaatgcttgttgtctgaataattgttggactgagacactgaaggtaggaaatttggccaaatgactggtggaattgttcaaacctaaagttcagggtcttttataggtacatagatgtatatttgagccctctcataggcgcgcgcgcacgcgcgcgcgtctgtgtgtgtgtgtgtatgtttggggcccctcagaggtatatatctggcaaaatgcaagtctggtttatctggccaatgttaattttggaaaagattaagcacatagtttagcacttgatgtaatactgtgattaggctttactgcttttgatttagatggctcagaattttaaaaaaattctcttctaatcttgaatgttaggatattactgacttcacttgaagtttcaaattgagctataacatatttggttacacagtggtctaatttcaggtcactgaagataggaagaatctgttctgcatctgttttgcttcttttttctttttttcttttttttttttgagacagagtctcgctctgtcgcccgggctggagtgcagtggcgtgatctcggttcactgcagcctctgcctccttcaagtgattcactgcaacctctgcctcctgggttcaagtgattctcctgcctcagccttccaagtagctgggattacaggggcctgccaccaagcccagctaattttttgtatttttagtagagacgacggggtttcaccatgttggccaggctggtcttgaactcctgacctcagctgatcctgcctcggcctcccaaagtgctgggattacacgcatgagccactgcacccagcctgttttacttcttaaaagaccttgctgggttgtgtgtctgcaaggggcacgcaagttgaggatgctgtttatcatattgcatgtggttgttgtaagttttgaggacatctgtcttgttatcacctatggaagttaagtcacttggttagaattttgtaacttctaaaaggcagagctcacctcagtttgtcttatagaaagcccatgctttaaatcacctacagtgtcctgtggtttataggtgtcatttttatagctaattggtgtcaggctcagatatctttgacgttcaaagccactgctaggtcaaccagtatttctcctattgtcaagagccatgaggcatttcttgcttcaggagactgatgtggctgtagctactcaatgtccataaacattaagagatcttgtgctgcttttattcattgtttttcctttacagtatctatgtgtgcctacttgtgtgcattttacaatacaaatagcttctttttggaaatacttccagaaccatcaaacaaggttttttattttttattttttgagacagggtcttgctccgtctcttaggctggggtacagtggtgcaatctcagcttactgcaacctctgcctcccgggctcaggtgatcctcccacctcagcctcctgcgtagcttgggactattaggtgcacgctgccatgtgtggctgatttttcagtttttagtagagacggggtttcacaatgttgcccaagctgggaacatagtttttataatcatttctatggcatgaaactttaggtggagtctctttagaaatacttcattcttgctctccctccatatttggagatttgttaacttgttctttccttaagtcatcttgggttgatgcagaggtgtgtctggagaggaagtactgccaagaaaagcatggagttagagttgtcaggaaaatgggctggaagcacctccctcacatgataactataggatgcatgcctgtttcctaaaaccagttcctaaagagaatatatttttaagaggcagggtcttgctctgttgcctaggctggagtgcagtgatctgatctccgctcatggcagccttgaacctgtaggctcaagcaatcctcctgtctcaacctcccaagtagctgagactgcaggtgtgcaacaccattcctggctaattattatttttattttttgtagagatggggtcttgctttgttgcttgggctggtctcaaactcctggcctcaagtgatcctcccatcttgacctcttaaagtgttgtgattagaggtgtgagacaccatccccagtctccaaagagaataatttcttaaacccagctttacgtttgtcccagagatatctcatcctgaaagattccagcatcagataagcttgggtaatgctaaagccctggattcccactttgaagattcacattggaggttcatgttagctctggaaagttctgagaagccttgagaaaagaaatcaggctgtgtgtgtgtgtatttaatctaacatttctcaaattcctagactgtagaaccccttcttcccctttcttgggtggaaagtttagtaacaggaggaacattcctgggtaaatattcttccaagctgttggtgtctttgatgaaattaatgaaaactgagagagggccttgtgaggaagactcagagggtttcatccatcctcttctcaatataacataatgattgatatactgatgtaattaattctctttctctgtgtttttttcctgttttctgtttactccaggaagagaacttttaaatgaattgatttttaaagtcaatgatggtgggcattctgtgagtgatcactgtgggggatactttcagacatattttttagataaaaggactgtgtttcagaattccaaaagtgttttaagtgaatttggtatctagtgagaattgtttcatgattagccagtggcatcattttggaggatgagaacagctgtgatacctgtgcagggagcctatttgtccactccctcaattaatgggagagggccagggtcagggtcggctggaacagagaattgctactgtctgtatactaggacatggctctggcatggatgacctaagcaagcaggtttattatgattccagtaggattaagtattggtgggaggaggatagggtgatatagggaaggcatccctgctcacataaagcagagttttttaacctcagcaccgttagcatttggggctggataattcttggttgtggggagggctgtcctgtgcgtcttaggatgtttagcagcatccttgacctctacccactatatgccaatagcatgcctcctcccccaagttagaacaaccaaaatgtctctggacattgctaaatataattggtgataggtcatcccagtggagagccactgacttgaagccttgtagtaagaacaatacttcaaaacttcaggggatgaaaattgcaaaagaaagacctctgttgagggaagcaagccagtcagcctcgtggacctgtgaaatccccagagaagtaggttaccttcagctactagttttctcttccatgttttctaatgctggaagtctcaaaaagtgtttgcaaatattaatattttaaatttagtgcttaaaatttaaaaacttggccgggcacagtggcttacgcctgtaatcccagcactttgggaggccaaggcaggcagatcacctgaggtcaggagttcaagaccagcctggccaatatggtgaaaccctgtctctactaaaaaatacaaaaattagctgggtgcgctgggcgcgctcctgtaatcccagctacttggagggctgaggcaggagaagcgcttgaacctggaaggtggaggttgcagtgagccaagattgtaccactgtactctagcctgggtgacaaagtgagactccgtctcaaaattttttttaattgacaaagtaaatgagaagaagcagcgactattgctgatagttcggagcatttcagggacaaaagcttctgtgcaggatttaggacctaacgcacaaaaatgtggaaggcttattcaggtgacaaaggaaaattgctttgaagttattctttttctatactcaaaacatcacttctaatgtaggaaatcaatattttgaagctacagtttttagagatgctactaaaaagcatggtacttacaaaatgccaaaggaatgcttctaaagttggtatgagttttcctcccaaaccaggaatcccttgttactagtattcacacagataagtaacttcttagttttgaaatattaaaattcatcaaacatgcttcattaagggaaaaaaaggcagtttgtatctaaacagtaaagaaatttataaattttttcttgttttctcattgtgaagctatttgaataacccgtttcaagcaaaagttatcatggattttcctgaggtttattaaaagtgacaggtttagcctagaccgtttcagtatttctataaactcactgatgaatcagtaagctaccagtacaagggtttttttttttttttcttttttttttgagatggagtttcactcttgttacctaggttagagttcagtggcatgatcacggctcaccgcagcctccgcctcctgggttcaagcgattctcttgcctcagccttccgagtagctgggattgcaggcatgtgccaccacgcctggctaatttttatatttttagtagagacggagtttctgcatgttggtcaggctggtctcgaactcccgacctcaggtgatctgcccgcttcagcctcccaaagtgctggaattacaggcatgagccacagcgctcagctgggtgtttttttgtttttgttttttttagttaaaagaacgtatagccagtggaaaacagagcttgtacaaaagtacctttgacagaattgccaggattgatgattgtaggaaatttattattatcttcatttacagatatacattatgaccttcaaagtttgtaggaaatttaaatttccacctcctgccttttgtgcacataatgagattttgaaaatgcaaacctacacttatgtggatgaattttgaaaaaattctttttagtgttagaagaatacagttggactgggcatggtggctcatgcctgtaatcccagcattttgggaggccgaggagggtgaattacttgaggtcagtagattgagagcagcctggccaacatggtgaaactccgtttctacaaaaacacaaaaattagctgggtgtggtggcaggcacctgtaatcccagctactcaggaggctgaggcaggagaatcactggaacccgggaggcggaggttgcagtgagccgaaatcgcatcatcgtactccagcctgggtcgagacaatgtctcaaaaaaaaaaaaaagttggaagtagagagtaaaagctcaaaatttccctcaccccgtttcatagccttttaaagctgggggtcaggatctgtggtggcatccttctgagcctttctatgaattttactttatttctttatttttttttgagacggagtctcgttctgtcatcgcagctggtgtgtagtggcgccatctcagctctctgcagcctccgcctcccaggttcaagcaattctcctgcctcagcctcctgagtagctgggactacaggtgtgtgccaccatgcccagctaatttttgtatttttttttagtagagacagggtttcaccacattggccaggctggtctcgaactcctggcctcaagtgatcctcctgccttggcctcccaaagtgctgagattacaggcgtgagccactgcacctggtcctttcattcaattttatgtatctaggaattttacgtgtctatatgcttaaatataaaaacgtatgcttattttattttaaggtagtgtatgtattgttttgtgacctgatttttttttttaacttaatgttcaatcttgattgttccacttcagtacttacagtgactctaacctcacttttaatcagggcatggtactccataaaaaaggaatgtgccaaaaacgatgtgaatgcacttaacactgttgaactgtgcatttagatatggttaccatggtaaattttatgctatgtgtatttttaccacaatctgaaaaataaaggatgtaccatgattgttacataatcgtttatgtaccattgtcatggatatgtacatgatttctagtgctttgctatgttacaaataactgtgcaccaaacgtttttgtacatgtgatcctcaatttgggagattttatttctgtggtttaaaacattgcctctatgccctgagatcaatgacatgtcatccagatatagcacatagaggccttgcccatttttcttcaggaataactaggggaagagtaggtttttttctatatggatttttagaatttattggttgtgggtatgctattagagagagactatcctgtagtaatctccttagttggagatgttctttcattagcttgtaatctcagtaggttcctgggcaagccctgcccagagctcattttcacttgtcctttaccagatacctgcagggatggtcagctctggtaaattacctggttcctaaggcttttctggcggtgaaatgaagaacaccctgagggaacacaggcagatgatggagttctgatagctttgttaggtggcttattccgcaacacagttgcgtaggggcccgaggggccctgggcagaacccaggccttctggtctcctgcagtggtttggtatttagtaaactcttctgtgtttgaatttttctgtgcagaaccacggttttgaaatgctaacctgagggcagtcttgccctttaaatgtacattttgttttctgaagagaaacatggggcaggtatttttggaggctttatatattcagtaagtagatattccactgttcaagaaccttcacgctcacagcaagtcagcacaattctgtttttgacttttgagcaagaaaaggaaaacactggtcatgtgaattggctggagttgcttaatttggttattgttcgatgcatatttatttccggggtgatgcagccctctgcctctcatgtgtttggggtcagttgggtggtctggtgggagaagaggggaagaaagaaaatgggtagtctgctgcatcattgtgtgacctgtcatcttccacctgggcttaacacaaaaccacaaaccaaaacagaacccccacgctcacaggagggaccgtcatgcaggactaggcagtattgctggttgtggttagtgtcctcttcccaatcctagggcctatctgaaggctggagaccacaccgagtcggggcgagctgcggtcagtgccacttcctgaggaagtgactgaggcagccgggctttgtgaaagctgctttatccctgcgtcccccggggcagaggggagcagaaataatatgccaatggcttttcctgcggaattaaaggagccctccccaaacatctttttattagattagagctttgcgttcataaattatttctaactactctcctattctagttctcagaaaatggaaggagcagaacttcatatctttaaggattttctgggattatgctctaatctaaattatgaaaacttgatatattttaaaggaatttactcagttgaataataaaccacaatcatcatgagtattttattttatataggcagacagtataaaacttttagatagttcattaataaaggaaaattgaacattttggaactttcatgtgattttagcaaactgcaaatcagtcaaatattaaatccgttaactccatgtgaaagtaaagaatcacttagaatgtacaatgtcacgttttctaattttataaatataaaatcagatatttttcttgtaagttttcttttcagaaatgaaaatatggccgggtgcagtggctcacgcctgtaatcccaacattttgggaggccaaggtgggtggatcacctgaggtcaggaggtcaagagcagcctggccaacatggtgaaaccctgtctctacaaaaatacaaaaaattagctgggtgtggtgacgcacgcctgtaaccccagctacttgggaggctgaggcaggagaatcgcttcaacctgggaggcggaggttgcagtgagccaagatcacaccattgcactccagcctgagcgacaagagcgaaactctgtctccaaggaaggcaaaaaaaaaattatatatatatatatatatatatatataaattatatatatatattttatatatatataaaattaatatatataatttatatatatataaaatatatataatttatatatataaaaaattatatatataaattatatatataatttatatatatataatttatatatatataatatatattatatatatatattttatatatatatatatatatataattcatacaggctgagtatcccttatccgtaatgcttgggaccagcatttaggtttttttgttccagattttggaatatttacattatactcaccagttgaacatctcaaatctaaaaatccaaaatttgaaagttccaaatgagcatttgagtgttaatttggcactcaaaaagtttaggattttggagcatttcagatttagaatattcagtgtacttctcccccagacctcttacaaatcatgttttctctttccgtgattttctttctctctcttttccaagcattttagatatatatgcctaagtagttaacacatagagttaaaaagctctgaagttagctagatagaggtgaataaaccctccctgggcacttcctgtttccaggtaactgccacaaataaagagggatgcttgttccaggtgtacctgaaatttatcaggttgtctttcttgagccatataacacatatccatgtacttgtactttttctgtaaaatacagttagtaagaaaacagcacttatattaacttgtactttctacttaaaaggatatttttccagaagtggagtgggtgtttaagaaatacaaactcttggccgggtgtggtggctcatgcctgtaatcccagcactttgggaggctgagacaggcggatcacttgatgtcaggagtttgagaccagcctggccaatatggtgaaaccccctctctactaaaaatacaaaaattatcccagctactcgggaggctgaggcagaagactctcttgaacccagggggtggaggttgcggtgagccgaggtcacgccactgcactccagcctgggtgacagactgtgattccatctcaaaacaaaaaacaaaaaaaccccaaaatttggctaggcgcggtggctcacgcctgtaatcccagcactttgggaggccaaggcaggatcacctgaggtcaggagtttgagaccaacctggccaacatggtgaaaccctgcctctactaaaaataaaaaattagccaggtgtggtggcatgcacctgtatagtcccagctactcaggaggctgaggcaggagaatcgtttgaacccgggaggtggaggttgtggtaagccaagatcgcgccactgcactccagcctaggagatggtgagactgtgtttaaaaaagaaaaaaaaaaattagctgggcatggtggcacacacttgtaatcccagctacttgggaggctgaggcaggagaatcacttgaactcaggaggtgggggttgcagtgagccgagattttgacactgcactccagcctggggaggaaaaatatatatatatatgagttatatatatatacacacacatacatatatatatatacacgtatatatataactcttaagtaaaattaagtaccctggttagtacttaactgttacaactgggtttatctaaatatttgctcttcttctacccagagggccattattgtgtctttgactccagtttgatccttattctttttttgatataaaggtggttccatcattatctccttaatgacttctgggtttcttttttttaaaccttaaactgtacctggtatctccttgccaaaatcccaatgaccccgcattgctctgttacaggaattcttttccctctgtccttgcactaactgccgcccatttttttttttttttgagaaatttaaaaagtaaggaaggatatgtgaattacttattaagtactacctgtattctcaccagtcactgtaatatgactgtatgcccagtctgttccctctccccttctttttctccatcctgccctctagcttcttcttcctcctcccccactccacctcttcctcttcctcagacctctttacctcttcttcccggtaggtaaatggttcctctccttcctttttttttttccttcttaaactatttttttagatatggggcctctgtcatccaggctggggtgcagtgatgctatcatagctcactgcagccttgacctcccgggttcaagtgatcctcccacctcagcctcctgagtagcaggaactacacgcatgccaccgtatcgggctaactgggttcaagcgattctcctgcctcagcctcccgagtagctaggactacacacgtgcgccaccatgcctggctaattttttgtaatttttagtagagacgggatttcaccatgttagccaggatggtctcgatcccttgatcttgtgatctgcctgcctcggcctcccaaagtgctgggatcacaggcatgagccactgcgcccggcctctctctttcctcttaaaaggaacctggaggcctggcctggtggctcacgcctgtaatcccagcactttcggaggctgaggtgggtagatcacttgaggccaggagtttgagacaagcttggccaacatggcgaaaccctatctctactaaaaatacaaaaattagctgggcatcatggcgcatgcctgtcatcccagctacttgggtggctgaggcatgagaatcacctgaacccaggaggcagaggttgcagtgagccgagatcatgtcactgcactccagtctgggtgacacagagaaactgtctcaaaaatgaatgaatgaaacctgggacgcttgtacttacgaacatttaaaaaaatcaggtaaaatggatcatgctttgtaagtgtgattaaaaagactttttactgttagtgttggtctgtgttcttgcatgtgttttaagctttttacctaaaataggaatttatttataatgagtttgactgaggatctcttagaaagttggttaaccttctctgttctgaccagtcctcgttttgttgttgaacgtgccatcctctttcccaccctggtgtgatactaagtgccagcctatgccagtctgccctccctcctaaagctggataaactcctgggttcacatttaccttgagttgggggaagtagtttattatttggaatagaacatttccttcaggccaagatcctttaggaaaatgaaagtaaaagtgctaaaataccagcccccactcacccataagcaaggctggtttactgtgaaatcaagaatatatagtatcttgatggatagagtgacagaaggtattcttggagacattttaaacataaaaattatgatttaagcgcatgagtaaattattttaatgtctccatttctctcatctttcattttatcgtgagttaaacatatatcttcaggattttaaagcaaaagagtgaaacacaacactgtgtctcaaagggttttttcttttttgtttaagagttatttttgtaagaatttatgaagaaaggttgttcttgtggttacttgctttggctttaaactctctttggagaatatcacaatctaaatttaaagggtactcttgaaaacactgttgaattgacatggagtgtctgatttgatggaagccccgtagacctggaacggtatctgggatatgttactgagtgtgaaaatgcctatatatgtgtatgtatatttatgcttatgtatgcatttagaaatctgtatcccaaatgttaccagttgatctctggtgaggaggcctcccagaggcctttggtttctgttgcttatacttctgggtgttagagcattggcaaagagcacgtaatacccataataaattccaggaatgaaagaggtacatttgaacaaagggcagcctgtcgtctaaataaagcgcttcacaacgatgctactttggcattcaagtttgagcaattgtgatgcagaagcaatgttcgtgtagagattttgaatctaagaggttctgttggctgaaggttccccaagtgggggcgtggcagagacaggaggggaacattactgcagtagaactcatacaagagaattcagttttctgctgctggtgggtgaaatgatgagatctgtgactgctgtttctgtagtactctgcaaagaaagtcccaaggaatgcttgtcaattaactgagagcaagtcagttactccagattatcaactcagcaatttctgatttgtactttctttttttttttttttttgagatggagtcttgctctgtcacccaggctggagtgcaatggcgcgatttcagctcactgcagcctcaccctcccaggaccaagcgattctgcctcagcctcccgagtagctgggattacaggcgtgtgccaccgcacccagctaatttttgcatttttagcagaggcggggtttcatgtgttggccaggctggtcttgaactcctgacctcaggtgatctgcctgcctcggcctgccaaagtgctgggattaagggcgttatgtactttaaagaataaaaaaagaataattagaagtgtctgtgagttgatttagaaatcaatgaatctcttgctattattatgttaatagtttgctttagaaatgagataactagttgcctggtgcctggcgtggcggctcacacctgtaatcccagcactttgggaggctgagatgggtggatcgcttgcccagcctgggcaacatggctgtggcgaaaccctgtcactacaaaataccaaatattagccgggtgtggtggctcgtgcctgtaatcccagctcttgggaaggctgaggtggggaggatcgcttgagcctgggaggttgagaccacagtgactcgttatcatgtcactgcacttcaatctgggcgacaaagcaagactctgtctcaaaaaaaaaaaaaaagaaagaaatgagataattgggaagctatgtgaattttggacccacatgcttattatattgatctgttaggactgcttaagagctaacttgtcacctgtgaaatggttggcttgatattttgatatttaaaggtttgccttttgcttctcgtgggtacaagccagagagagcagtggttacatgggggtagaatggtgactcgtttttacctgactgtggatcagctgggtggttcctgaatctcactgggctcattgtggctctttgcttgtcctgtatttactgtctgtggtagtgagatagaagaaccaccatgttcttctggttctagactcaaactacagggagaaggaagagatgtgtctggcatcatttccgtgttggagtaactttgtggtagattgctgtggcctttctttgtggcctgccacttgtcttacattcttcagagcatttatgcacaggagcataaatatatgattttcatcttgccattgaaagtagactttccggccgggcgtggtggctcatgcctgtaatcctagcactttgggaggccaaggtgagcagataacttgaggtcaggagtttgagaccagcccggctaacatggtgaaaccccatctctactgaaaatacaaaaaagttagccgggtgtggtggtatgcacctgcaatcccagctactcagtaagctgaggcaggagaatcgcttgaacctgaggggtggaggttgctgtgagctgagattgcaccactgcactccagcctgggtgataacagcgagactccatctcaaaaaaaaaaaaaaaaaagaaaatagactttccttggtctaggaagagtttaaataatggaataagtgaaaaggatgttcttactaatcaaatccagtaaaccatggctcgttgtgggtattaatttgctaggctttatgaatattgacctccttattcttccctaaggaagtaattaatcatttgccttttgtgtggtcttgatcttccttttatgcaccttgttttcattagacttgaagccatcctcgattttcaggcactacttggcattttacgaacaaactaccctgtcaatttttctagatattttagcatattttctaggttaatgttgttgtctacttggaatatttagagattaatgtacatgaacattttgggagctggacatggtggcctgtagtcccagcacatgggaggctaaggcaggaggatcatgtgagcccaggagtttaagaccagcctgggcaacataggccttgtctctgtagtttagaagaaaaagcattgtggaactcagagaaaagttactatcccacaggaagagccaaaagaaattgtgcctgagccattctccttcttttccccttatccctgtggcacagagccattggcagaggctctaattgggcttttctgtgtaaattgttgctaaagtttgacctaaatcggcttgcccaacttcaattttctgccagggtgccagtcacagatggtattggtggccctccactgagcagtagctgcgtcgtcttctagatgcttgcagcctctgtctcacgtttggctgcaaaggaacagacgcatgtctttaaggcagtatttcccaaaagggcacgtacacctcccagatgctgttagggaaaagagagtccagaggtcagatagatttgataagtattttatgctctagcccttcttggcgattcaaaatgtgctttaatatattaaagctctcaaaatgggttggggataaagatttggggaactcttgtggcaaagaaaccagtttaaactttgtttaaccatttgaccctaagatctcctttgttcctaatgtctacaaacattctgggagacagtgacggacgggcctgcctgttggagctggctgaggctggctgccagtctatatcgtacgtgtctcttcccagctccaccaggacatcttgttagtagcttgaaatgtatcccagtgggaggatctaagtcacagaaatgggcaaaggctaaaaatcggggctccccacccctcacactccttgttgctaaaggttgctagcctgttgctggtatttatcagcccatttccctaaaggtgtcataaggggtgccagacattagaatacagtgcatttctcaaatcttcactttctttctttctttctttttttttttttgagatggtctcactctgtcgacgaggctgtactgcagtggcatgatcatagctcactggcagccttgagctcctggcctcaaacggtcctcctaccttagcctcccaagtagctgagaccacaggtacatgccaccacacctcactaactttaaatttttaaaatagaaatgaggtctcactctgttgcccaggctggtcttaaactcttggcctcaagcgatcttcccacctcagcctcccaaagtgttgaaattatgggcgtcacccagccagatccttgcttttcagtgcagtgtaactttcttccctgttaaatctagcagtgtttgttttttgttgttgttgtttgttttttaagtaaaatatacataatatttgtcatcttaaccataagtgtacagttcagtgagatgaaatatgttacccatggtaaaagttttccatcaccttcaaaaaaagctctgaaccaaataaataactctcccttctcaccttcctcctgcttgtggtaacttctcttctacttcctgtctcttaatttgcctattctaggcacttcaagtaagtgcagcagtttttatctggccaatctactgtgacccagtcaagccaccacccatgtctgggctgggaaggtggggaaagaggctgctgcacatgcttgggatgtcttcagccatatgcatctgtccatctgttcatccacccatccgtctgtccatccgcccactcagctatctgtttatcaaggtataacaatacagcttttttattcctctccctctgtaacctatttgggccttatttatgtttctcttcttataaaccacctcagatctttctgtagaggtatttattaagtaaaacaacaccaccacatgacggacataaatattgaaaagaccaatcgattggaaggattaatcagtagagggaggtgttttcaggggatttagacaggaggaagatagcctaggctgacaaatggagcagatgaagataaatcggcaaaataagtagggagacaagatccctgtcccatgtgaccatgcatttgaaagcaggcagcccagcgaggtagaggcatgaaaggctgtatggactgcgctcttcaaagggctgtggttttgttctggggtctagtcttaggttgtaagcttttttctcttctctttctgttttttcccccggggcttgaacagactcaaaatactcttagggttggaatttctctttgattctggtcttggttagcaggggtgggggggattgttatgaacatttcattagatgtgtgtgctcttagatatggtcagtttgactgaacagttgctctgtttctgcattaagcacgtaattttgtaagttttgtagctttttggaatataaagtagttgaatacttaaagctccccctgctgccttccctttatttttaacttggactgagcaaggttcttctaaatgcattgaggttggggggaaaaagacctaaaaaagaaaaatacactgaataatactttcacatatacacgaaacctgattttgcaatctaaaatgactgtttttgggttttcaattatggaacattttctgacaaataatagaatttgctgtatttcactgtaaacagttttgagaatgcactaaatgcaacaacaaccttaggattagttatcatgacagattggcattaggaaaaatgatgagtatattttatgttctggaggaatgagacttgaagagcagagcaatttttaagttgtttacatcgagggaagagatgtaaagttaagattggctgggcgcggtggctcacacctgtaatcccagcacttagggagcccgaggcaggcagatcacctgagatcaggagtttgagaccagcctggccaacatggcgaatccccatctttactaaaaatatgaaaattagccaggagtagtggcaggtgcctgtaatcccagctacttaggaggctgaggcaggagaattgcttgaattcagaggcggaggttgcagtgagccgagaccatgctactgcactccaccctgggtgacaaagcagtgggactctgtctcaaaaataaataagtaagtaaataaataaatgaataaagattattacttaactcctttcaacaatttaaaattttttgtcaaagtaatacatgtacatagatcaaaaaaatagtactttacatcataattcccttaggcagtgaatttgaattttttggtttgttctgttatttctaaataatgtgcttacattgctaaacttggacttgttcatttgagatagtacctgctgactgtgtgtggtcagagagaaggtgacagacctggactgtggaggcagaatcctcttgctcactagccacgtgtccttgagcaagacacttaaacttctctgtcttatagaataggaataatcaccaccatcatcataatggctccgaggcctacctttaatgtatgtagggcctggggcaagagtactaatggagaccagatggctaaatatttaaaaggtatatttaaatatttacaaggtatatatgatatgcctaaatatttaaagggttcaaatctacctctgtctatggcctggcccctgtgttcacccaggtccttgcagcctactctccctgaagaccagagtctaacagacagcctcacacttggaccagccctgagccaggccccggagtctgccccggcagcccagcgtgaatgccgcgctagacccgctgatcccaggtgtagtcttggcagctcaagcttcccaggagcctgtctccatctagggtgattttatcgtattccctcacaccttgattctctgatttccaggcacttctaagcacctccccaaaactgtaccatctgtgctggggaaatcagggagcctgtcctgcctagacacccactttttctctggtaccccagggcaggggctgtgacctgcacatacatgccccctgcttccccactgacctgtctttcccagaattc

SEQ ID NO: 44 - DNA, 167116 bp, Homo sapiens
gaattcttttccctctgtccttgcactaactgccgcccatttttttttttttttgagaaatttaaaaagtaaggaaggatatgtgaattacttattaagtactacctgtattctcaccagtcactgtaatatgactgtatgcccagtctgttccctctccccttctttttctccatcctgccctctagcttcttcttcctcctcccccactccacctcttcctcttcctcagacctctttacctcttcttcccggtaggtaaatggttcctctccttcctttttttttttccttcttaaactatttttttagatatggggcctctgtcatccaggctggggtgcagtgatgctatcatagctcactgcagccttgacctcccgggttcaagtgatcctcccacctcagcctcctgagtagcaggaactacacgcatgccaccgtatcgggctaactgggttcaagcgattctcctgcctcagcctcccgagtagctaggactacacacgtgcgccaccatgcctggctaattttttgtaatttttagtagagacgggatttcaccatgttagccaggatggtctcgatcccttgatcttgtgatctgcctgcctcggcctcccaaagtgctgggatcacaggcatgagccactgcgcccggcctctctctttcctcttaaaaggaacctggaggcctggcctggtggctcacgcctgtaatcccagcactttcggaggctgaggtgggtagatcacttgaggccaggagtttgagacaagcttggccaacatggcgaaaccctatctctactaaaaatacaaaaattagctgggcatcatggcgcatgcctgtcatcccagctacttgggtggctgaggcatgagaatcacctgaacccaggaggcagaggttgcagtgagccgagatcatgtcactgcactccagtctgggtgacacagagaaactgtctcaaaaatgaatgaatgaaacctgggacgcttgtacttacgaacatttaaaaaaatcaggtaaaatggatcatgctttgtaagtgtgattaaaaagactttttactgttagtgttggtctgtgttcttgcatgtgttttaagctttttacctaaaataggaatttatttataatgagtttgactgaggatctcttagaaagttggttaaccttctctgttctgaccagtcctcgttttgttgttgaacgtgccatcctctttcccaccctggtgtgatactaagtgccagcctatgccagtctgccctccctcctaaagctggataaactcctgggttcacatttaccttgagttgggggaagtagtttattatttggaatagaacatttccttcaggccaagatcctttaggaaaatgaaagtaaaagtgctaaaataccagcccccactcacccataagcaaggctggtttactgtgaaatcaagaatatatagtatcttgatggatagagtgacagaaggtattcttggagacattttaaacataaaaattatgatttaagcgcatgagtaaattattttaatgtctccatttctctcatctttcattttatcgtgagttaaacatatatcttcaggattttaaagcaaaagagtgaaacacaacactgtgtctcaaagggttttttcttttttgtttaagagttatttttgtaagaatttatgaagaaaggttgttcttgtggttacttgctttggctttaaactctctttggagaatatcacaatctaaatttaaagggtactcttgaaaacactgttgaattgacatggagtgtctgatttgatggaagccccgtagacctggaacggtatctgggatatgttactgagtgtgaaaatgcctatatatgtgtatgtatatttatgcttatgtatgcatttagaaatctgtatcccaaatgttaccagttgatctctggtgaggaggcctcccagaggcctttggtttctgttgcttatacttctgggtgttagagcattggcaaagagcacgtaatacccataataaattccaggaatgaaagaggtacatttgaacaaagggcagcctgtcgtctaaataaagcgcttcacaacgatgctactttggcattcaagtttgagcaattgtgatgcagaagcaatgttcgtgtagagattttgaatctaagaggttctgttggctgaaggttccccaagtgggggcgtggcagagacaggaggggaacattactgcagtagaactcatacaagagaattcagttttctgctgctggtgggtgaaatgatgagatctgtgactgctgtttctgtagtactctgcaaagaaagtcccaaggaatgcttgtcaattaactgagagcaagtcagttactccagattatcaactcagcaatttctgatttgtactttctttttttttttttttttgagatggagtcttgctctgtcacccaggctggagtgcaatggcgcgatttcagctcactgcagcctcaccctcccaggaccaagcgattctgcctcagcctcccgagtagctgggattacaggcgtgtgccaccgcacccagctaatttttgcatttttagcagaggcggggtttcatgtgttggccaggctggtcttgaactcctgacctcaggtgatctgcctgcctcggcctgccaaagtgctgggattaagggcgttatgtactttaaagaataaaaaaagaataattagaagtgtctgtgagttgatttagaaatcaatgaatctcttgctattattatgttaatagtttgctttagaaatgagataactagttgcctggtgcctggcgtggcggctcacacctgtaatcccagcactttgggaggctgagatgggtggatcgcttgcccagcctgggcaacatggctgtggcgaaaccctgtcactacaaaataccaaatattagccgggtgtggtggctcgtgcctgtaatcccagctcttgggaaggctgaggtggggaggatcgcttgagcctgggaggttgagaccacagtgactcgttatcatgtcactgcacttcaatctgggcgacaaagcaagactctgtctcaaaaaaaaaaaaaaagaaagaaatgagataattgggaagctatgtgaattttggacccacatgcttattatattgatctgttaggactgcttaagagctaacttgtcacctgtgaaatggttggcttgatattttgatatttaaaggtttgccttttgcttctcgtgggtacaagccagagagagcagtggttacatgggggtagaatggtgactcgtttttacctgactgtggatcagctgggtggttcctgaatctcactgggctcattgtggctctttgcttgtcctgtatttactgtctgtggtagtgagatagaagaaccaccatgttcttctggttctagactcaaactacagggagaaggaagagatgtgtctggcatcatttccgtgttggagtaactttgtggtagattgctgtggcctttctttgtggcctgccacttgtcttacattcttcagagcatttatgcacaggagcataaatatatgattttcatcttgccattgaaagtagactttccggccgggcgtggtggctcatgcctgtaatcctagcactttgggaggccaaggtgagcagataacttgaggtcaggagtttgagaccagcccggctaacatggtgaaaccccatctctactgaaaatacaaaaaagttagccgggtgtggtggtatgcacctgcaatcccagctactcagtaagctgaggcaggagaatcgcttgaacctgaggggtggaggttgctgtgagctgagattgcaccactgcactccagcctgggtgataacagcgagactccatctcaaaaaaaaaaaaaaaaaagaaaatagactttccttggtctaggaagagtttaaataatggaataagtgaaaaggatgttcttactaatcaaatccagtaaaccatggctcgttgtgggtattaatttgctaggctttatgaatattgacctccttattcttccctaaggaagtaattaatcatttgccttttgtgtggtcttgatcttccttttatgcaccttgttttcattagacttgaagccatcctcgattttcaggcactacttggcattttacgaacaaactaccctgtcaatttttctagatattttagcatattttctaggttaatgttgttgtctacttggaatatttagagattaatgtacatgaacattttgggagctggacatggtggcctgtagtcccagcacatgggaggctaaggcaggaggatcatgtgagcccaggagtttaagaccagcctgggcaacataggccttgtctctgtagtttagaagaaaaagcattgtggaactcagagaaaagttactatcccacaggaagagccaaaagaaattgtgcctgagccattctccttcttttccccttatccctgtggcacagagccattggcagaggctctaattgggcttttctgtgtaaattgttgctaaagtttgacctaaatcggcttgcccaacttcaattttctgccagggtgccagtcacagatggtattggtggccctccactgagcagtagctgcgtcgtcttctagatgcttgcagcctctgtctcacgtttggctgcaaaggaacagacgcatgtctttaaggcagtatttcccaaaagggcacgtacacctcccagatgctgttagggaaaagagagtccagaggtcagatagatttgataagtattttatgctctagcccttcttggcgattcaaaatgtgctttaatatattaaagctctcaaaatgggttggggataaagatttggggaactcttgtggcaaagaaaccagtttaaactttgtttaaccatttgaccctaagatctcctttgttcctaatgtctacaaacattctgggagacagtgacggacgggcctgcctgttggagctggctgaggctggctgccagtctatatcgtacgtgtctcttcccagctccaccaggacatcttgttagtagcttgaaatgtatcccagtgggaggatctaagtcacagaaatgggcaaaggctaaaaatcggggctccccacccctcacactccttgttgctaaaggttgctagcctgttgctggtatttatcagcccatttccctaaaggtgtcataaggggtgccagacattagaatacagtgcatttctcaaatcttcactttctttctttctttctttttttttttttgagatggtctcactctgtcgacgaggctgtactgcagtggcatgatcatagctcactggcagccttgagctcctggcctcaaacggtcctcctaccttagcctcccaagtagctgagaccacaggtacatgccaccacacctcactaactttaaatttttaaaatagaaatgaggtctcactctgttgcccaggctggtcttaaactcttggcctcaagcgatcttcccacctcagcctcccaaagtgttgaaattatgggcgtcacccagccagatccttgcttttcagtgcagtgtaactttcttccctgttaaatctagcagtgtttgttttttgttgttgttgtttgttttttaagtaaaatatacataatatttgtcatcttaaccataagtgtacagttcagtgagatgaaatatgttacccatggtaaaagttttccatcaccttcaaaaaaagctctgaaccaaataaataactctcccttctcaccttcctcctgcttgtggtaacttctcttctacttcctgtctcttaatttgcctattctaggcacttcaagtaagtgcagcagtttttatctggccaatctactgtgacccagtcaagccaccacccatgtctgggctgggaaggtggggaaagaggctgctgcacatgcttgggatgtcttcagccatatgcatctgtccatctgttcatccacccatccgtctgtccatccgcccactcagctatctgtttatcaaggtataacaatacagcttttttattcctctccctctgtaacctatttgggccttatttatgtttctcttcttataaaccacctcagatctttctgtagaggtatttattaagtaaaacaacaccaccacatgacggacataaatattgaaaagaccaatcgattggaaggattaatcagtagagggaggtgttttcaggggatttagacaggaggaagatagcctaggctgacaaatggagcagatgaagataaatcggcaaaataagtagggagacaagatccctgtcccatgtgaccatgcatttgaaagcaggcagcccagcgaggtagaggcatgaaaggctgtatggactgcgctcttcaaagggctgtggttttgttctggggtctagtcttaggttgtaagcttttttctcttctctttctgttttttcccccggggcttgaacagactcaaaatactcttagggttggaatttctctttgattctggtcttggttagcaggggtgggggggattgttatgaacatttcattagatgtgtgtgctcttagatatggtcagtttgactgaacagttgctctgtttctgcattaagcacgtaattttgtaagttttgtagctttttggaatataaagtagttgaatacttaaagctccccctgctgccttccctttatttttaacttggactgagcaaggttcttctaaatgcattgaggttggggggaaaaagacctaaaaaagaaaaatacactgaataatactttcacatatacacgaaacctgattttgcaatctaaaatgactgtttttgggttttcaattatggaacattttctgacaaataatagaatttgctgtatttcactgtaaacagttttgagaatgcactaaatgcaacaacaaccttaggattagttatcatgacagattggcattaggaaaaatgatgagtatattttatgttctggaggaatgagacttgaagagcagagcaatttttaagttgtttacatcgagggaagagatgtaaagttaagattggctgggcgcggtggctcacacctgtaatcccagcacttagggagcccgaggcaggcagatcacctgagatcaggagtttgagaccagcctggccaacatggcgaatccccatctttactaaaaatatgaaaattagccaggagtagtggcaggtgcctgtaatcccagctacttaggaggctgaggcaggagaattgcttgaattcagaggcggaggttgcagtgagccgagaccatgctactgcactccaccctgggtgacaaagcagtgggactctgtctcaaaaataaataagtaagtaaataaataaatgaataaagattattacttaactcctttcaacaatttaaaattttttgtcaaagtaatacatgtacatagatcaaaaaaatagtactttacatcataattcccttaggcagtgaatttgaattttttggtttgttctgttatttctaaataatgtgcttacattgctaaacttggacttgttcatttgagatagtacctgctgactgtgtgtggtcagagagaaggtgacagacctggactgtggaggcagaatcctcttgctcactagccacgtgtccttgagcaagacacttaaacttctctgtcttatagaataggaataatcaccaccatcatcataatggctccgaggcctacctttaatgtatgtagggcctggggcaagagtactaatggagaccagatggctaaatatttaaaaggtatatttaaatatttacaaggtatatatgatatgcctaaatatttaaagggttcaaatctacctctgtctatggcctggcccctgtgttcacccaggtccttgcagcctactctccctgaagaccagagtctaacagacagcctcacacttggaccagccctgagccaggccccggagtctgccccggcagcccagcgtgaatgccgcgctagacccgctgatcccaggtgtagtcttggcagctcaagcttcccaggagcctgtctccatctagggtgattttatcgtattccctcacaccttgattctctgatttccaggcacttctaagcacctccccaaaactgtaccatctgtgctggggaaatcagggagcctgtcctgcctagacacccactttttctctggtaccccagggcaggggctgtgacctgcacatacatgccccctgcttccccactgacctgtctttcccagaattcctccttgtttggccagtttccaaaattaaaagggaatgaaacaaaagtttcccatgagactgagaagcatagtctctggctttcagcgctggagagaaatgggttgtctaccacgcaggccggggcagagccccctttgtctggaagcacaggtgctgagtgcgcgtagattgctgtggggatccatgcgttcacagcggcaagcctcttaaaatagagtccggacacagcgagtccgtgtgattgttggttctgctgcttcgctttttggagctctgtaatttcactccagcgtggacttctttccacctcttgtattgggccagcagaggtagagagttgtcagacttagcaaataaaaaatacaagatgctcagataaacagtggaacatccttacactacaagatgatttgtttatctgaaattcagatttaacttggcatcctttatttttctggcagcctaatgaggccctttcaattggattgtctccttttgtcttgggagatgttcctgtattatttctgtaataatgtcctctctgcatttcctctttctgaaacacttaattttatttatttatttattttttttgagatggagtcttgctctgtcacccaggctggagtgcagtggcgcgatcttgactcactgcaacctctgcctcccgggttcaagcgattctcctgcctcagcctcctgagtagctgagactacaggtgcgagccaccacgcccagcttatttttgtatttttagtagagacagggttccaccatgttgaccagggtggtctcaatctctcgacttcatgatctgcctgcctcggcctcccaatatgctgggatgacaggcgtgagccactgtgcccagcctgaaacactctttttagtcagatgttggaccagctgtattgaacttttaattttcataccttttctcttctatcgtctgtctttattttctagttatactcttggggagagatcttgatttccttgactctgttgtttcacctattttatcttttatttcagttattaatatttataatttccaaaagttccttcataacttcctgtccatttttctctgaggatactaattgtacatatattcttttcttcctctccttgtagcatctctgtcctctttatttttgatttttgttttgattcagatctctttgtctagaggctttcccatgcatctggtgattgtttagggatgaggctgtggagagctgcccgggaggtctgtctgcgcagctgcggcctgtcctccaggggcttctctgtgattcctcgtggagctggactcatcggaggatcgcagcagtcagcatccggaatcttttcactggtgcttttgttttcctaggagacttgtccatgcttctgcctgggggataaacttggctttaggctgtagggctggaggaaatggaggtcaggctctctgttctggtttctgtctcatgctcaccctgtggccctgaaccctgagcttccacggctttgatagcccagagattctcctctccctcctccctagcttccccagctgatgaagggtcgggggctccctgtttctagccctgccctgctccctgctttctttgctggctccagggcctggctgtctctgcagctgtaggactgaccgtccccacctccatggcagcctcctaccagaccttaggacggagcttcatgatctggtggtcacctgcccctccctgtcctcctcctcttccccaaactttgttgatgcctcaccttggctttgactccattctcacagcatattgtttttggcaaccgttattgacatacaattcacataccatgccacctgcctctttaaagcacacaggtcagtcatttttaacatgttcacagagttgtacagtcaccaccagtcaattttaggacattttcatcacctcagaaagaaaccctgtatcctttagccatgatgcccagttcccaacccccaagctctaagcaaccacttacttcctgtctctatttgcctatttaaattaaaaaaaaaatacttttaatgccatctttgtagggtttcaggagggaagggaaagaaactcgtgaattcactcagccttgtttcatgggcagtccttgccatgtataaaatattaaaattcaaaaaccatctgcctgtttctatttctaccttcatagtattgacccatggccgagatgggacctttcctctgggtctctttcttttccttcttatgcccttgtttaatgtctctgtttgacctgaacttctcttttctggagctgggcgttgtgaagcccacatcagtggccttcgtctcctcttggcttctagcacttttctttttttcttttttagagatggagtctagctatgttggccaggttggtcctgaacggctgacctcagtcctcccgcctcagccttccaaagtgggattacaggcgtgagccactgcgctcggcctctggcagttttcaagtgtctgtagagccattgtgcagaggagtcgccttggggagctgagtccacgcccctccgatatcttcttggttcagaagtagaggctgtgggctgtgtgaaaatacataggacttttaggcgcttaatatattttactatgatgcatttgctctttagccagcacctgctctttggagagcactggtgtgggtaattttgcaaagtggaatctggaactttaaaccagtgagggagagaagacaaatacacaagcagacaacagtacctattacaagtgacgatgagtccacctgcaggggtggagtcaccagttagcatggcctaaggattgccctgaatgggtactggcctcttatcatcctggctgcttctggagaaccctgtccccatctcctctggagctccaggatttctctgttggcttcgcaccccaccctgctctcacagcctgcctggctagtgctgacttgctggtcgcctggccagtgggtgcccactggcttccctccctgaggctgcctcccttccagagaactggacagctaggagtagacaccttaacagcatggtgaggacttcttagcccacttcctctttgtcttctctctaacagcggtttctccatgcctgttctcctccagcttctcttagagtgtttgtttcggggcatgggtaccactgctatggtttggggttcctggcccatgtcacattgtggctgcgcatcccagtgctctgctctctgtggggcctggtctgtgagcccggccctgtgcagcggtgttgtctgtgtcagcatggtgtggaggtgtggggtgggcagggttagacgggggcggttaagatcatagcccatctttggttagtgcttgatggggaagacacaagtctcaaagtcaaaagcaagagtcacaggggacccagaaatgctgagatgttttgtggattgatgaaattttgttgccctttttttgagatagggtctccctctgttgccccagactggcgtgcagtggcgtgatcattttgctgccttttaagagaaacctgtgtattctttttcgtttctgactccaggtgacccttctccttcttttttttttttttgagatggagttttgctcttgttgcccaggctggagtgcaatggtgtgatctcgactcactgcagcctccacctcccgggttcaagcgattctcctgcctcagcctctcgagtagctgggattacagtcatgtgccaccacacccagctaattttgtatttttagtagagacagggtttctccatgttggtcagggtggtctcgaactcccaacctcaggtgatccacctgcctcggcttcccaaagtgctgggattataggggtgagccaccacacctggccccaggtgatccttctagtggccgatacctagagtaggactggaggcacatccacattaggagaaaggctgtgcttttgaaagtgaatgaaatgcagtagggaaccggtgccagcactctgcgaagtacccaagaatcccctcgtttttctttttcctctgatcataccatcatcacctcacaacttcttcactttctcttctcaagaatattaatttagtttttcccatttaatttttagaaaaaataaaggaagaaaatagccttttaatgtctgtgtgcttggcactttccatgttacttgtttccatttgtagaataaccctgtgatacggctgttaactattagttccccttttggaagatgaggaaattgaggctcttccttcagtagaacctgaagaatgagttcttcatacttggctaatggagataagtgtgtgttgggggaggcattccaggtcagaggctatccagaagggcaaactaagaaggaaagctgggcctgcgaaaaacacacgcggaaccgcagcagctcatggttgggggcagattgtattgggaatttggtgtgaggccaagaagtttggacttaatttggaaggtgattccaggatttttaataggaggagtgatagctataattaaaaggaattttagaaaaatttatctggaaattctgaacaagaggctggagacagggagaacagagcattggtctcggtgtgaggtgagatggtcaaaatagaggaccgacagcgattataaagagaatgagggcgcatctgcaaaatagcgccagggaagtgggcagggcccagggagaagaattggaggtgaaattcttagtttgagaaaataatggtattgaaagagaggagtctgatattgagtaagagatgacgaagttagtttaagaaagctgaaatggttgtgggatatctgattgtacatacccgcaaggcacttgaactagatatctcaagaaaaacaaaaaccagatttgaacctctctgaagtgaagtgactgtggtttgatgtgggggtgtttagtgaatacagttttaaaaaatcagaagtctgaagtttaaaccgtggacaatgtgtgcatttatagattgccctttagagatttaagaaatttaagaaaatttcagcatacattgggaacagttgaactaattttttaaaacttcccctgcatgctctcccttagtaataataggtggcctttttgcttttatcgttcaatatgttcttcatataaaaattaaatgcagctggccatggtggttcatgcctgtaatcacggcactttgggaggccgaggcaggcgaattgcttcagctcaggggtttgggaccagcctgggcaacatagtgagaccttgtatctacaaaaaatataaaaattagtcaggtgtggtggtgtgcacctgtagtcccagctacttgggagtctgaggtgagaggaatggtttgagcctgggagggggaggctgcagtgagccgagatcacgccactgcatgccagcctaggcaacctagtgagaccttgtctcaaaaaaaaaaaaaataatgtatatggttaagatggtaaattttatgttttgtgtgttttaccatgattaaaaaaagctaaatgtacacctggctatattttaaagggaaacggtagttcctatttatcggtgttaatttttagaattgaaaccccagttatattgctgttgtggaaggaaaggctggcattgttagacgatacctgaaggatggagagagagagagaaataatttctttccttgtgatccctataaccaaattcttaggagggacctattgttttttaataagctgttatttcatatattaagtgatcagtgatccagttgttgtgttgcgtaccattggccaaaaagataaaccaaataaatcatttatcatctccggccacagactggggctggctgtagtcgtggaagataatctgaatgattttgtgtgcagaaatcatagagaatgcaaacttttgaaattctatttctttcttttttttttttttttggttgagactgggtctcactcttgtcacccaggctggagtgtagtggcacgatcttcgctcactgcaacctccgactccagagttctagcagttctcgtgcctcagcctcccgagtagctgagactacaggtgcgtgacaccatggccggccaatttttgtatttttagtatagacagggtttcaccatgttggccagtgtggtcttgaactcctggcctcaagtggtctacctgcctcggcctctggaagtgctgggactacaggtgtgagctgccaaacccggcctgaaaattgtgtttctaataacctatggtttaaaagttgctacatcattttgattagtcgctgaccttgaggcagtttactggtgagaggagaaaatggaaagccaatatccagagctgttaaacactgtacgaattacttctttttttaggttgcttttcgccaatattctttggaagtaaaaggattatagtatacaacgtctcatcccggctctcccctgcattttcacattcccaggttctccatttttttttctttctttttttttttttttaagacaaggtctggctctgttgcccaggctgaagtgcaatggcacaaacatactcactgcagcctctgcctccagggctcaagctatccttccactccagcatctggagtagctgggactataggtgtgctccaccacgcccatctaaattttgtattttttgtagagatggagttttgccatgttgtccaggctggtctcaaacttgtgagctcttggcctcccaacatgctgggattataggtgtgagccaccatgcttggccggttctctttaactattcactatttctatcttactttaaaagcaaccaaccaccaacaactaaagtctgtgccttatttggatttccttagtttttacctattgtcctttttctgttccaggagtccgtctaggatatcacattacatttagtcttcagactttacttggccatgaccatttctcagacttcccttgttttcgatgaccttgacagttgtaaggaatactggtcagggatgttgtaggaggtcccaccattgggatttgtctgatgtgtctcctgtggtcaggctggggtagtgtgtctctgggaagaaggtctcggaggcagtgtgccattctcatcacagcccggggacatactgtccgtgtaacttaccacagttgatgctgaccttgaccacctggctgaggttgtgttcatcaggtttctttctccgtggtaaagttgcttttttctcccctttccgtactgtcctcggaagaaagtcattgaaggggcagggagttcttcactgcataagggtggggcatctacataaattactttggaacttctgcacaggggatggtttgcatatcctgtttagttattccatcatttatatcagtatgcattcatggatatttatttaatattttgggttgtaacacaacactactttattttgttgctcggattgttccagttttccatgggcttctatgtccctttgacacgccccatcagtgtagtttttttgttttttttggaggcagggggacattcagctctttcttaccttctgacactataagattcattggtaggtgcatttcctgcccattcctagatcggtcatttctccgaggagccctggcttcgttcagtggagaatggtgtgggaaatgcagctccgggcaggttgtcttcctcacttttggttgttgtcaggcacctgcaccggtgctgggttcaccttctcccatgacctcactttcttctttttcctatctaattttgccatagattgcccagctctgatttttacagctgtcagatttttagaagaccaagctaatacaaaattattattacttgaaagagaaattggctgcttctttatgtgatctgaattccagtattaatactatgtaggaatctggctgtaaagattgaatttggattgatagtgtttttggactgtgatttgtcttttattacagcatccaggaactttacagatttatgaaccatagtgaaatagttaaaaacttattaatgttaaattttaacaaagacccaaatgtcagagttttgcatttctgtataattcttggggttcccttgagaaaactcacttgcgaggttcctgaggacctggaaaagatggctcacaggtctcacctcctcctccacctatctacagaggagacagcctcatgttttgcagggtgcagagaagcaggggtcctttcagatatgaccattaaggctgctgctgctgcttatgagttttttgtttgtttgtttttttaaagacggagtctcgctctgttgcccaggctagggtgcagtggcatgatctcggctcactgcaacctccgcctcctgggctcaagcgattctcttgcctgagcctcctgagtagctgggattacagacgcgtgccaccacgcctggctaatttttgtatttttagtagagatggggttttaccatgtcagccaggctggtcttgaactcctgacctcgtgatcccccctgcccaccttggcctcccaaagtgctgggattagaggtgtgagccactgcacccagccgagaagttttttgttttttttttgagatggagtttcactcttgttgccccaggctggagtgcagtggtgcgatcccggcggagaagttttatacccagtgaagtgttgtgtctgtgtatattcataattttgtggtcatttgggggttgcaaagatcaggagggttcaggagaggatggtcaggtagctgtgcttccggtcagcatgtcttccgtctgcctcccaggtcctgacgtggtagatttctcatttgtgcctcatcctctaattctgatctctcccaaggctcactcccagccagtgagttctgtttttgacaaggtgagcccctgagcttcccacaagacttctagcaccagtccttccccataaagatgatgcccacttaccttctttccttcttttgctgaaagccgcagtctgactaggaaggttaataaatgagatgaccacagactgttttcctgaatgtgatactggccaaataggtctcctgcctggttgtaggtctcttttctgtgattcttaaatgaaaagggtaggagtattctttgacattctctaaccactggtcactcattgtttgaatgttatgctgttttgtgctgtgtgtttaattatgacaaggctccctctaaatatcagtagcccctttccatatccctggggttgagtgtatgctgttatcctcattttttaggtggaaaatttttggacacaagccaggaacaaagggaatgctggtgctggaatggaatcatgttgccacgggtgttgtgctctcccacttattgtttgtgtgttgtgtagctgggatgttaaatgctctttttcttcatgaaagtttgtccatagacaatttatttcagggaactgtatggataggctttgtatgtccttgcttattaataaatgacgagagtgtagatcggtaagttgtttcatagagctgaagaaagaaataaacaggaaattcatcagctccctgcatccattcattcatcattcattgatttataactagcaaaaacataagagaaaaaaataaacattcaaataataggaaaagtgaaatacagtaaggcatctttttgttgcctttgatattagctaataatgacattagcttatgaagttgagggacaagatgcagtaaaagtaactctaatgcataatttgcaacaataaaagtttctgcagccttttgggaaatcattttggcatttgtattcatggatcagaaaaaatgacctgcagttagatcaaaatttggtgactactgacatccgtgtttttggagatttgtaatactcattagcataatagtggctcttgcctgaaagaaatctgtttaacttcagaaaatccagcatttgctatgtgcatttcagtcttgtctttgtgaaagacctaataacatcctacagaactagtatctgtgttttatggtttgtgaaatgctgcctgaagatgttttttttggagatggagtttcgctcttgtcccccaggctggagtgcagtggtgcgatctcggctcactgcaacctctgcctcctgggttcaagcaattctcctgcatcagcctcctgagtagctgggattacaggcatgcactaccacgcctggctaattttgtatttttagtagagacagggtttctccatgttggtcaggctggtctcaaactcccaacctcaggtgatccgcccacctcagcctcccaaagtgttgggattataggcgtgagccaccgcgcccagcctgcctgaagatttttaatgttttcctagagcaggtgaaggtcattgacaaaacataggatttagaggaacatgttgggagggaatatgagggctttagttttaagtttgacctcgtgtagggagagccaagcagaatatcatcccagcaatggaaagacgactcttaaggcagaattaggactaaagatagaaacccgtttgttctgactgttgtgaccatgggagttgctgaggttgcctttcaacaaaggtagataacaaaagagaatctgaagggactcatgaaaggagagaagaggaagagccagtgagtcaggaaaagccaggtgagcttgaggcagtgctgtggggtccacgagaggaaaggatgaccagaaaatgaaattctgcagaggtcacaggcaacatgaaagatgattagcagcaaaaacaggcacgcgggaacacggattgggaatggatcgttgctggagtgttttctggctgtgagactacactattcagcgacggcatgcactttcatttggacccaggaggaagggccactcagggaggcgctatggccacctcaggtcactagctaatagtagtaaatagggcagcaaggatttcatctccaaagctgtctcctttgtattatgtcacatagcctgggttttccctttttaacttttaggttgaaataattttaacttaaagttttggctgggtacagtggctcacatgtttgtaatccctgtgttttgggaggccaaggtggaaggatcactggagcccaggagtaaccagcctagacaacatagcaagaccctgtctctacaaaaaaaagaaaaaataaatgttgcaaaaataggacagagaatttctgtgtactcatttacccaactttacttaaaggtcacatcttgtaattctaacacacttgtgaaaactaaaaaattatcattcgtacaatactactaactagatttcagcagttttttactagaggatggtgtttgtgcacggtcctttttcattagccttacaatgtacagtcataattttgttttctgagttgtttaggttagttttttgttccctgaacccttcagtgtagtcatgttattcatttgtatgaatgaccaaaattacagttggtcttaattttggacgccccctcccattcctggtttttatttttaaatttaatatttacacacagtgaaattctctagtttattttttttttgagaaagagtctcgcttcatcactcaggctggagtacagtggcgtgatctcagctcagtgcaacctctgccttccaggttcaaacgattttgccgcttcagcctcccgagtagctgggattacaggcatgcaccaccaagcccagctaatttttgtatttgtagtagagagagagagagggggtttcatcatgttggccaggctggtctcaaactcctggtctcaagtgatccacccgcctcagcctcccaaagtgctgggattacgagcatgagccgccgcacctggcctgaaattctcaagggtttgacagatgcacagaaacatgtctccactaccacatttgtgatacagaactattccatgagccctaaaattctctccttcagcctggtttgttttttttttttaagagacagggtcttactctgttgcctaagctagattgcagtggcgtgattgtagctcactgtagcctcgacttactgggctcaaccaatcatcctgccttggcctcccaaagtgttggaatcacagtcatgagctaccacgcccagccctgcctggatttcaatggtggttttgagagagtggattgtcagagtgctggggagatactgggaggagcaggatatgtcccagtactggagaacttgagccatgaaggctgcgtggcaagaggacagagcaccaagggttccagggtaaggctggaggagatctctctatgccactaggcaaatgggataggaattacccaaaatagaagggacagaccaagctcactgtggaggatcggcttggcaaagccagcatgaaggtacaggcaagatttgaaggaatgaagctgtgggagacctcttgactggtgactatgattttttaagttaacctcagaaagaaaaggggggatggagtttagaagagggagagattagtaacatctgcaggccacagccttaggccaggcagggttgctcaagcctttaatcccagcacttgggaggggaggctggaggatcactcgaggccagtttgagaccagtctgggtgagagcaagaccccatttctacagcaaataagaattagctgagtgtggcggtgcttgtaaggatcacttgagcccagaagttcgaggctgcagtgagctatgatcatggcactgcactccagcctggacagcagagccaggtcctgtgtcaaaggaaagaaaagaagcagcccttgtctcttggcaggatgggagttaataaggaaaaacaaaattgcagtgctaaatgacgctgaggacctgctgtggagggctacaggcacgccctcaatttccctggagcttctctcctggaaaaagcaaaggagctctcactgtagctgagctttcgttttgacccagaagagtttggagttggggagtgagctttcttagagagctgtgatgtgagaagtaggccgagtgggggaggttgagctttcagagaaggctgaggtttgtagggacagggactttcccttagttgctcctgatgtgcgaggtggggaatggatgggggcggggagcctacttttataaccttgagggaggagtgtggaataactgcagcaaagggctggggctggcttcactcctctatttcccaaggtcgtgacctggttcgtggcattagtatgtgactcctgtgttgatatttccagaagcagtttgaatttcagatcaggaaatctgttatatttcagatcaggaatatcaagtgttagctgaagaagaaaacatactaccttgagcaaagtatttgtatatccatgattggtatcatcaggtttaaggaaaccagtaaataactattttggatagtagcaactatatttgctaatttcttgttaactcatacagaattaacaaaacatacatttgttctttgactgtgcgtataaactgtatttgtacgctatgtgttaccctggtgtaggctgcttagaaaatgaagctcttgtgctgagagggggcagagtgtgatcagggtgcccagcagtgctgacaggtcagagggtccaggcgacttgttggtgtcccattgtgtcagctttcttccctgtggccggggaggaacctttagacctgcaaggtgctctgggctggctgtctcgacttaatcagggtctgattagtgtgaaggctaaaggtaaaatgaaacttttctgtggcatttgtcactggcatgggaccttcagatggcaagtaattaagagattccatagcttttttcataactgcttatttttcttttccacattttttcatgtgtgtgtctgcgtgtatgctatttttttgaaatctgagaatctgccatttttggggcccagtctctcccacccctgcctgcacttcctagagagaggcagtgaaccatggcagctgctccagaggcgcggctgatcaaattttttaaaaaaacttggcccccaaactgacccatgtccccagctggtttaggaagagtgaagaagcatgaggtcgacctgcgtagctgaaccgatttggtgtttggaatggaaatgcagtgagaaaataggtttccctgatatgcagtcgagattgaagtgggataaaagcggcagaagatcagttggaagagaagagagaaggttttttttcttttctttggtggaagagatacaatgtgcagagccttggaaattctaaagatgtaagagattggtgatggaggcagagctaaggtttgcataatgataatgggaagagcaagaatttgaatgtaggcagccaagagaagtcaatccctgtgtttcttgaagatgtataaaaactggggatgctagctagattcattttctaagaggaggaaattaaatttgaaacattacgtaatataaacataagttataagaacattttatatttgaaggaaagataggaaagatgaaaacatgctagatccattcatttattgaattatttttttggggccaggcacagtggctcacacctgtaatcctggcactttgggaggctgaggcaggaggattgtttgagctcaggagttcgagaccagcttggacaacatagtgagaccccatcctaaaagaaagggaaaggaaaaaatatatatatataaaagaattatttttttaaaaattcagcggaataaaaaagatacaatgaagggtctcagtggccagatagtgctagaaaataagactgggaatcccaaagcagaccttgtattattacagttgttttatgggaagcctttataatactgccaagatggtcagtagactttgatttgtttttctctaagtaggactgttatgatttagagggtattgattttcattaagggaaatgttagtttctgtattaaatagggaaccagcgttttcacaggtcagaggaggcagaccttggctggatttaggcgtgcatctttctgtttcaggattaaagttgggatttaatggttaggctgtgcctatgcctttaatactgacattctctaattggaaattgggaaaccaacaatttttttattgcaaaggaagaagaattttgttacaaagtatgagaagtatgattaaggggtgaataggtttttcttacgtttttcttttgacttcataacttttgacttctgccaacaaagatgaaatagcttttcataattctcagaggctttgagtaggaaaggaaatgttttgtctctgtgtcatacgagaaaataaagtgatcatgtgacagacctgagttctttcaatttccttttttgtaaacaggtctgattccctcagatattgttgatgtctttgggtgaaagaacattatacattaagcacaaatgctattagtgaattataggtcatttatatagggtttacttttaaattaaaagaccattggccaggcgtggtggctcacatctgtaatcccagcactctgggaggccgcggcgggcggatcacgaggtcaggagcttgagaccagcctggccaacatggtgaaaccccgtctctactaaaaatacaaaaattagccagatgtggtggcaggtgcctgtaatcccggctactcgggaggctgaggcaggagaattgcttgaacccaggaggcggaggttgcagtgagccgagatcacactgctgtactccagcctgggtgacagagcaagactccgtctcggaaaaaataaataaataaaataaaagactattattgcctttgaagggagatgtattttatagggcataagtgaaagacattgttaaaataactaaagctaattctgtttgaaaatcaaactgttgagggaaagggaagctaaaatgagatcgttctattttatcttttaaaagagaggactgagatttatttttgtaatgtttttaagcaaaagaatctatttttaagacagtagtacttaggaattggggtggaaagcgaagaaaactttcagacataaacattcctctttgtattcagtataactgagaaatgaagtgggagttatacatttttttcccctccaagtggaatggaacacttgctcttgccttccagaatgtgggaagggaaagggtaataggacaatgtgattgtgggtatgaaaaacattcctataaaccaaaaaagaagtgtgaagttacagagtggtatccattccattagttatacaaccccagagaggggagtccaggcaccacagtgatctcgggtttcagacgacacgatgcgctttcggttggccactgcactcagaaatgcccattatgcattttcagcttctagtcggccttcctgcaggtgaactaggatgactgactcactttttaaaactaccatcagttcactctgacctcttaccacgtcccactgcttcacgctggactcccccacgtcccccatgagaagagtataaaccttaggtggagtagagggatggggacagggtgaggctggatcactgtggagaaagagttgcttctcaaccccttgaggggtttgcaggcatgggagttcctctctggggccttctagatcctaactctgctttagctgggcaggtaggaaaagatggggtgatgtggaggtcaacaagtttagcattaactcagtgattcagtacggctgctgtgcatgcgtttataaatcaggaggttcctgtacgtgcaacagcagaaaaaggtgagaagagccatattaaccttcccagggttcataagaatgtcagacagtcgcactgccgaccactcaagtttggtttcatggggtgacctttcctcattcatgtggttgtatgttctgggcctcccacccactgagtatttgaattatctcttatcttctttttgttcctgaactgactgccctctgggatgaacagtgtgaaactgtataaagtcttttgctcaccaaagtcataaagagagggcaaatgacattaaaatcctgtgaagctcgaaagaaagagttgggggactagggcagagccccactaccatggggacttccagagcctgagcccaagctttgcatcagttaaaaatctacttttcagtccctttcaaccctggtggggcagggggtggtgtcttgagttttctaatcacagtgacctccaactttagatcaacatggttggtaaggatagatcacagggatactctgctaatggcagctttattgtgagtattccatttacaacaccaggatgatgaatagaaagaagagtggtgacattcagggattatttgtaagtgggtggattcttttgtggatatagtgcctgacagatggctttttcattccccacgttttgcagtttaaatgttcaatttcatttaaaaaacaaaaccataatcacagactttccactgaatctgacttctcatagatatttgtacgtcagtatccctttagagatgttaatgttttatttcctgtgtactttttgcatcggtggtagcttggtgctgggggtatgttattccccctctgtttccgcaggcgcccctctgagagaagagtggtcacagaatgttttctctatgctgagtaagccatcgaaagaaaagcacatgtgacttcttcagctcggtattaaccgagacaggtgtgaatagaagcggatttattcttcagctcccatcgaaccctaagtgttgatttcgccttcaacagtagttttttctaaccaaattcttcagtgtgtttggatgtgtccccagagtgagttaatatactgagggtcttagcagctgttgatagatttgtggtgtatatgagttttctcaggcatgtgtattctcactgagtagaaattctctcttgaccctggaatagttacttttattaggaatgtgtgatgttttctagattgtacaagaaaaaaaaaatcaagtgcttcagtaagatgtggaaggaggcaacgtgtcagggaccactaaagcagattcgaaggaaggataatgacacagcaaataccgaagggcagagtctgtctaggaacacgcatctaaattggctaggtgaattcttccactgaaagttgcctgaagtcagctgctaccctcttcccttccgactgactgctgcttgcttcattcccctttctcttctctcactctcttctcttccctctttcctttccttctcttcctggctgtttgcctccactgcagaaggaacagatccaagagatcccctcacttgctgagggccccagagctagtgagtgacagagctgggtccagccctgttcttctgttataaacccagtgcctgtcttggtgttgcgttatttgacatttatgctagaaagatgagtgacactttgcctgtcctcaggcagcttacaggccagtatgtaagaggagacaagtacacacagactggagtagagaccaggaaacagtagagtctcaggatggaaggctggggttccagggagcagaacatgccccctgcagtggaggctttatctcccctgacaatcacttgtcctctgcgggtcgggggaagagccccttttaaagatccctcaagcactgcatgtattcatatatccttcatgtttagtaatggctgtgaccatccatttttctaaaactctccatcctcctatcatctgggaatgtttcttttttaacaaacataatagggaaaattagggttaaataaaaatggacagaatcagctccttagggttttttttttttaaaaagtcccaaatggaatttattagcagatatcctgcagtagctgtggatgctgatttctttcttctgtggatgaatattgaaatctgtacttgccttttttgattgtggtatgtttcttttaataaggtatcccaaatctgatggtgacgatgatagtgataattttgccagcagaattaaatactgtcaagatcaaaatatgttggaagtagctttttatgaaagggacacattttctagttgctacaccagaacctgtttttctaggctacagcagtttcaatcaacttcattcttgttagctgggagccacgctggtaacaccgtatagcagtgtggagggcttacttttgaagctaaaattatctaggtcttacatgtattttctcgatgtttgtccacttggactcagagtttcgtagttaccgtaaatgcagttacctccttgctctttcttagtaatcgttatgttagtgtgaattgtataggggttttatctcatcgtgagga[450 bp omitted]cgatctccagtgctgaagagtttgatgacgacgagaagattgaggtggatgacccccctgacaaggaggacatgcgatcaagcttcaggtcgaatgtgttgacggggtcggctccccagcaggactacgataagctgaaggcactcggaggggaaaactccagcaaaactggactctctacgtcaggcaatgtggagaaaaacaaagctgttaagagagaaacagaagccagttctataaacctgagtgtttatgaaccttttaaagtcagaaaagcagaggataaattgaaggaaagctctgacaaggtgctggaaaacagagtcctagatgggaagctgagctccgagaagaatgacaccagcctccccagcgttgcgccatcaaagacaaagtcgtcctccaagctctcgtcctgcatcgctgccatcgcggctctcagcgctaaaaaggcggcttcagactcctgcaaagaaccagtggccaattcgagggaatcctccccgttaccaaaagaagtaaatgacagtccgagagccgctgacaagtctcctgaatcccagaatctcatcgacgggaccaaaaaaccatccctgaagcaaccggatagtcccagaagcatctcaagtgagaacagcagcaaaggatccccgtcctctcccgcagggtccacaccagcaatccccaaagtccgcataaaaaccattaagacatcttctggggaaatcaagagaacagtgaccagggtattgccagaagtggatcttgactctggaaagaaaccttccgagcagacagcgtccgtgatggcctctgtgacatcccttctgtcgtctccagcatcagccgccgtcctttcctctccccccagggcgcctctccagtctgcggtcgtgaccaatgcagtttcccctgcagagctcacccccaaacaggtcacaatcaagcctgtggctactgctttcctcccagtgtctgctgtgaagacggcaggatcccaagtcattaatttgaagctcgctaacaacaccacggtgaaagccacggtcatatctgctgcctctgtccagagtgccagcagcgccatcattaaagctgccaacgccatccagcagcaaactgtcgtggtgccggcatccagcctggccaatgccaaactcgtgccaaagactgtgcaccttgccaaccttaaccttttgcctcagggtgcccaggccacctctgaactccgccaagtgctaaccaaacctcagcaacaaataaagcaggcaataatcaatgcagcagcctcgcaaccccccaaaaaggtgtctcgagtccaggtggtgtcgtccttgcagagttctgtggtggaagctttcaacaaggtgctgagcagtgtcaatccagtccctgtttacatcccaaacctcagtcctcccgccaatgcagggatcacgttaccgacgcgtgggtacaagtgcttggagtgtggggactcctttgcacttgaaaagagtctgacccagcactacgacagacggagcgtgcgcatcgaagtaacgtgcaaccattgtacaaagaacctcgttttttacaacaaatgcagcctcctttcccatgcccgtgggcataaggagaaaggggtggtaatgcaatgctcccacttaattttaaagccagtcccagcagatcaaatgatagtttctccgtcaagcaatacttccacttcaacttccactcttcagagccctgtgggagctggcacacacactgtcacaaaaattcagtctggcataactgggacagtcatatcggctccttcaagcactcccatcaccccagccatgcccctagatgaagacccctccaaactgtgtagacatagtctaaaatgtttggagtgtaatgaagtcttccaggacgagacatcactggctacacatttccagcaggctgcagatacgagtggacaagtagagtatcatttaaatttttgtgtttcagtgatgagtctgtaggcatgagtgcttgataagatgcccttgattttagggtgggaatgcagtgaaatggacgtgtgtgtgtgtgtgtgtgtgtgtgtgtgtgtgtgtgtgtgtgtgtgtgtgtgtgtttggggaggggagggggaatgcctgtgcagccgggcacatgatccagtaaggattgttttcatagaatagaaacaattagctggggatgtggtggtggcagtggtgttggaggtggtagcaggagtggtagtggcagtggtggttgtggttgtggcagcagtggcgtgtgcctgttgcgccagctatattcgggaggctgaggtgggaagattgcttgagcccaggagtttgaagctgcagtgagctgtgattgagccactgcactgtagcctagcattggggcgagatcatatctctttaaaaaaaaaagaacagaaacaatgttgaaacatgaatcttattttagtaaaacgagttttttgaggggaggataatatatatatactagttgagttgtggaactttagattttggtaatcgtttggtcattggaatgtatattgaaagtctgagatttagcggattatagtgtcatcccattgtattaagtatttgagcccggcttcatcatcagagctcctgagttagtgacaattttgatatttagaaaaatacttactgttatttatttatctatctgctggcagctctactgagcttactgttgttatttataatgctgatcttacttttacagttaaatgcatttatcagtacccatttctgtggcatgtctgcttacttaagatggtggtccagaagtgtgttcagtaatatccttcactgcaatgaatttaagccacaaatggcaaacccatctccaattaaacagaatacctttgtgtgtgtttgcagcttttgttttgtagtgaagtgcaggtcaatgttggtgaattacatttcacagtgggcatcaatcagccttttatctccatcatttgctacttcatgaggcaacttttagctaatagataaatgtgtttatcataaatatataatctattatttggaagtaattagacatgttgaatgaaataaattcgagttagaccatgtgacatattgtccaaactagaaagcttgtgaaatttcactgggcacagtggcttatgcctgtaatcccagcactttaggaggccgagacaggtgaattgcctgagctcaggagttcgagaccagcctgggcaacatggtgaaacctcatctctaacaaaaataccaaacattagccgggcttggtggtgcatgctgttggtcccagctacttgggaggctgaggtgggaagatcagttgagcctgagaggtggaggttgcagtgagctgagatcataccacggcactccagcctcaggtgacagagcaagaccctgtctccaaaaaaaaaaaggaaaaaacttgtgaaattcaaagggagcactagtttgagctaatatactctgctcctcaaacatctctataaagatttaacagtaaactgggctttcctttttttctccctccaatattttgttaattaattaggatgtttatgccgcaattcagaagtttggtgctatcttggtgattagttcctcagggtaattactggtttaagttctttgtagcattttcagtttggggaacaaaagatcaagaataccccggtaatttttttatctggtttttcagttcagtggaaatggaagcaataaagagttttgacagcattcttgcaggtttgaatgttaaatgtttcattggctctggcagtaaaatgctcaaaaaataggaaagcagcaacttagttcaagaaggctatgatggctccagctgttaacctagcccggtgacaatgcctgggttctgtctacatggatgtcctcccatcttgacaccgcttcatcaaaggataatatttcttttcatcctaacaggatgcagtaaaaaaggggaaaaagccaaaaagctctttcttcatttctgttgtcttcgtgtctgtgtctgctggtgggctgtgtagagcggtcgactgtgtcctggcttaggagggttctcactatgagctgtgtgctctgtatctggcctttggagctaccctcagatgtgtctgtctgagacctccttctctgagagcaaggaagggcatgagcaggcgggtaggaatgtccttattccctgcgtttccctagtttttgttctttattaaccttttaggctcaacagccaaactagggtgaaacgggtgaaactctgtccccaggaggagagatgaacatcttttcttttgtgtgtggttgctttggcatcacttttgtatcttgctgggacgagtacgcaggtcacccgtttgacgcggaatcccaaggagtgaatcagggcagaatgtatatttaactctcagaccagatacacacaagcaaaacactcacctcctgatctgtttccgttttgcagccatccactcacctatgtaggccactcagctcaccagcgaagggcgttggtttgtagtgagcttcaacccactgcatagccaagcactgcaggaccagcagtgtgaaaaggccccatagcacgctctcctcctgttcctcgtctcccctttctcactggatctagaatgcttcttcacagcttcccattttcccagactcagccagactgtgtcactcagacccaagaggggagtgtggcttctgcctcagtaggaatagctgctgtgtcttcagcattcatggtttaacccaacctggagtctcttccttggttctaggggctcagtaggatgcctgtggctgttgccatcctagcctccacatgtggccatgggggttctcgaccattactgttgcctggggtgctatccagcagccatgggagtgggaggtgggggctgcagtaagacagggagaaaagaaaagagaaaatagcctttgtttcatccttctcgtttgccagtcacatgactgttggccagtttacagtttgttcaactggaatgggaaaaaattacacagaacttggtttctgtctgaggatggcacttaaaacacacatgactgcttacaaatctagaaatggacacgggagcctgaagtaccggcaactgtgccaagcccctcctttcctctgttgtacaacatattccatatttttttttttgagatggagtctcactctgtcgcccaggctggagtgcagtggcatgatctcggctcatggcaacctctgcctcctgggttcaagtgattcccctgcctcagcctccagagcagctgggattacaggcacacatcaccgcatccagctaatttttgtatttttagtagagacggggtttcaccatgttggccgggctggtcttgaactcctaacctcaagtgatccacccgccttggcctcccaaagtgctgggattataggtgtgatccacccccgcccggctagcattccatgtattttaacactttaactccatttccccattgacctccacattcttggtagctcatgggtgaattggaagagtataccagtctacactgtaacttttttctggtgctcacaccctgacctgtgctttctggggtaggaacccagtgcagtttaagcctgtgcctgtggctctggggcaggatgccctgggtctgcacattagtgtctagttagtctagtctcatcacccgaagtggattcctgaaccaaccttgctgccactgttcatggttcagaaggtgtaaagggtatggcctctggggtccttgctagactggcaggtccatcgccctttactcagtgcctttcagctccttggtttactgggtctggagaaaggtatgacttcattagcggagggacctccttccctttttcttttgagataattgtagattcatgtaacaaataatacagagagaacttgtatacccttcatccagttccccacaatggtaacatctcacaaaactatagaacagtatcacagctgggacatgagcgttgactcagtcaagatacagagcttttccagcactacaaagatctcatattgctcatttatagccacccacagcctctcctcactccttaacccctggcaaccactaagctgtttttcatttctataattttttcatttcaggaatgttacatagatggaatcatatagtgtataactccttaggattggctttttttcactcagcataattccctggttgttgcgtatatcaatagtatattcctttttattgctgagtagattccattgtatggttatactatagttcatttaaccattcacttgttgaaagacatctgcattggatccagttgggggctatgatggataaagctattattaacattgtgtataggtttttttgtggacataagtttttatttctctgggataaatgcctatttatcatcagagtataactgctgttttacatggtatttgcacgtttagactcttaaactgtttttcagagtggctgtatcattctatattcccaggagcaacacacgagggatccagtttctctgcatcctccagcatttggtgctgttaccatattttattttagccattttgatagatgtgtggtattattttattgtggtttcaattcatgtttccctagtggctaatgatgttgaacaccttttcatgggtttaatttgccatctgtttttcctttttggtgaaatgtctcttcatatcttttgcccatttctaattaggttgtttgcttttacaacagatcaattgggtttcacaagttcttgatagagcctagatactagtcttttgttggctatgtggctgcaagtgttttcgcccagtctatagcttgtcttttcatcctcttctttagcagagcaaaagtttgtaattttcgtgaagtcaagtatatcagttttccatcttatgacctctgcttttggtgtcaagtctaaggcatagctctagatcctaaacattttcttctgtgtttttttcctcaacgttttataattctgtgatttacatttaagtctgtgactcattttgagttgatgtttgtatcaggtgtgagatttaggtggagggtcattttttcccccaatacttggccatttgttgaagatgctgtcatcctccaatgaactgcttttgcccctttgtcaagtatcagttaggcatttgtgtggggctatttctggattctttattctgttccattgatctgtgtgtctgtccctctaccagtatctacagtctgagtactgtaattaggtagtcttcaagtctggtagatggatgcttccaatttatttttcttttccaaaattgttttcactcatctagttcttttgccttttcatataaattttagaataatgttgtgtgtttctgtaaaacaacttgctgggattttgataggaattgcattaaacctgcatatcagtttgggggagaattgacatctttactatattgagcgtttcagtccatgaacatgggcatagattcatcatttatttatactgataagaacagatactacacttgttcttagccaaaaggccgataaatgattcttcatttatttatatctttgattctttgttttgtagttttcttttctttttgttttgagatggcgtttcgctcttgttgcccaggctggagtgcaatggcgcgatctcaggtcacggcaacctccatctcctgggttcaagagattctcctgccttagcctcccgagtagctgggattacaggcatgcgccaccatgcccggctaattttatatttttagtagagacagggttgagatggggtttctccatgttggtcaggctggtctcgaactcctgagctcaggtgatccgcctgcctcagcctcccaaagtgctgggattataggcgtgagccactgtacccggccttgtagttttcatcatataagtcctgtgcatgttttgttagatttcttttttcaaacaatcataagtggtatatatttttggtgaggacacgttcatcactaataatttttatatattttttgtgtatcctttgactctgttgaactcagttattggtttcagggcttttttttggatagattatactgatttttcagatatcaaaatagccttgcatttctggaatgaatcccacttggtcaagctgcatatttctttttatatgttttgaattataattgctgctattttgttaaggagttttgcatctatatgcatgtagatatccttttttgttctgttcttgtttggtttgagataggttgatactcactttttaaagaattgagaagtattccctccttcaatttttctggaagagagtgtgtataattggtgttagtttttctttggtagaattctccaatgaaaccatctgggcctagagatttcttttctagggtttaaaaaaatacctgttgggctggtggtgggggaattggcagagatcaaaatttacctttgctactgggcttctctgacacccaccatctgggtagggacgttgggacagacagctcattacagtctcaagagggctgaagtcttggctgcacctctactttgcacaggttggggtggggccgtagtgttttctgtgggatttggctggagtagacagtgttcctttaaaagttttctgttttcctaggcactcgtttcttggtggtcggctacagagcacaggcttttcttgggaatttttttttgtctctacccattggcattttgggttgctagcttcttcagctccaaatctgggatatatgaggcgaagagaaacccagggaactgactaccctgtcattcctagggtcttgagatccctagctaacctttcactccacctttcagagtccttttatgtttgttttatatataatgttcagggttttgacttgtacttaatgggaagaatagggaaagttactcttattccattttcctcaaagtggacgttttactccatgtttaaaaaagatcctaatatacctgtcctgtcttcaaggagagattgtgtaattgcattattgtgctctgccggagactttcagaccccaatctctgtttttgcaattaggcttcctgggagggtcactttccatttgacttcctgggatttctgttgtctctgaatggaagacattttctccacccagtgtaaacttcctttcttagccccgtctttaaaagcagttaggagtgagaattgcgtcttttacctttcacatctggtgggctgagcctcttttaagaccttaagaacgtacttttcttgatttagctcagtcactatccccttttttatctttctttttatattttatttttcccttgttatcattttctattttgacctctgtttatgttttgaacagagcctgtctcagtttccccagggtgcttctctgcacccagcagagggtctgtctgcctgtgagcaccagctggggctgttcctcccacgcctctcaccacctccccttacgcatgcctttagccttctgagactgccagtatgccatgggttaaaggaaggtttgggtggcatttggtgcattctctctgccagttgctgctgcccctccaagtgttctgtagacaatctatgcagaagtaacaattgccagagagactcagaagcaccacttccttatgaactggtctatgctcagtgacccccaagagcaggtctctggtaagagctgtgttggaatatatggttttagctcgaggctctctgccatacattcccaaagctgtcttgggatttgatcacactctggtacacgatctgggccaggaaccgaaagcctgctaggctgaggttagactgcctgcgtgcatctgcttaccccttggaggagacagtggcagagggagagagcctagaggactgaggaccttgtggggatcactaccttccagggagcatggaatcaagcagtaaataaaaacagttctgagcagttgactctttagccattaaatctgccccagttaggggtttgtattctgatctatctgcttaataatctctgctttgggttacgttgagaaaagggagtgggcaagagaccagaggagctttccttttctccatgaagtatttaagagctgaggactgtcgtttgaataattgatattttaatgtgttgggatgtcattgcttcacctcctcttaaaaccatgtctaaatttaaccaactacagactggaaatgctttctgtaaccccttaattttaaaaacctgttttcttcttgtggcatttatatcagctgtagaatcacagaatgctataggtcttttggccagcccttttattttacaattgaaaaaacaaatgcccaattggtggcagagctgggactcaaggcaaaatttctgtattgctggttcattctttctgcttctctaagatgttgaagcataggctcttacagccggagggaccttaggaatcacataaggatggattcttggggttacttccgagtcaccttcaagagtgtggataaaggtgacatttgcagtggtcctcatttttggggattgctggttcactttagtttcaggaactttctgggcatcgttaatacaacatactaactgtattctcgtgagcagcctctgctggttctcatttctagatcccgctctgctcagacagcttcctctggaaaccagggagctcatctgaattcctcccctccgccgtctcccaaaatacccttattagctgaagacttgtgacccttggcttttggtcctgctcttctaagtgtttaatttaaattttggtcaagactagtcctgtcctagtttatattttagtgttaccaaccttcagtttacccgtattcttcagtaataagcatgtaagtagatgatatgtgttggccatatagctttctgtaaatttgttcatttaactgtcaactcttattagggatttttttgcgtagcagaatgatttgaggacaaaaccagcacaaccaactagctctgtgagcaaaaggcatataaagccatttctgctgtatttgcttggtatgacttccatttaagtgagatctgaaatgaaatgctttctttgtgttctcagtgtgaaattggacaaaagtgaaagccacaaaacaaactggtatactttattatttttgtataattatactttaggcagaagattgtggaacttcttttaatgaggtgagagtaatttgcttagcatctgggctgactgttaagctggtattgtttctgcctttagctccaatgtttcatgttggtgtaggcttttggtctgtttgaaatttaaacataaatatacagccatacgtttctctagcctctctcactctcatgtacctctcccaggctacttttctgcctaaaatatgagcaaaaacacgtagaattatttttcttattactcagctaattcctcatctatagaaagaggatgtcaagcttgaacactctctgattccttaactggccagaatgtacctggttcccccttccctgtagcctgcatttgcatgctattgatcaatttcagtgacaggattggatagaaaaggctcagtaagagtaccgggcgcagtggctcacgcctctaatcctagcactttgggaggccaaagtgggcggattgcctgagctcaggagttcgagaccagcctgggcaacatagtgaaaccctgtctctactaaaatacaaaaaaattagccaggcatggcggtgcgtgcctgcagtcccagctacttgggaggctgaggcaggagaattgcttgaacctgggaggcagaggttgcagtgagctgagattatgctgttacactccagtctgggcaacagagtgagactccatctcaaaaaaaaaaaaaaaaaaaaagtacagtcatcttttagtttcctcaggtgttggttctaggacccccttcagataccaacatctgagaatgctcaagcccctgttataaaatggcatagtatttgcatataacctaagcatataacctgcctgtgtcctttaaatcatctcaagattacttataatacctaatagtgtaaatataaatagttgttatactggattttttattgttgtattgttattttttatttttttcccaaatatttttgatctgtggttgattgaatacatagatgcagaacctcaggatacagagagttgattgtaattgcaaagcgtggaatgtgggtacttttcggctttattttcctatagctttctagtattacctattgaaaagtaatgtttactttaaaaagtaacagtttaaccgagcaaataaggctgccctagaatagaaattaactttattacctaagtaccgaaaacatttatccatttttagatgacataagtaaaatgtcaagacacacataaaaccacttaggtgccctttattatgcttttttctattgaaaaggcagttactgtcacattaaactgctttatcctctactaagtagcttcagcttgtgtagtagagtgttagaattttaagatatattttaatttacttgattaaaaaaagtaaggaaagtcagtcattacaggccacaaagagatccttgtgtgccctcatgctcaaatacatcccccaaacccagaggatgttcattattttcatgaattcaaagcattagaaaagctaatggaagatactcctttgtgctgtgaaaatgcatcaccactatcatgggaaacaggggatgacaagttttctgtaacaggaacagtgaatacaacttgagggagtacagctaagcaaatgatgtcatgtgagtttaaaactattgataccatgcaagcatcaaggaggaggatgtctccaaccaaaacagcgtgttttttttctcagaatggaatggagccagcacggtggctcacacctgtagtcccagcactttgagaggccaaggcaggaggatggcttgaggccaggagtttgagagcagccttgacaatatggtgagaccctgtctgtacaaaaaaaaaaaagaacattggctgagtgtggtggcgtgtgcctgtggtctcagttattggggaggctgaggagtgaggattgcttgaggccaggaggtggagtctgcagtgagctgtgatcacgccactgtactccagcctgggcaacaaagtgagacactatctcaaaacaacaacaataataaaaaacccaaaccaaatggagtcaaggagtagaggaggcaggtgaataaagatagaaatgtgggagtaactaagtgtctgtacgtggatatgcatgcatctacagaaactaaaggcaaggtctctagtgtccagcgtgattccccagtgaccattttctcccacttcaggaattgcaaagtatgaaagcattttgatttgaggctgtagtccctatgcctccctctttctccttgtgcttctgtatcgaaagtgggtgaggagcctcagctgatgggaacgagtgagtgcagagtcctacagttggggtggggagacatgatgatgatacattccaatgaatttaagtaattccttgtgcatcttatatgtattgtgaaggataaccatttgtagtatatcttgatgaaaatgtgcaaatttttttcaggaacactgtctgctttttagattttctttccattttctaccgttctaaagtagtgcaatcacattactttagataaaagagaagcagcaggggaggggactcacctctactctgacatgccgtggtcattgttggcattcaggtatatttgctaatggttttccctgtgtgtttttgtttattcattcattatatccccaccccactcctcgattccagttcaaatcctggttcttccacttaataggtatggagccttgggcgagtttcttaactttactgagccttcgtttccttatctgtaaagtggagatgttatctgcttcataggttatgagaattaaatgagatgatgtacttcaatttacttaatgtatttaaaatacctagcttaccatttgactcatggtaggatgggaccaatctatatattttaatataatatgtatatacacacacatgcatgtacgtgtgtatgtatatatgtatgtatgtatataaatgtgtgtgtgtatatatatatataaatgttttttgacttcttttagtatagaaaatgctaactttattcccaagtaagtgcaagacattttaagatgcctgtggaagttcagacatcataattccctgcctgggactgtgtgaaggtagatagaagactttagttcacagaaacaaatggttacctgtggtaatgtagatgttaacaggatctgttattaatgaatctgttgactggttttccttgctgtggcttgttctaacctttgaaatatgtgttatgagaaaaggggtgctatttttttaatgatgctaacttcattaaagctacctgtaatgttcttattttgtgattataataaacattttttgggataaaatttgtattttagtcctttcaggagaaaatcaagaaagaattttcaagtgagtttcctatttttcttagtctaagtcactcggaagtttaaaccttaatttttgggcgtgcttcaaaaacaagaagaataaaaaaagtctttttaaaatttcttaactgttgtcaatataaacaaatgctttaaatcttagcaagaatctatattttgagactttctttggctttaatacaaattgtacattttagaagatggtagataatttgtgtttgcacgaatgtctgaaagtatttaaacacagtttatgtcatatgctatgtgaggtttatttttggggtggaagtaataagtcctcagtttatgtttactttaagtttttttggttttgtgtttttaaaaatataccatgtttagtgcctatatcttaagaggatgaaaaacagtgttttgggttttcctggatagttactgatatagagccttttccaaagaggatttcacccttaattttattttatacataatcagattttaagctctataaaattttaatttaatgtctaaatttgtatacttgaacttgagttccttggttttaattataaattatatcatggccagatcatccatttaaaggccaattttagtgcaaaaagaacaaataattgctgtagccattcttttgcactcctgtatttcagatttcaaataactggttggtgaacaattggattagcttctaattaatttttattattttggagaaagctttttatgaattgtgaggactgtgactactgtcaagatgtgtatgcctataaacttgttactatatattaaagtcttttgctcacataaatttgtaagaatacctctttgccctaagcaaaatgcaaaagtaatggaattggaactctgctgaaacaggtgtttttagctcatactttgagacgagcctgactagatagcacatactgtgattttacaggatagagaattgtacgctggacatgtaactttcaagttggcttttcccttgggcttagaatcaattactgtagtgtttgaaatgaaggatgtataattatctggaggtttaaccaaggttctttgcatattagaaagtacttagtaggaccaaccctgtttccccctttggtttgtttagaagacttgcactatctgccagatgctgcttcctaaccagtgcagttatgcatcacaccagagaatccatcagcacaaatctccctacacctgccctgagtgtggggccatctgcaggtcggtgcacttccagacccacgtcaccaagaactgtctgcactacacgaggagagttggttttcggtcagtatatcattcacttatgtgcaagtaaaactcgttcacttacaaccgcacagcattttgagtggtttgcacacacagttttctgggtcatacggtgatacctcgattaacagatcctctgggaacctagctcgtttgtagagtccatctgtttgaatcctcttaatgtaatattggccctgctggtccgcacaaagtggagggtcatggggcctgtccttttaggcacactcttgcatgtgtgcaggtgtggctttgactgtcagctttgactgtaccctttgtagcagacttttgttatcatactctttgcattttaacccctgcaagaaaactatacattccgcacctcttaatatttccccttctctaatgaaaacagaaatagtgcgatggtcttttacttttatttggtccacattgaaagatggggtgtatgttccagccttgcactccaaataaccttctcctcctccccactcctcctcctccccactcctcctcctccccactcctcctcctccccactcctcctcctccccactcctcctcctccccactcctcctcctcccctctcctcctcctcccctctccttctcctcccctctccttctctccctcctccctttctcctcctccctctccccctcccttctctccccttctccttccctctccctcctcccccttactcctcctcccttcctcctccctctccctcctctcccctctccctcctctccctctccctcctctcccctctccctcctctcccctctccctcctcccccctctccctcctcccccactcctcctccctctccccttctccctcctccccatttcctccttctcccttctcccccctcttccccccttcctcctcctccctctcccccttcgagttctctcattcctcccttgtctcttctgcatatcttcactgtagtcccttttactgtccctcaggattctcagatgtgcattgtacaacatctggcaaatctaatgttagctagtgttgaatgattatatatatgaacttttctctccatcttatgaccttcctgtgccttttatattttcactaagaagattccaccaaggaaaacatgtcactgatacacagtgtctttgttaatagaggtattactgtattatatgtttatcttaacattaagtatttgcttacctggtaactttgttagattgttaatatgcagtgattttttttttcacctgtaataaattatgttgaataaaaatgaagtccagttggcatgatttgatggttttatttaagtttaggttctggtatcatcagttcctaggtggttctgcccagttttgcattaaacaacactaagctatgagacttaacttcacattttatctcatgcctccaaacttgtaatgcacaaatgttttatggattgagatctagcctggtggaaacctttggcttggaaatcaagaaaccagttttcttgtacgacttctgccagtaactaattatgtggtaattcacgtattctttctgtgccatggtgcctctgtcagtaaaattggtgcattgtctgcctccagctccactgggatgttactgagcaaaacaggataatcaaaggtgccccagatctgcaaagtccatgcagaataatactttcgttcttgccatcacgttttgaaactattattaatggattatgtgtttaataatagaaagcagctctgcagcacttcccaagtgctcttctttgcactaatgtcaaatttttctcaaatgtttagtttttctaatagaatgaaagttgatatgattaaaggaaatatgacttcttcaattttagctattgctgatatctttcctaaattaaaacagaagctccacatgcaggctgaaagtaatcaactcacttgggaaaagaccatccttgctcttctgttcttttgccctactcacagagttgttcaaattcggtatttcaaattgtagatttcaagttgttaaccaaaaattttgtgttaagtgtagatttttttctccctggacttgaggctatatggggctggtaaacaacgatgtgttgtgaagtttagttcatgttgactgctcctttagaagagaggagcaattttaaacgtaattcttttcctctgctgcttcatatgagggtccaggttcatgtttaagtggggcttagtagccccgtggccttgtcatgttttttgctccctttggctctatagttactcattttcaatgtgtcttttctttagccagatgagtctaatgtagcagcatggttcccacgccttactttgtctcgtcttggtgcagtgtgccttgctgtctctcctcttgctcatattacatctcccaaatactgatgggtcatccctggctcctggttaacttggtaaaagttatatattgataaaagtcaaatattttttctgaattttcctgcctcttgatacactggactgtatatctagaaaggggaatggttataggattttatactgtaaatattttttttaattcaaaaaataaagaaactttattgctatccagaataggacttcaggatattacgtatttcttagtagacaggatttttcatagcattaagatactgcatgagccgtttgaagtctgcctttctttgtcttatttacatcccccattggcctctgttgccccctgaaatgcctcttcttcctgtaagcagatgttttatgactttttaaaataccctgctttcgtttcttacattaaggagggtttcccttggtctccatggtgttctctggattgagtcatagccacttcctcttgcttcaaaaaattccatctttattttagatacttcctttttatttgctgtacattaaaccttcctctcactccaagtgactttaggtaattattgcttttctctgtattcctttttgtccttcctggttcttttgctctttaaacaccatctttctatccttcatgggaaaatcttctgtttatagtttatggtgtggtaggtccttcagtttcattaattacccatctacttttgttttacataatcttcctctttcatgggagttgtaggcttctaggtttgggaagagctaaaaatgatctattttaattcttctcattttacaaatgagtaactggcccagagaggagcattaacctgttcaagacaactcagtaagttaacccaaaatagtttcaatatgcttaggtggctctattgcctgaaataccagttcaagtagataggctagagaggctgtccttttattctctattgttatttagtgtttaaacatagctgttgctgaacataatgccttcagtcactggaaatgctaatgcgttagttatgattttaacagaatgcttgcaaagcttaaatagaatgcatacaatccagaacatgccactcctgtgtaacttcggaagcatctccatgattcagaagggaggttctaagaatagaagcatcttagattgtcatagaagtctttggacactgccccccggaaaccaggccctgtctgcagtcttccttccctgggtagctcacatctgggagcacatatgttcagttgtattagaggtaaatttctggagacttttgtacctgcagagagaccactcttaaatagttttcaggtgtgaacaaggaagacttggtcatcaagtggaggtgtaagtgttgcttagagtctttgtgtgaaaaagatgagatagaggagaaatgtatcttagatttaaagtttgtctttgttggattatatttgagcagggaatgagctaattgtgagattactagaaattcataaagtaaggaggttagctagacaattttttttagagatgctgaattttcagaggtttgtaattcatgcaatttcttaaacaaatgcaagtgtacttaaatttattttctaggagacaaaacacctaggtggttgaccttctctatcctgtggaccaccatgaaccccacatacattgaccacatcagtgtgtaccaggaaacagtgggccgaggccttggagccagaacttctttgttcctctctgcccctctgttcttggcatgcaggtttagacactgaagatttcttccattagaaatgctatttgggtcctggagatgggtaggaaactcagggccctggtgccagaatccagcatatgtaacctctccaaaaacagtggtctggagatttgacatccattcttaaaaatgttaaagatgctccaaaaatagaccatttgagttttatttttcttcttcatgatcttttctcttaaacatataaaaataggctgggcatggtggtttacacctataatcccagcattttgggaagctgaggtgggcgaatcacttgaggctaggagtttgagaccagcttggccaacatggcgaaaccccatctctactaaaaatacaaaaagtaattgggcatggtggtacacacctgtaatcccagctacttgggaggctgaggcacgagaattgcttgaacctgggaggtggaggttgcaatgagccgggatcacaccactgcactccagcctgggcgacagagcgagacgttgtctcaaaaaaaaaaaaaaaaaaaaaaaaaaaaacccataaacaattaagttgatttataataggaaaaaaactaaaatatacttccgaagggccattaaaaacctaaaagggctatgaaagtgtgttcatctcacccagtttttgcagttacacgtgtgttatggtcttgtgctaatgaccgtgtgtttatttttctaacagatgtgtgcattgcaatgttgtgtactctgatgtggctgctctgaagtctcacattcaaggttctcactgtgaagtcttctacaagtgtcctatttgtccaatggcgtttaagtctgccccaagcacacattcccacgcctacacacagcatcctggcatcaagataggagaaccaaagtaagtcataccgactttcaagttttactccactgctttattagcaatttagaagcaaggtagtagtcgttctattgaataacatttaccaagatctgaaaaattatgcagctatgccaattttgatgctttatgaaatacagctcatagctcatccaaatctttctgttctttccaggtaaagaccttgtccaaaaacgttacctattatttatgctcttgtcacgaatttttgctcaacaagtaaatatttatatttttttcttaagatgaatttttttttttttttgagacaagagtctcgctctgtcgcccaggctagagtgcagtggtgcgatcttggctcactgcaacctccgtctcctgggttcaagcgattctcctgcttcagcctcctgagtagctgggactacaggtgcatgccaccactcctggctaattttttgtattgttaatagagatggggtttcaaggtgttagccaggatggtgtcgatctcctgacctcgtgatccacctgccttggcctcccaaagtgctaggattacaggcgtgagccacggcacccagcctcttaagatgatttttgacaactcctaggaaaactattttttagaaaccctgtcatctttaaatttttccatagttccttttttatagggtacacttttgcttaaaaagtaatatttttaagatgaaggcaacttaagacactggttactgaatttaacttcatagccagtataagtccctgattagtaaatttttttttgccttaatcttgctcttaatttgattgatttttgctttgtggagtctttaataatgaagcggttctttagcaaaaaggggctgcctgcctgcagtaggggcagcttaacaaagaggagggagtgtgggcactggagccggtcggaatcctgccacccaccggctgggtgacctgggacctgcactgtctcagcggccatcttctcccccatgaagtgagggtcctgcttaagtgaggatgagatgagatgatgtatttaaaatgtgtagcacaacagtgcctgtgtctggagcatggagggctctgtcagcattagttccttcctgtgtgtcttcgctccctccttgtgcacacagcactggattaatgctcctggttgtgctccttttattcctggattagttatcgcaacatagagtttgatcattacaagaagctagatttgctgtccaaatctgttgctgtgtttttgcccataactccataattaaggaagtattagggggaagatacacagctatgccatattttacacacacacacacacacacacacacacacacacactctttctctctctctctctctctctctctctcctggcttttgttgaaacatttagttttggggaaatgtgattgaatactacagaagtgactgttttatcaaaaaaaaaaacatgttgaagttaaattttattttagtaggaccttcattctgatctttgtaggttgatcccaaaatgaaacacattacaaattaaggaatccatacatgtcttgatgtcttgactctgaagatggggattagtgaattttagtgtcttcagttttcaggactgttagacttgtgggtactaatgtagcctttccccctgggatgaatacagtttttatttggttctttattaaaataaataaaatttgattgtcagaaatgtgtgtgacatctggaacagtagttgttacctcagaatgtaaggaagcaaatgattaaaataggctaaaacagttttcttcaaatttgggtattgtatagaaaacaattattccagtggtttcttttctctctctctcttttttttttttttttttttatgagacagagtctcattctgatccaaactggagtgtgatcacacctcactgcagccttgacctcctgggctcaggtgatcctcctgcctcagcctttctagtagctgggaccacaggtgcacacgcataccaccacgcctggctgatttttaagttttctgtaaagatgggattttgccgtgttgccaaggcttgtcttgaattcttgggctcaagcagtcctctcaaagtgctgggattgcaggtgcgagccactgcacccagccccagtattttcttttcttttcttttttcttctttttttcttttctcttttctttgtttcttttcttttttcttttctctcttcccctcacctcccttcctctttctttcttttctttctttccatctttcttccttccttttccttccttccttccttccctccttccttccttttctcttttcttctttcctttcctccctccctctctccctccctccctccttccctccttcccttccttccttccttctttcttttcttttctttttttctacccccgcccccccctcagtctcgctgtgtcgcccaggctggagtgcagtggcacgatctcagctcactgcaagctccacctcccgagttcaagccattctcctgcctcagcctcctgagtagctgggactacaggcgcccaccaccacgcctggctaattttttgtatttttagtagagatggggtttcaccgtgttagccaggatggtctcgaactcctgacctcgtgatccgcccaccttggcctcccaaagtgctgggattacaggcgtgagccaccgcgcctggcccctccctccctccctccctccctccctcccttccttccttccttccttccttccttccttccttccttccttccttccttccttcctaagtgcaagcctaaaaataggtactgtattttaaattataaaaatgaaacaaatttgtagaagaagtggttaacaaaactccaaagccagtgaaagataagttaatcgcatggattcagtgtgagggctggtctggctgcctggagccctcacccgcagcctgactgtggcaatgacggctgctgcaccagctctgttgggcccagtaggcctgtactgcagtgttcccggagataaccctccctcacccccttttccaattaaaactaaggtaaaagctttcatcctgtggctgtttggcctacatttgacccaaaggtttcttttggcattaaatccatctctattctgtttacataagtccaaaatgactaaatagtcccagctcaggcagtgaaattccccagcagtatttgtttaacaggtggttatacaaataacataaatgtatgcaaatgatttgcattacttttttaaatgatcagtgttaaaataacctctcacccgtttttcttagagaacatatggatgtatgaaaaaatacccagcatcccagttcaaaaagcatggcacacgattgttgtttaatttactgcatttactctgtgctgggtactgttgtaagcactttgtttcttgttttccagtgtgtgggcaggcatagtaccctgctgtttaaaaggaaactctgagtaccccttaatcttttctggataatttgagatcattttgactgtccattactatatctttttttttttttttttttgagatggagtctcgctctgtcacccaggctggagtgcagtggcgcgatctctgctcactgcaacctccgcctcccgggttctcgccattcttctgcctcagcctcctgagtacctgggactacaggcgcccaccatcacgcctggctaatttttttgtatttttagtagagccggggtttcaccatgttagccaggatggttttgatttcctgacctcgtgatccacccacctcggcttcccaaagtgctgggattacaggcataagccaccgcgcccagcctttttttttttttcctttttttgagatggagtctcgctctgttgccaggctgtagtgcagtggcgcaatcttggctcactgcaacctccaactccctggttcaagcgattctcctgcctcagcctcctgagtagctggaattacaggcacgcgccaccatgtccagctaatttttgtatttttagtagagatgaggtttctccatgttggccaggagggtctcgatctctttaccttgtgatccgcctgcctcagcctcccagattgctgggattataggtgtgagccaccatgcctggcctatatcttatggtaatgaagttttgtgtctgcttctattttttccttgactgctgattaacagcagtttcttttgctgtgccttccttttatttgcaatttctaaatgtatgtaagtggagaaatgagaacttcaaaataagaattgtataagagacaagagtttttgaacatgttcctgagaagtaaaacacgcaaaattagaatagcagcatgagagaggagtatggagtcagaggaagctgaatttgaactttagccctagaatctgtttaacaccaagcagattatctagtctgctaagtcctggtgtcccatctgtgaaatggcagcagtgtcatctacctcactgtggctgtggggattaggtgtatgacgcggagggtggtgctttgcccctagttggattcagttgatggtaatgtaggaggtttatggcagcaatttcaaagcttggagtcttttatttatttgttgtgacacctgtttgaagtattctggagagtttgttgctgtaaatttgacctgagtatgggtatttggttttagctttttattcttttctctttctccttcctttcccgctccccctctcctcctctctctcttccttcttctccttcccgtactggctttgttgtggtgtagtcaccctgctactcatccgatcttgcatttaggattaggtccagacttccaggtttggctttcaaagccctgcacaactctaaagcaccctctctggccactcccacacccctgggagtccagctacactggggttctcactgtttcctagcacacggtgcccagtagacccctgcctttgtgcagagtggtctctccatcttgaatgctgcccctcctctctgcctggtagccggtctccctggggattttccattttcattggagagtttgctccatcctcagattctgctcctaaaagacatgtctgtgaggtttgtcgtatttggactttaaaaaaaaaatcagctgcagtttgtaatggattttatcctacaaaaaagctggaagaacatggagagaacgcatgcatctttgcatctttttcccccagattcctcggttgttagcgttgcagtcattggtctgtctccctccctgctttgtatttaggaggaaagggggaccatgatgtaaatgctttggtgtgttctgctctcttccacaaaaggaacttgtgtaagtaacctccgtgcagccccccagtcaggaagtcattgttgattacaataccatccaattcattgacttcatccagattcctcccagttgttatgcgtgtctttctcctctctggtccgagatcttatctgggtgtacattttggatttacttgtgctgccttatcagtgtccttccgtctgaagcagttgctcagtgtcccctgttctcatgtctttggccgtccaaaaggggacccaggcctctcctgtggctgaccctcacttggtctgtcactgcactgtcattgctggactcaggcatgtgctcttggtggcaatgcctgggccgtgatgccatgcttttctcaaaggatcactctgggggcaagggcgacatccacctgtcttacaaggtagtggtgatgccacccttcatcatcgaggcgaggcagtttctccattataaagtcaccattttcccttttatatctgttagtattttgtggggagggattctaatattacaccaacaacctgctcagcctcctcagaatgatagctacgtaaatagatggtctcctgttttacacttcctgttgttaagacagcacgtccaaacaacagaatccctccccaaaggaatgtagcatgaacaaaatgagctgtggcatagctgtgaaatagtgatttctcaaaatgtgaaaattgagttctcagcaatttcttagcctagctagtaaatctcagttcttttcttgaggctatccttatttatttatttatttttttttttttttgagacggagtctccctctgtcaccaggctagagtgcagcagcgtggtctcagctcactgtaacctctgcctcctgggttcaagcgattcccctgcctcagcctgccaagtagctgggactacaggtgcacgccaccatgccctgctaattcttttttgtattttagtagagacggggtttgaccatgttggccaggttggtctcaatctcctgaccttgtgatccgcctgcctcggcctcccaaaattctgggattacagatgtgagccactgcgcccggccaagtctatcctttttaaaacaattgtcctatgccaattacagaaaaaacaggaagtagagacaaacaaagcaataaaaatacatatactatcatccagcagagatgctgacaatcctatgccttctctttcttttctatgccctttaaaaaatgtgatcataccatacattctatcttgttatcttctgttttaatttgcatgaaaatctttccatgccattggtataggtctgtgacatcattttaaaaaatcttcatatagtttttttttttttttttttgagacacagtcttgctctgttgcccaggctggcgtacagtggcgtgatctcagctcactgcaacctctgcctcctgggcccaagcgattcttgtgcctcagccacctgtagctcccacacccagctaattttttgtatttttagtagagatagggtttcgccctgttgcccaagctagtctcaaacccctgagctcaggcaatccacctgcctcagcttcccaaagtgctgggattacaggcatgagccaccatgctggcctagttttctatttaaccacttatttatactcttggacatttgggccgttcacaacactaagcagtttcaaacagggaggaagtgaacatctttgtcacacctgctacggttaatgatgacaaatgattagtatacaacattgtgctgcattgtacggccccgaaaaccttgtctgcttctcaacaccccctcccccaagggtacttgtgctctgcagtaaagtaactaacatctcaagaccttgtaaaaacaggccaatccagttaaacttataaatcttacggggaaaaagagaaaaaagttacatctgtaactttggacagagaattgcacagtgaggtttgaagctacatgggaagtcctctctcagggccctgagagagggaaggcaggtggttttaggaggcattccgttcttcaactttgccgtaggaatgccaggtaaaacctcaacttctctcttttcatttctgaccctcacatccagtcagcttttctctgaccttttcctaagcggctccttagaattctttgtgcccattctcacagttctccagaggaaatacagatgcccataggccctctcctatgtgccagggtgacccagagcagtgactaaaaaatggtgacctgctgccatcagagctgttctcaaatgaccgaacacacatccattggaggcagaggccggcagcagggtagacgcagccctttaccctctcaagacatctcgtgccctcgtttcagtagagagtgtggatgggcaggagggattatgttcagaaggttcaggtctgctgaattcatttgaggaggctgcttgttagtaacatattagtcatggaaatagtttgtaggagacaagtgaatattttaagtcatttaaagcgtaagaaacattcaagcattgttgaaataacagtggtatcgattttattttctgtttcttgattttactgtatatttgtttactggtgtagggcttcctgtgttaagaacaggtatagaaatattgacattcaaatgtaaaattgctactgactctaaatgaaaactttggagttgagtaggcctatttagtttattaatcagattaacattcttttccaagttagggtatcatcattgccttgtctgatcttaaaaaaaaaaatctttaaaaaaaaaggatgcttttgctctgtgttaaagtaacatgaagactttgtacaaacatgtgccagttatagatttgtgaatagtaaaatggtcattaatttagatttctaagtaaatgtagctgaatgcatctttactgaaaatgttaaggttgatctatggttgagtaatgccagttgtcttcaaaagtttgtttcagagctaatcgttgttctatttattgtgtttgtgtgttctcaatgtgcctctgcctcccaagttcttcagctataaagtagcagatcctttgacttaaagaggctgactgacatgatctcgctgcactcttctattttagaataatatataagtgttccatgtgcgacactgtgttcaccctgcaaaccttgctgtatcgccactttgaccaacacattgaaaaccagaaggtgtctgttttcaagtgtccagactgttctcttttatatgcacagaagcaacttatgatggaccatatcaaggtgtgtgtgcatctatcctctactttaaatgaattgcagatccattcattggtcataaatcaaggctgagctgcaggtgactctaaagcatgcctcactgtcgagggaagggatggatgctggtcgttgtcagtgagcaacttacatgctgtcatcatgtgttcacttgactgtggtgcttttcattcaggagtcctgatctgcctactaaagattagtgaaaaggaaccaatgtctgccctgattttaaaagagtaaaaaagtactaagttttttgttttttgttttttttaatatgtgaaaatgatgactgtgaagttttcctttcctttccttttttttttttttttctttttgagacagagtctccctctgtctcccaggctagaatgcagtggcacgatctcagctcactgcaacctccgcctcccaggttcaagtgattctcctgcctcagcctcccgagtagctgggattacaggcgtgtaccaccacacccggctaatttttatatttttagtttcaccatgttggccaggctgatcttgaactcctgacctcaggtgatccgcctgccttgtcctcccaaagtgctgggattataggcatgagccaccgcgcctggccgaagtttttcttttcttgagaattctgtaagacttagaaacagacaagggctctgaggaattatgctaattcacacaaatattggtatatttagaaaaatgaaggttttttcccttgaaattatttaagcagttaggtttgcattgtaattaatgcccctaaaccttttagtttcttttttttttttctgtaaagattgcattgtaaatggactgttaaatatctaggatatagtatggtacctggcacctggtggtgttcagttaatgaaatgaataaatatccagtgtggactgttttactctccaacccccaaaaggggcacagaaatctatttatagccttttaagcttactaaggccagtgcttagttctagctgcttaactgtccactgtaatatgttaagcatttttttttcccttgtgtgattaggagataatatccattggctttcagagattaaaatgacttactttttaaacagagaaacaagagaccccatattatcaggaactcaatctctttcttttagttttgctcttttaaaaatacattatacaggctgggcacggtggcttacacctgtaatcccagcactttgggaggccaaggtaggcggatcacttgagaccaacatggtgaaaccccgtctctactaaaaatacaaaaatcagctgggcgtggtggtacatgcctgtaatcctagctacttgggaggctgaggcaggagaatcacttgaactcaggaggcagagatctcagtgagctgagattgtgccactgcactccagcctgggcgacagagcaagactccgtctcagaaacaaacaaacaaaaagttacacaaaaaaggtcagtttaaagcgcaaagtccctgaattattctagtctcatgtcagctaagtgcctggattatgaatccttgacatttcctgtattaaacatgtgtgagttcatatagagtaattgcttaatgcaaatgaacatcttggagattctctccttccaggcaaggtaaagatagtggtggtgatggcattacttgggtgaataaaagcatgggagatgcatttcatcattctcatttgaagtacagtaaaaccctcttaagatactttaactattttagctaaaattacataattattttgacaataaatatctatttaatgaaacaccaggaagaatttaaaactgctaataaaaatttagggatgttggaattaaaccaaaatattttaacatactacatgtgtgccaacaacaaagaaaagaacagttgcttcttaagaggcttttaaggtatttggtttctagaactcatctttgcatctggaagtcgggtcatcgactttgtggttagggtcttccttgtgttaatagtgaatttggaggaatacaaggttccaagaaatagaaactgaagaggggtggtaaaatcctgtggccacaaggaggaaagaattgttattcatcttaacctatgcaagactacatgatacgaaaacagtgggaataatcacttatgttctcatttcatgtatgttctatgcgtttaaaaatattatcctgcatttatatgtttggggttgggtaagcatagttttaggggcatactgttttttttttaatttttaagataatctatttagctcttgttatttatttacattgcctgtgctatgcagtttttcatgaggaaggaagaggaagtggaacaggcacaagttttctccacatacatattcacttaaagatgggctcttatttgcccagtttaatccaatttgtgtcattttcttctcctaccaaaatataaacttgtaggacctccatgttgacatttatatttaaacttttgagttacagacactcattcaaattaattattgttataggagctaaggaaaaatcaatttgaaaagaaataagttgtttctttatttaaaaatgacagtatgaatgaatgaatgaggcatgtcttgccatgttgcccaggctgaacctctggtctcaagtggttttctcaccttgaccttccagagcgctgaaattataggtgtgagccaccattcccagctgacatttgcttttcagagtcttttttttttttcttttgagataaggtctcactctgttgccccggttggagtacagtggcatatcagggctcaaggcagcctccatgtcctgggctcaggtgatcctccaacctcagccccccgaatagctgagactacaggcatgcgccaccacgcctggccgatttttgtattttgtattttttgtagagacagggtttcactagttgtccaggttggtcttgaactcctgggctcaagtgattctcctgccttggccttctgaagtgctgggatttacaggcctgagccactgcacctggacttagtagtcttaattttacttgcagtgtaacttgttgcttcttttctgtaatttctgtagcactttaaggttatcttacagaagaatattttaatattttatcctttcttcagcttatcagttagtaaaaatgcatttgcctagaaacttatgaaaagttgctagagggttttaggttttgttttctttaggttttaaatagttaaaaatggaaaaacttagcttctcttttgacaaagagcaatgaaacacagaagccttctgccctgagtggtgggcatgaagcaaggcatagtttttggctatcaagaaatcatgtcttgctccagattttctctttgcaaagaacatggttagacaatcacctcagccctcgccctgttgtttttttttttttttttttttgagatggagttttgctccgtcgcccaagctggagtgcagtggggagatctctgctcactgcaagctccgcctcccgggttcatgccattctcctgcctctgcctcccaagtagatgggactacaggcacctgccaccatgcacggctaattttttgtatttttagtagagacggggtttcaccgtgttagccaggttggtctcgatctcctgacctcgtgatccacctgcctcggcctcccaaagtgctgggattacaggcgtgagccactgcgcgtggcccacctcagcccccttttatgggccactttcactgttgcctgtttgggtagaccttgtgacttcagctggtgagaaaatgatagaacccctgtttccctctggtgaaaaatgatgttgaggaaggttagctagttcttggcactgtttagagaagaccttgccttgagaaaatgtgatggagagtgtcctgaaggaatggcttctttcttaaacatccaagaaggaatgtggagctgaggtctatcagtgtgagtctctgtgacccaggggaactcggatgtgtgaaagcctcttaggaaagatttttaatgttgtctttctgtagattcaggaattcatggtttaactgcaagcctgactgctagtaagaagagacggccctattcaaaaataaattgtatattgtatacagaggcaaagattttattttttgctctcctccaccctctttttttgtttttgtttttattttttgagacagggtcttgctctgttgcccaggctagagtgcagtggtgtgattgtagctcactgtaaccttgaactcctgggctcaagcaatcttcttacctcagccttctaagtaactgggacttcaggcatgcaccactatgcccgagtaatttattaatctttttgtagagatggggtctctctgtgttgcccagactggtctcaaactccaggcttcaagtgatcctcctgccttggcctcctgaagtgttggaattataggcgtgagccactgcatacaccccaccccgctgtttttattccatgcttttacaatacaaaacaaaaaccaaagtgagctggtctttagaatcaaattgcactaattttgcccttttcaaatttgaaatccagtgagtttaagttgaagatggctgttgtggccattatgttaatgatgatagttagctaagcaatttaaaaagacatgagtatctaatgtgtgtagttctcaagcctggctgccatcagtaagaaaggatgggtcgggataggatgtaaggagatgaaaattcctgacaaaacccagcaaaaacccagactgttactagtattccaagaatgtgaaaggcatgaagagaaaaaggcttgctatttactaacgtattgatcttagatgtttgctcaagtcagtttgttctagttgaattcctaataatgtattagcctatttaaacatttccaggctgatgggaaaggagagagttgttccgaaatggtttgttgtagagaggcctccctctgggatgttacaggaagataaagtaccaggattaatttgtgttcaatacagaggtctttctttaaagaattttaaaatggtacaaatatataggcctttaaaaagcatttggaaagagaaatgcataacgtatagcagacttttatctcttttgaaatgtatatttagcttaggtttttttctttatatattaaatatttctgaatgaatataaactggtgttgaaatgtgtaccacatgttaagatagcatacttgtgctttcttttagtgttgtgatttgtgatagatatttcttttctttttataatgtagtctatgcatggaacattgaaaagtattgaagggcctccaaacttgggtataaacttgcctttgagcattaagcctgcaactcaaaattcagcaaatcagaacaaagaggacaccaaatccatgaatgggaaagagaaattggaaaagaaatctccatctcctgtgaaaaaatcaatggaaaccaagaaagtggccagtcctgggtggacgtgttgggagtgtgactgcctgttcatgcagagagatgtgtacatatcccacgtgaggaaggagcacgggaaggtcagtaaagaatgaaagctgctctgggtgagtgcaagagagggcactggactggcaagcttccaagatgtgggctcttggcttggctctatcagtaattagtgctgtgaccttaaaaatcacttggtgtctctctgcctcacttctttatctgtgaaatagaccttttcaaatccttcagtcttcagttttcctggtcattgccttcacatgcactcctccagactggtgtgcatgaatgtggtaagttacctatcacattcatatttatagcttaggaaagagaaaaatagtaaaccaaggttaaagacatttgaatttacctctatccttgtgccagctaaggaagaaaggagcagagaaagacagtggaaatgttgaacattgccagtagcatttgtgtgacttacatgattcttccttgagtttggtagtgggaagaggaaccacatcctttaacttccagtagaagctctgtaactccaagtcactgaaaaatctgagtcacatatgtatatcctttctcttttaaatagtaagtatatgtctccaactgataaggaatttaaaaaatacttattagacctaataatattagcaaaattatttttcagtattatctaatactgtattaaatacaatattaggctgtattcacatttcctgattgtctcaaagttggtttgttatggtcaggacccaaaaagtccatatattacatttggttgttgtgtaattctttattttacgtagtcctcctttcattttattttttaatgtatggttgatttcttagaaaaattggattgtttgtcctatatataggttgtccctcactttactagatttaggtaattgatacttttttttttttaacttgttgacactaggaaccaacatggaatttgctactttttttttttttttttttgagaaagagtctcactctgttgtccaggctgaaatgcagtggcatgatctcggcttgctgcaatctctacctcctgggttcaagcaattctcatgcgtcagtctcccaagtagctgggattacagatgtgcaccaccacgctcagctaatttttaaatatttttagtaaagatgggattttaccaggttggccaggctggtctcgaactcctggcctcaggcagtccacccactttggcctcccaaagtgctggattacaggcgtgagccactgtgcccagctggaatttgatactttttgacaccgtttaacttgttcctctttatctcatattcctggaatattgattagatttgaattttttaggtaagccttgtcagctgggcatggtggctcatgcctataatcccagcacattgggaggcggaggcaggaggattacttgagcccaggagttccagggtgcagtgaaccatgatcatgccactgcactctaccctgggcgatagagcgaggccctgtctcagaactaaaaaacaacaaaagaatatgtcataggtgctgtattctttttgtatttcatcatgaggaacataataccagctaccagcttgtctcatttgtaatcctaatactgagattgattagtgggttcaaatacgtgacgttttcaaagaaagtcatcttactgctttaacttaagccaatagaacaaaatagtcatccgtagtgagactatatagagagtacatagaaattgttttgtaattagtatacactacatctttgagcagtttgctctattaaatgtgctaagaactattctgtaatctcatttatttgtactatttgtttgagctgctcatgaaactgacatgttttactttgtgattatcccaaatggcctgtgaacatggctggatcacaatattcacaaattgcaaaaagatgtttttattgtatttggtctcactacagtgtgtcttgatataaaaagtagttacttacagaatatatttggctttagtggcacattgcttatttaatcatcttagtctcaggctttcctactagcattgtacagtgttcattgtaaatactgggtagtttttaaggagcaatacttcaataatctacggtataagtacactgccagggtgctgtcagagtctgatgtggtggttctagggagtcttcacttggcacccctaccagattgcataagagtcaaacaggagctggccttcgtcatcatccggtagtccagtcctttcatttcgtgagatttctgtaactatcttgtaacatatcagaactcttttccttttttaaaaaactatctttatcttacatttgagataatgattagatctaggatatgagaggaggagatggtttcaaaaaggttggtgggatgaaatgtaccactgattgaaagcctttgctctggacctgcagcagagagcccactctgaattggatgtgtgtgcacgcatgtgcccttggttttgatggagatgttcatcagaatggaaatgtctggcttagcataattttaggattggctttgaaggagttgaggccctgcctttggaatgaggcacatcgtattagattgtagtttcaatcctgttccctcagcctcctgagagaatgaaggagatgagtgggtgaggagaggggaggagcatcttcataagctagtgaaatgaatggtgttgagtgtgagagttccaccatgccaagtctcactggagcacccacttccaaacacccctctacaagcatcttatatctatctccattcatttctcctttcctagaatacttaagtcacccaaacttcaaagcccctgtgctgtcttttctccgtcttccttcagacaaccaggcgagcaccttgctgtctatatctttccttcccatttaccctgggcttgccaccttatcactgaacccagttctctggtgacccctttgttgttaagtcgttggatgtgttcctgtctttacctccactcaccccacagcggtgtttcacatgattagcagttctttctaaaagcattttctacccttattgtggaataccactctctcctgggttctctcaccattaccggaacacccatcaggtttctgtcctagaaacatttaactttctcttgggaaaattcaaccactcttataactttgcttctcgtgtacagtatatatacagatagcacccaaatctgtgtctccagttagttgaaaagtatttcttgaattaatagaccaagaatgagttctgatttggaagacatctaactcctcttagacttaacctcctcttctttaaaatgggtacatatttagtgatcttccagtgtcctgtgttgtaaatacctagagaactgtatatgaagtgataagtattctctaattcctatgggtttaagatgagatatcaatatgaaatacgctatacacatataagggttcaaaaattgtatttggctaaaggtctcaggagagaatacagtttaacttccaccagcccagaagtcattggaaagatccaaatttattggattacccaatgaaatattatgcattaggataaatatgtcagcgttctgaaccagtgaactttgtatacttgattttagtatcataattatgacttaaaatacatatatatatatatatatatatatatatagaaataaaataacttggggaataatctaaacgtattctgccaaccacagtacagtcattaccttagtgttactgcttctagtatgattattattttgataagatttggagtaaatatttcaggttaggagtaaatttaactggcataagttaaaaatttatgtcaaaacattagaattcactgctactcattttagatggccattttggtttcattaattgtttttgacctttcttccccttctcagttcccatccagaagaactttactaaaaagaaatattctgtatacagttcaatttattgagtaaagatattcagtagctttgtttttaagattcagaactggccgggcatggtggctcatgcctgtaatcccagcactttgggaggccaatgcaggtggatcacttgaggtcaggagttcgagaccccccctggccaacatgacgaaaccccatctctactaaaagtacaaaaatgagctgggcatagtggcaggtgccttgtaatcccagctatttgggaggctgaggcacgagaattgcttaaatccaggaggcggaggttgcagtgagccaagattgtgccactgcattccagcctaggcaacagagcaagacaatgtgtcaaaaaaaaaaaaaaaaaatacaaaaacctaattctggctctgctagttattcagtagcttttctgtgtctctgatgctctttttaaaaaatgaattgtcagtatctactttcagtggtttttaacttttttccagttatttgtcgtaatctgatatcaagtcaaatactttaaaaaaatattgacagatattcagtgcatatttattaaaggcgtaatcatcttaaaacctacaatttgctgaattactgctttagctatttaaaaaagaaaaacagttaaagcagcagcattttaagaagttcttgttacaaattctatatacagaaagcagtaaaaaacttaccaatttctctttttaaagttttttctcaaatgcttatgtattatctaatttttattgtgctttctaaagttggtattattgttttgttatggccaaattttagctgtccttgtaaatggtaaagtctttgagggcaagttgtatgtccattttattattacagtcttctatggtttacagcattgtgccttgcagagtatctctggagtccctgattgaagcagttctctttggattgttacttgcacatatgggaaggggctttgtgttagtcacagatacacacaagttgcagtctaggttcaggtacctaactagctttctaaccacagaaatcccaccacctttgtagtctctatattctcaactataaaatcaggaggacgggcgtgtcagtgtcacattaacctgatgatctcatcccagccgtgagcctttcctcagatccatgtacaaatgcacagagttttacatacaattttaggtgggttgtggatctcctgctcttcttttttgttgttctagaaggccttttaggaaccaaactaagatcctttgaatgagataatatctgaggtcattcttagagatcaaacattctgtaattatgtgagccagtattaaaattaaaaagaagttacatgttatatgtacctgttcaaatctagaaaattacaacacaatctgtgataattgtaatcattctctcatttgctgcctggttctcctacacatcaaggaaccttaacttattaattgaaatatcctaaagcagaggcatatgtgctgaattacggaactctggtgccatcaaaatgaaccttagatcttttcagttttttgttttttgtttttttttgtttttttttggtttttttttttgacaaggtctcactctgttgcccaagctaaagtgcagtagggtaatcttggctcactgcaacctccgcctcccaggcttaagcagtcctcccgagtagctaggactacaggtgtgtaccaccacacccagctaatttttgtgtttttatagagacggtgtttcactgtgtcacccagttgaactcctgggctcaagtgacctgtctacctcggcctcccaaagtgctgggattataggcatgagccagtgcactcggcctcaagattcttcatgatgtagatagatgtggtccagtactgtgtctgtaacttgggaagagcctgggagacttgggtatatattctggcaccacaactaccagtgtgactttgtgaaaaaataattaacaaccaccatcttccagcgtcagcttcagtttgcataggtctaaaatggaaatatttaccacctaagagtctttttaaattaaataaaatgaaagcatgtagcacaatacataatagatgtttttctctctatactgtatttcctctctgaacactatagatttttttaaaattaaattttgctagaaagcagctcaccaaaatggaaggttctgcatacagagacgttatacatttaccacttctaagtagatttttcttctttttttatttttttgagatagggtctcactctgtcacccaaactggagtgcagtggcacgatcttggctcactgcaacctccacctcccaggttcaagcgattctcctgcctcagcctcctaagtagctgggattacaggtgcgtgccaccacgcccagctaatttttgtatctttagtagagacagggtttcaccctgttgcccaggctggtcttgaactcctgacctcaagtgggattacaggcatgagccactgcgcctggcctgcttgactaatttaaaaaaattttttggtagagatgccttctgatgcccaggctggtcttgaattcctgagctcaagtgatcgtctcatcttggccttccaaagtgtcgggattacaggtgtgagccattgtactgggccaattttccatctttacatggggtgaaaggagattgcaaatatatgcatgtcatggagaatgagctgtggccagataccctgcttgtgtgaaaggagaaggttggatagattcggaagatttcagataaagtctatctgaccttacttgagcacagccatttcagagaacagatggtgaagtagctggttcctgcctgagcactgggcaaaagaactaggcgaagactaagaacatgtgattgcagatcaatctccttttctttacagagggaccagttggtaggtagaataaccctctagacagaaactgggtttcagcaaaactgttgacagattctgtctgttttgatactgttctgtacagtgtagtgcaggagggcctgggtgaaatattgcatggatagctgactcatggctcactgccttgttggagagaaagcttccatcttggatcagattttcctcagtctttctatcaatgacttaattataggaagagaagctaggagggattttgcaaggcagatcttaaatgcagagcttttcacttaaaaaaaaaataaaagtacacagatattatgtgaggtagatatggcttagctaagttctatgaaaaagtattctgtctttatttgactatcttgctataacccatccttctttgtggctgctgatgtagcattcatatcaaggaaagctaacacccttcctttgacttggcaccataatctagctggcggttcccaagattggagtgtgcgtcagaattaactggaaggcttgttcagctagttgctggcctctaccccacagcttctgattcagcaggtctgggatggaacccgatcatttgcatttctcacaagccctagctgatgctgatgctgatgctgctcatcttgggaccatgctttgcgaactactggcttagtctgagtggcagtacaatcccccaaagcccattgatttatccaataaaagttcatttcttgcacatacagagtttgctatgcagagtttgcatttctccggggcagtcatcccttccactggtaactcagtgatcaaggctgtttctttcagccccattgtctcaacgtaggtgttactgaaaaaaagactggcgagtcctgcctggtctttacacgctcgttattctggatatgatgcacaacacgagtcattgcccagaatgaattatgtgagcagccccaagtatattcccgcgtgtaccgcaaaggggagggaatgacaagtagtatttgtcacctgcagtaaggtggccacagtgaatctaaacagggaaaggttccattgcatcgatttaagatggatgctgacaactagcagaggagggtaagcagaatgctgagtctagaaacagtggcaggaggaagagagaagttggggttaaggggagctttgatagctgtcttcagatagatgtcctccatgtgaggaccagcatgtgataattccagaccagctggggccatgcatgagtgaaatgtctgcctatctgttgctggaagtattcaggtagtggccagatgctcatctgtaaaataatggaatagaagggattctagggtcggctgggcatggtgggtcatgcctgtaatcccagcacttttgggagtccgaggtggatgtatcatttgaggtcaggagtttgagaccagcctggccaatatggtgaaaccccacctctaccaaaaatacaaaaattagctgggcatggtggcgggcatctgtagtcccagctactcaggaggctgaggcaggagaattgtttaaacccgggaggtgaaggttgcggtgagccgagattacgccactgcgctccagcctggatgacagagcgagactctgtctaaaaaaaaaaaaaatggattctagggccaatgtgacctttctcctcggacactggaatgaaaggaaactaccagtggtaatctatgtagtagccattgctagtgtgaggtggatattttaaaccagtcacagtctaaaagtcattccatggactaaccaagtctctgtggaaagcatttggtttcacagttaatctaatttgtggatcgaaacagaacttctaggaagaagtccttgtcagcaggaaggctacagggggagcagtgagtctgacttggtagctgcacacgagaatcacccggagagcctacggcccagcacacttggtgctcaccagaccagctaattggcatcactaggggtgggacctggccctggcattctttttttttttttgagatggagtctttctctgtcgcccaggctggagtacagtgacgccatctcgactcactgcaagctcccaccctgggttcaagcgattctcctgcctcagcctcctgaatagctgggactacaggcgcccaccaccacgcccggctaattttttgtatttttagtagagacggggtttcaccatgttagccaggatggtctcgatcttctgacctcgtgatctgcccgcctcggcctcccaaagtgctgggattacaggcgtgagccaccgcacccagccggccctggcattcttaaagcttccaggtgattccagtgttgtggcagggctgggaacactcataccacctgggatctgccgcacacctgcccttgctgctgatgctcattgctgtggccctcactgtgtgactgctatagcaccaacacacctttgttgagtttatgttttggggaaggttgatctcaagtgtatttgtttaaagactccacccaacgttcactcttggtggtgaaggcaggggacacaactctctggatgttggatttacagcattagtaagtctgttcaatataatttaaagcctgattataaatgattttaggatgtcttaatgtttctgttcctaaagcctttaagaaaagtccatagatttcatctgcattttccatacagggtgcaggtgataggtgatttgaatacttgctattttgtagcctttcccattctgaaattcactttcagttcactcagagatgtaggtgaaagacagcagtggcagtgaaggaaagtgggagaatgaaaggatcagagtgtggagagatgaccacagccactgaggcaggtgtgctgttgttacttttgaaaagaatggcaaggcaatcagcttgcatttcctagtttgggaccaccatgcttagaatcagattgactgaggagctttacagagactctcacttgcacagtatttaaaagaaaaaaatgtgtgtgtgtgtgtgtgtgtgtgtgtgtgtgtgtgtgtgtgtatgtatataaatttttaaagtgcccacttggccgggtgcagtggctcacgcctgtaatcctaacactttcagaggctgaggcaggaggattgctagagcccagagcttgaggctgcagtgagccgcagtcgtgtcactgcactccagtgtgggcaacagagtgagaccctgtctcaaaaaaaaaaaaaaaaaaaaatttaaaaggtgctcacccacacaacctggaacctagccatgtgtatgaaatgtgtggtagggcataattgccccccttaatctccctgaaacttgtttagataactttgtgaaataaaacgttacatctccatgttgtttctgtcttcgtgctgtactgtggtgatggccattagttaaggggataaaaatactgaaatactgtctagtttgcatagttcattgccagatggtttcattttcattcttttactgttagagttcatcctgttgtcattaggcatgccttactacaaagtctcttatttaatctaaatgtagggatataatagatttttatccttttaaaactcatcttttagctatggcgactttgacttcctgccaaaatcctgttaccctagcaacaggtaaaaaattttttaaaaaaccagtttctcctatcttttttggcttagaacttatttgtgatctcaaggttttaggagaaatatctttaaatcagttgcatgttctcttctatctctggttgactgttagagagtgatggcttctcacttgattctgcatttgtgtcagatgtgattaaaaggcacattaagagtttgtatattcatgctagaaatgtatatcactgctggctttatgaaacttatttttcattagttttggccactggaattgatattttgtttgtgtgtgtgtgtgtgtgtgtgtgtgtgtgtgtgtgtgtgtgtgtatacacagtttttctttttttttttagacagagtctcgctctgtcgctcaggctggagtgcagtggcgtgatcatagctcagtgctacctcacactcttggtcacgagcaatctgccagcctcagcctcctgagtagcagggactacaggtgaacaccaccatgcctggctaatttttattgattttcatttttttgtagggagttcggggtagagggagttgtctttgttgcccaggcttgtctcaaactcctggcctcaagtgatcctccagccttggcctcccaaagtgccaggattacagatgtgcgccatcacacctggcctataattttattatattctaaatatttttacttcatatatttcttatatatttatatactatagatcatatataatacatatttcttatactatataaatctataatttttaatactaacttttattataatttatattttattagtttatttgatattttattagtatggtttactatatgtagttttctgaagtcctccacttgatttaataagaactttttttaatgtaaggctataaatgtgttgtaaaaaggatgttgaaaatttttggttcagagcatattaaagtacatattgaactattggtgattttggtagcttgtggctaaattggaaggcggggtgttaaggatactggggctaacactgtctgagggcttaccctacttactatctcattgcagcaggctcctgaggggagacagttacgaatcccacttttaggtgaggaaatgaagcctgagaaaggttcaataacttaccccagggttttgcagcctgccagaggcaggtttctagcccagactctgcagtttgcacagaatgaaagctgacatttcaaaagctgcttaattttagtctccttgaatctttcaatatagatgtgggacagttagcagatatgtctttccatccagtttttacttctgcttttgatgtagtcattttcatttcatttaggtgttcaatcttggttaaagttggttatgccatcattaactggacgtgtgtgtagttttggaagactgtgaatgtcctggttttatattccttagctggggtctgatgctttctggaattacttgcagttgctgttaacagcatcatggtgtcgttaattaattgggcaaatcttcctgcagaattatgaaatgttttagagtggcttgaatttagcagttgcctgggatgtatctgggggctgcatggattgtagcagggcctgagccttatgagggacagagcctcttcctgcagtgtctcggaaatctggagaaatgcacaagagagaggccctttcttgactccaggagttatcttaaagcagaggctctcgaggcagagagcacagttagaatcagggtttttttgagtctggttatgggggtttgggatgtggagaagtgggtaggacctgggtaggagtgaagtctatttttaaatttctctagataattgtgttaccttcacacttacatacgttccctcctactctcctaccctctctcttctccttgagtagttctgctgtaaagggattaagctgagagataagctatttagaggattttgctcttaatgctggagagtttataaaagctgcctaacaggaagatgagattggagaataatttcagtttaggagttatatatttttaagaatagctagaaaaaccatgagtttttactttgggaattatctttcatttaaaatgtttatctaaaattacttgccttggtgtttataatttgtttctaaattatattttataactattatgtgttttagcaaacctgtttatttttggatcatgaacaagaatctggaaagccccaagcttgccccagtaccaggcaatttcactgaactgaaacaaagtgaaagatacaaagaaggaaccataaggtttgccctctaaattgaaagaaaatgaaatgacaaacgaccagattccatttctaaaatttactgattatttttccattagggacagaaaaataaatcctttcaagaaagactaacacgttattttgaaaatgtgacacaaataagactgtaaaatattagtccacatcttgtgtatagccagaaaaggcatttttttgtgttttttttttttttttttttttctttcaggttcttaggaagatatgctctttactgtgacatgttgctgcttggtcagatgtctgtctgttggaggcatttttctgtaaactcacccgaggttgctataaacaaggttgaagggctataaatgtgtatttatgtatgtcctgttatgtggtctaagggaaaagctgtggctttattaactcttgttattgttatggtgtgcacgttttctcatgacactgcatgagagtatattaatgtacatcccactggatattaagtataaaaaccccacatcgaaggatgtgcaatgaaattattaaagtaatagcaagacaaaggtgttgaatctggtaaccaggtcagtgggcttctttctgaaagtctgctaggatttaggggctggtaggcctagaggtagaatagctggtggtcccagtggagggtccccaacagaaccaatccccctatcattagaacccattgccagataacaaagctttccccgatagaccctacacagctgccagagcatctcttggaagtgtgactgtcataggtggccctggagccctccatgatcttaccctgcctccttttccacctctcctccccctggacccttgcctattcttgttccagcaatacagagctgctcgcagtttcctgacatgtgccacattcttccttgtctttgttgctttctgttccttttgcctggacatacctttccttgctgcattgcctgcctgtgagctagttatcaccagtaggtctcttcatccccaccctgcccccccgtgcacccttccgtgcacctgtggccgcctccaccatactttttttttctgctgttgttcaacagattataatctcctcaagggcatggagagcctggcaagttagagtcggagctcggtaaataccgtggaaggaattaatcgaaacgcacggcattcggtctcccacggcctgctgggttgctgaggctgcttcagacctcagtttggctgaggactggctgtggctacttaactctcaccacgttttattactatagatttgcaccttctaccttgccgcatggcagttgcaagcctttggccagaattgccggccgaaagggagtggttcagtgcaggctcattaaacatgtgttagaaaaaatcatttacagcacttgagctgtggataccaagctgtatctttgcacatgaagtacagcacatatggtactcgtctctgaaaagtcagtaccctacaaggcatgcaggcaataatgggttagaacatggtgcttaagaacaccacagtgactaagatgtttacagacacttaagacatttgtagttcattgcctaccagggctgctgttattttggagaccaaggaagatatttcctcccctggcttttcctgtttatctctaaggggcccagaaggtagaggctcccttgacactgggctggtgctgttgctgagacaggaaaaataggagacttggtgcctgtctttgtctgctttgggagaatataccaggacttcctggccaaaaatatttcagattaaaaacattcccatagccagagactaagctccctcactgtcacaaacaagcacttttccttccagctcggcttccagtgcccatggctgcagcgagtctagctccttacccctctcttccttttggcttggagattgggttctgctgtctcatcatggtgctcccatacctggaagcttacagatggcaaagccttggcttctggcagacccaggccagtgcctccctgaaccttctcccttgtcctctctcaatctcaagtcccttcttgtgacccacggttccctccctgtccctggaatccatggcaggtagagcgtagacatagatcccttggggtggtgggagtgggaggagtgtcgtatctctcatgccttgaagagcccagatttgcgctgggattaggtttcttcattgaatcagtgctgaaaagggtgatttgtctctgttgcattggttcagtgttgtgattctactgcagtgcctggtgaggctgttatggacttggcctagaatataactgtcatttgtaatttctttaggaaaatgtgttcctcaatccaattggcagaccagattttcagattttaagaatttaggacatgattccgtctgtaaattgacattaccttgaaacctaaaacaactagaaaataacttagccacaggtggggacatcaaagaaaataagaggccattcccgggcatggttgaatgaataaggacttgtaagatagacagcaccagaaggtaactgggaggtaggagatgcttgctcgctttagttttaagttgggaaaacttcagacccagagggattgtaggactttttgcagagcactttagctcttgtgcctgagcctcggggtgtgagcttttccacagccacctcgagttgtgagtgagaacacagtcttactgcttggcaggaggagagctggggcctagggtgagaccagcacagaggaaagttctgtccagtctgccaaatccagcaagtccatgttaatgtccagttggaagggtggttcagggaggaagatgggctccactctcataccctttcttcatgtctcctcaaaaccagtcattgcaacaccacaatcaacaccgacacggagcacagaggggcgtcttcatcgctgcccggcagcttggtctctcacctgggtacacagcaccttcctgggacactctaaggggtcacttgtgcactgccctttttctgttacaccttcagatatgatggttgattatacctactggtgggaccttattaaagtggtcattcaggcagttggaaagttcctatatgatgtggggctgggactggagaaagtgacatgtcatcattaggttagcttttttgacatttgtgtttgcttgtttactttttaatgttgttaacacattttttattgatctgataaaaacagcaattatctttaaaaggaatgattagtttcttttgtcttttgatttgtggaaataaatactagaaagattctatgtaagtcttcaagcggtatttaatttttattatgtagcaatatttgtcccttttttttttttttttttttttttgccccgagatggagtctcgttttgtcgcctaggctggagggcagtggcgtgatctcagctcactgcaacctcccactctgggttcaagcgattctcctgcctcagcctcctgagtagctgggattacagatgcatgccaccactcccggctaatttttttgtgtttttaatagagatggggtttcactatgttggtcaggctggtctcaaactcctgacctcgtgatccacctgcctcggcctcccaaagtcctgggattacaggcgtgagccgctgtgcccaaccatatttgtccttttataaaatactagctattatacggggaaaaaaatctttcacagtgacctttttctgtttcaattgctttatgattaaaaagggccaaaagattctataactactgtactaggagaaaatattctgtgtattcctgccagtggtccctttttgaagactggattctctgagaacaggaataataagagaaataacatgtcacccatctgtagatggacatcttgggaaccagggaggcttcaaaggtaggacagatgcctgcaagtagaaggggaatgaagttgagccagatctagacaaatagggcagcaaagatttttttcatagtcaggtggtctctggtgaatgtttcagagtttatgatcatggcaatggatgcctcaaggcacctgtcagccctctttccagggcgtcagtcattgtgaaggagaggcagtaaagattagtcaggatttattttgtcggctttctaatgaggattaataaagatgtacccagtggatggcacgagggtattgacccaagagtcccctgacagagaagagatgtgaggtttgtttagggtctgcagtgagagtcccaaacctctgctgcacatccccactggccagtggaggtggacacagaggcccctggcaggcatgtacccctggtagccccaccgtgccctggcaggcatttctgggtttcattggcatgatgctggcagcttgttagaaagttaggtagccttccttcagccctttctttttttctctgcccaagtgtctgacattgccctaagctcagaaactacggtgcgacacgtttctttgccatctgctccggatttggccttctgttcttgtgcatttgttactgttctgcgtcattactttttcagttgtacagtgtcatcagcagaccagacagtcttataaccagaaacttcggagacttggttttgtttttgttgttttaaataagcatagtggtaagcacacgttggtttaaccctctttatttcaaagttgtcacctcggtaatctaggcacgtgacagtgatagtgctggttctcagaacctgtttagagcatggcatatgaaaaaaaagcattcttttcactttatagttatgactggctttagattatctacataaatttacataaatttggttctgaatgattgagacttgtctctattttctattgaatgtgaaacagtggtctcaatcagggatcagcaaactgcgtttcatgggcctgccacctgtttttgtaaataatttatgagaacacagccacgcccattcatttaattattatcgtctattcttggttttaaggtacaagggcagagttgagtagttgcaacagaaaccttatggtttctggcctaacatactgtctggccatttagagaaaaagttggtcgactgttttacctatcactttggtagagttgaagactagagctggtgtgggaaactcccttggtgaacgtgctagtggtggtagaatgaatcttttttagggcagtttggcatttaaagaggcttatttttcacaacctttatattggaaagactgccttcaatagtttatacaaaggaaataattgattatggaaatttgtgtctgtagttactaagaagttgagacaacctgaatctttaatagaagataaacaattcatggttcatttgtgcaacagaatacaatacacttgttaagaatgcagaactagctgggcatggtggctcacgcctgtaattccagcactttgggaggctgaggcgggtagatcacctgaggtaagaagtttgagacctgcctgggcaacatggtgaaaccctatctctattaaaaacacacaaattatccaggtgtggtggtacacacctgcagtcccagctacttgggaggctgaggtacgagaatcacttgaatcccagggcagaggctatggtgagctgagattgcactactgcactccagcctgggcgacagagactctgtctcaaaaatacaaacaagaaaacaactgtcagtgtgtgtagatatgtgtgttttacaagtgaaaaagaattagtttgaaagccaatatgtataatatagatcggttttagaaatataaatacacatcagtgtgtatattcagaaaagtgggaaggctgtgtcattagaaattgacagtggttattttgatgggtgagattggaagcaatcttttctcttttacattgtgcaataagcatttgttactttgataaagaaataagaaaatgaaggccacagttatttgagtctgaagtctaaaatgtaccatacgtgcttcattttgaaaatggaagctgctgagcaggaattccctcaatatctgggccccttcgtcacccacccacccctgactttaataagcatcacacctgtccccggatgacgccttggctctggccacacaggaagagctgttcttcctgtgtctgaatccctgtctccctgctcattcattcatcgctcgcctctatcctcagtctcttcatttattacaggctctttcttatccgtatttaaacaccgtcatgtcttggccatcctgcaggaaataagcagagttcctctgtgtccagcactttatcctaaatttgttactccatgattacttcgtagaacctgccgatgttttccaagtagacagttttgttcagttaatctttatttattcattcccacagtatttactgttttctgatgcagagatgaacaattgacagcttctgttctcaaggagcttatgggggagggaaaatgccccccaaacatccctttaataattaaaaaacaacaaaactttgattgtacgctttttctttgaagaaagaggcttactgtaagttggtgttttacctactaattgaaatatatatctgttttttgagacagagttttcactcactctgtcgcccaggctggaatgcagtggcactatctctgctcactgcaactgctgcttaccgagttcaagtgattcttgtgcctcagcctcctgagtagctgggattacaggcatgcaccaccatgcccagctaatatttgtatttttagtagagacaggattttgccatgttggccaggctggacttgaactcctggcctcaagtggtgcgcccgccttggcttccaaagtgctgggattacaggcgtgagccactgtgcctggccagaaagatttttttgttaccttaataagtcattagagaaatgcaaattaaaaccacaacaaaatactactggccaccctgtagaatgactgaactaaatgaagtggcaatgccaaatgttaaaagatggcggaacggtggcagtttctctccattgctggtgggtatgcaggggacagccgctctggaaaacagttagacagtttcttatttaacatatgacttagtaatcccgctcctgggtatttacccaagagaaatcatatgcacagatgaatgattatagtaaatgtttatagtggctttattcataatatcaaaaactagaaaatccctaaatggctttcacttggcaagtgaataaacacacttgggcacatccacactggaacactagtcagcagagaaaaggaacaaataccaatagacccaacagcgtggaggaattatatgtgtattatgctgagtgaaagaagcgagactcaaagcttcacgtgtactgtatggctccatttatatgacaaatggagaaagcaaaaccagagatagaaagcaaatccctggctgctaagagcggggtcgagggggtggggttgattataaagggcacgtgggaattttgggggatgacacaactgttctatgtcttgactgtggtggcacttattcatagaactctacttttaaaaaagtgattttataaactatatctcaataagctcagttttttttgcggtaaaattttttttggatatgtgctatatttacatagtttaaaaatttaaacaatatgaaggaatatagtgaagtcttaactcctaagtttcttatcttgaagtctccttatgcaagtattagcatatatgcatatattctcattcttctaatacagaacacagcttccatctataattttgtgtaccagtactttctccgcttagtagttatggttcttttcgtatcagtgcattgagatcttccctccatttctgtagcggcacggcatcttgtggtatgagtgcatgcatgtatttagccagttctcctttgatggacccaccgtacacaatggtgcagtgaataaacttgaacacagtgacttctgctataacacttatgctgaaacaaatttatcccagtaccaagatttatcagaacaatgggagcttaacctgaatttcatgtttgcttatgtgtgatttcatccctgagaaataccaagtgactacagaatgctgtggagttgtgtaggaaaacacaaaacacatacacacaacaaacctccgatttcaccagggcctccctctcaactgtgggtcacatccatccacagctggtgttgcaagcttcccttccactaagattgccctccttcccccacttcacagtaactcacaagctgcaaccctctgacctccacaagctcactgcaggtctttttcaaggtaaagtgcagtgttttttgcatttcttaaccatttgacgtagttaaaactaaatattttcattcgatgtgtcactgacaaagtcttgagtgttgtctccgtgactccatttttgctagaggccctgttgttttgttgaagttttgcatagtgcagtgatttttaggagcaccgatgttgcattacagcagaaacgggctgtagtaagtatgcaggtctcttcatagaatagattgcccagtggaaggggtcagagctttaggagtgaattttggagggactgctgctgtgctatatttaaatcatgtgattggcttggtttttcctttttcataaaaaggtgtgagctgaagggcatgtgtcagcaacggttgaggataatcctgtagcctgcagtctttaagtttgtgggagtttctggctgcatggtggtcgttaaggaggctcttgcatgttggtgcaaggcagatacctcgtggaggtaggactcccaggacaaggtgagatgtggatgccttgccagatctgggtatgaagttatgacttttctccctctaacttccccaaagtcacctgaaacagagacccgtaagcacagaaacagaaaggacaagttattagaatgggaagtttctgattgtgagggaagccccgtggcaaaccgagacacgtccaccaagtgctctccgggaagaatggcctgccaaggccgtaccatcccaagcacagcagcagcatggggtagcgcacgcctagcatagtcactggagaaaaggaggcgggattaatgctttctttcctgaagctgtgaagatgaaagtcaaaaatgagacgggaggaagaaagtttaggaagtgtacccaagtgtttattttgatattttactctcaaaaagttttatgttaaaaactttggaaaccctgccagcttattagttcactatttctttaaagagttctatttaaaaacaaagtaactcagaactgagtaggaagacatgttccttttctgatcttagttaactattaaaaagtccacccaaagctctcaatctcagcttatagtaaagccaggaggaagcaaacggcctaaagtcttagaatgatgacggtgggctttacactgaaatgctgttttcccattttttaaactcataaaagcagaaggagctagtaatattgaggaacagaagttacgaaaataaatttggcaaagtaccttcgaataagtttgtatttaaaatctaacagaggaagaaagttgtctgttaggtaatgtgaccaggcaggtttgatctggaaactggtgttttaaacctcattttcttgtcaccagtgaattggaaaccctgcttatttttgaattgcagagttcatttctgcatttttcataaagatgctgaaacagaaggatgtctctctcacattgattgatcttttgaaaatagttactgatttgctaagctgctcttcattttttagggttttcttactggcatttctgtattaaaattttgttttgatgttaatattactacacaagaagaaatagaatattaaacccgtcaccttaataggaaatcgaattttcctttctgtggggtctcttgtcctattgtattgttagaaagatacatttttctttataatctgttaggatttggtgaagcagtcttgcttttagaaagatgactttcagttgattttttttttcttttgagatggagccttgctctgtctcacaggctggagtgcagtatcatgatcttctcggctcactgcaaccactgcaattcttctgccccagccttctgagtagctgggattataggcacctgccatcatgcccagctaatttttgtatttttagtagagacggggtttcaccatgttggccaggctggtcttgaactcctgacctcaggtgatccaaagtgctgggattacaggcgtgagccactgcgcccagcctcagttgatttttatatgtagaaaatataaaaagcattagatactagatttttaaatatctttattgaaatacagacctgttgttcatgactttaaagctttaaaataaataaaggctcgttacctcttagtcactcttttgctgcataaatgctaatccaagaggttagggattgctgctggcctattttgtgtaatcaaatctttatgagagaatatttttggggggtgccagcttgttatttgctttgttctctctttcgttgtttcccccagagatgaacagcattggtataacttttaacttggagaagaaattttctcctttgcccttgtttggattcaagacccttttgaatatctaccagactgatttggtttatttaaaagacagacagtatttttctatgctttttgaatggaagttggctgcataacttgactattacaagagcatttcctgagcgatgtgtcccatgctgcctgccccctttgttaatcatccccgtgttctcgaagcgtcctgggaggcaggcactgttgcaagcccacctcacaggggtgggagtggacattcacgtgggttgagtggctttcaccaggtcctgtgattcatgaggcagagaccaggtgccagctcatcttaggtgctgccggccagactcagccactccgatttgcctgccggtttgaacaaggacatgtttgtcaagcggttatgggaaaatgatttttaaaaatgtaatcagtctgggcatggtggctcacgcctataattccagcactttgggaggctgactgaggccagcggatcacttaaggccaggagttcgagaccagcctggccaacatggtgagaccttgtctctactaaaaatacaaaaattagccgggcgtggtggtgggtgcttttagccccagctactcgggaggctgaggcacgagagttctttgaacccaggaggcggaggttgcagagccgagatgacaccgctgcactccagcctaggcaacagaatgagactcagtcccaaaaaaatgtaatcaatcatttctttatcacatagcttgcaatcacttcttagtattatctcacatgaaaacttcgtcccacttcagtctttaatgagtttagagccagattttgttccattcatgaggcttgacagctctttaatttccttgtgatatgacactgtttagttccagactgctatgcatgtcataaccaaagaatttgttttacgccactaatttacttcaaaggttctgcatggaaatatattcagttaacataatatctcagcctgagtgggaaacttttaaatataaggaaattcggcttacctacttgacagtgtttgctgtctctctctctctcatcccctaagtataccagcaggcagcctccttaaagttgtttcaaagttctgtgttcttgagattatcaaatgatattatttaaaacaaaaatccttctagaaaacttcccttatataatgaataattacttagtcattaaagggtagccagagatttcatttaacatggcatactgaataaaacagcatattctatctaccacaaattaggtagtggctttacttagtatttactgatgtatggtttcatatattatcttttcagtaaaagatttatataatgttatttcaaatacctggatgtttgtgttgaatcaaaaacctgtgtttttgagagagaattttttttacccttatgatagtttaacccatcctcctaaaattagccccatcatggttacctcagccctgtcctcatttttattatatatttttaaaaagttttttggttttgttactgtattcctaaatacaggttgagtatccctgagctgaaagtttgggaacagaagtgtttcaaattttagatgtttttggatcttggaatattcaaatatacataatatcttgggactctctaattgtgatatttattcttgtttcatacataccttatatggatagcttgaagggacttttataaaataattttaattttgtgcatgacacagttctgactgtgacccgtcacatgaggtcagatatgacattttccatgtgtagtgtcatgtcaaccctcagttttggatttggggacctgtaataatgatttaacttaaactattacaaaagagttcttaattgtttgagtgcatctattttcattcccttaagtgaactttctctccttcctccagcaaatgaagaaacacccctgccgccagtgtgacaagtctttcagctcgtcccacagcctgtgccggcacaaccggatcaagcacaaaggcatcaggaaagtgtacgcctgctcgtaagtcctggtttctaacggaacgcagtgagaggactcaggaggaacctctggaaggtttttagtgtagtaccattaacttgctgtgtgctccacagttcctacattacatttctcaattgtattattgttttggcatagagtttttggattgggttgtcacacttaaatatgaaaataaaaaaaaaaggagcattttcttgcatatcccacatacattgtgtgttttttttttcccgagacggagtctcactctgttgcccaggctggagtgcagtgatgcaattttggctcactgcaacctctgcctcccaggttcaagtgattctcctacctcaacctcctgagtaactgggattacaggcacatgccaccacacccagctaatttttgtatttttagtagagacggggtttcaccgtgttagccaggctggtctcaaactcctgaccttgggtgacccacctgctacctcccaatgtgctgggattacaggcatgagccctggcacccagcctgatccctgagtgtcttgggggagcgattgattggcagtacagggtctctctgcacatgtcgagttggccacattggcgaggtgatttggctagcttgtttactcagggctggtcacagattcagtcctcggctgggccctttgccccttggctgcagtcaccactgaaggtggggcagcctgtgaccaaatgcaagggactgggtgggccaacatcaacccagactccagtggacagtcataagctgctgcttcatacgtgaacaccagaacgtatctcatcattagtgaaaggctgtcactcagctggaatatacctggagtgggttgataagaagaaagcatgtctcatgagagagagagagacaaaggaccctgaggctaaagcactgaaatgttacatggatgtcagtgcaggccagatggaccctatggatcaggagacttatgaaggttggctgtcagattcgcagggggttatgataaccgggtaggaatcatctgattcagtgaaattgaagctgtttagtgagataagaatgattatgaataaagtatgtgttgagaccaaatcaaaagaatcagaatttagaaggatgctctgggccaagaagacgatgggagatctggcccataatgcttcactgataggttttgtttatttccccatgaactcactgtaaagcagtaaaatgctgggattgttctgctaacttacggccaacaaaaaattcatcctcatggagagccctcgtcctttgggggtggtgctggctcctgccactgccctgcaagtgtctctaatgtgaggtcatcagggtttagggccaatcagtatgaattcctccgaagctattttgaaggcagatttgagaccacaagagactttttgtccttccctcagtagcattcttgatacctggttttatagcatacataataactagggccattacctcttttttttctttttttgagacggagttttgcttttgttacccaggctggagtgcaatggcatgatctcggctcaccctaccctccacctcctgggttcaaccgattctcctgcctcagcctcccgagtagctgggattacaggcatgcaccaccatgcccggctaattttgtatttttagtagagacagagtttctccatgtttgtcaggctcatctcaaacttccgacctcaggtgatctgcctgcctcggcctcccaaagtgctgggattacaggcgtgaaccactgcacctggccagcctgttttctaaactatctttggcctgctttattaaaataagtttttctttgaaaaataattgacctatttttgatctgcttatcatctactgagtgaccatacacactcgactgccatgagtataaacatgcatgctgcttttgtgcctggaagaatttggcgctggacactcatgtctttgtcaaggcagaggacagggataattaacagcagcacaaaggagtcaaggagggaccttatactaatgtgttcagcatggtgctcattctgagagaatactgagtcattgtgaaaacttcttttgaaatgcaatattttccctttaaaattaaagccatctagacctgtaaattaagggccactcctagcaaaattgctgattgcgtgttgaaccatggtgtgaactcagcttattggacctgtctgtgtgaactgacggctaaggaggaccttcgaccgtgagttcttccacaggagcttattttgtcagcaagtgcgttatctccttgcctttcaccccacaggcactgcccagactccagacgtacctttaccaaacgtttgatgctggagaagcacgtccagctgatgcatggcatcaaggaccctgacctgaaagaaatgacagatgccaccaatgaggaggaaacagaaataaaagaagacactaaggtctaacattgcagatgtttgctttacagtgaaattgtgttgacttgcttttcccattcatttttttcctttcaagtttttgttgcatagttacagttttaaaaattcagactggctgggtgcggtggctcatgcccaccactttgggaggccgaggcgggtaaatcacgagttcaggagttcaagaccagcctggccgacatggtgtaacctcatctctactaaaaatataaaaaattagcttggcgtggtggcgggctcctgtaatcccagctactcaggaggctgaggcaggagaatcgcttgaacttgggaggtggaggttgcagtgagctgagatcatgccactgcactctagcccaggcgacagtgcgagactctcccaaaaaaaaaaaaaaaaaaaatcagaccacactgaaagtataaaataatgattaatctccccatagacccattctgacctcatcatcaggagttcgagaccagcctggccaacatggtgaaaccccatctctactaaaaaaatacaatacaaaaattagccaggcatgatggcaggcgccttaatcccagctacttgggaggctgaggcaggagaatcgtttgaacccaggaggcagaggttgcagtaagccgagataaagccattgcacccaaacctgggggacaagagcaggactttttttgtttttttgagagaaaagtttaaagaaatagtttaggccggacacagtggctcatgcctgtaatcccagcactttgggaagctgaggcgggcagatcacttgaggctaggagttcgagaccagcctggccaacgtggtgaaaccccgtctctactaaaagtacaaaaattagccaggcgtggtggtgcacacctgtaatctccagctactcaggaggctgaggcaggagaattgctggaacctgggaagcagaggttgcagtgtgccaagatcacgccactgcactttagtctaggcaatagaacgagactctgtctccacccccccaaaaaaagttagcagatacttaaaaagccctcctgtcttcggtgctatgctagatctggaatgtacccaggtaaaagcttgtatgtgctttcaaggagttaatcatcgagtaaaacctcctcagaatataagtcagactgatgtggcattaaaatgcaatacttcaagtgctcctggtggtgagttaaagaatatgtgtgaagccaaggcgtggtggctcacacctgtaatcccagcactttgggaggccaaggcaggcagtcacgaggtcaggagttcgagaccagcctggccaatatggtgaaaccctgtctctactaaaaatacaaaaattagctggacatcgtggtgcacacgtatagtcccagctacttgggaggctgagacaggagaatcgcttgaacccgggaggccgaggctgtagtgagccgagatcatgccattgcactccagcctgggcaatagcgcgagactccgtcttaaaaaaaaagaaagtgtgtgcaaaggtagcttcaggtcatggccacgtgtgaaggtgcacatgaacagagcagaaaagctggggcacagagtgcggagaggaggggcacgttggcttggggaggggattcagagtgggatttagagccctggaagcagacgcagtaggggaaatggtgtgaaggtgaggaggcaggaaagggtggggaaagcttccagaggctctcagtctaaaagcaaaatcctgacactctctcccacaaggggcgttacagttcacctcctgcagtctccctgagcactccttcctactggctctagcccctcttctgttgcccactcacaggcctgttcccaccttgggccttggcactcacagcttcctatgcctggactgctttcccgacactgcgtcaggtctcttttcaaatgtcacctgtcaccaggctgtccctgaccgtaccacatcacctagcagccacacatataccccccccttgcttcccatggccctcatcccaccctgcttggctgtcctgggtctgacatactgcatattttctcatttgtttctgttcatctaactccgctgccacaaatttcaggaagctaggagctcatttgtccactgttgtgccccactggcagagcaatgcctgctaacagctactaggtttctctgtggagtggaagaaaggcatgggcctccgggtggggtggcagacacagctttaaagcccctaaatcccaaagcgttcagcacaagttttcctggcagctctaaagtaagagaaccgatcatttatcaaccaccgtgaaggatggttttcagtcgtgtcatttgctttctttccctgaaaggtccccagtcccaagcggaagttggaagaaccagttctggagttcaggcctccccgaggagcaatcactcaaccactgaaaaagctgaaaatcaatgtttttaaggttcacaagtgtgccgtgtgtggcttcaccaccgaaaacctgctgcaattccacgaacacatccctcagcacaaatcggatggttcttcctaccagtgccgggagtgtggcctctgctacacgtctcacgtctctctgtccaggcacctcttcatcgtacacaagttaaaggaacctcagccagtgtccaagcaaaatggggctggggaagataaccaacaggagaacaaacccagccacgaggatgaatcccctgatggcgccgtgtcagacagaaagtgcaaagtgtgcgcaaaaacttttgaaactgaagctgccttaaatactcacatgcggacacacggcatggccttcatcaaatccaaaaggatgagctcagccgagaaatagccacagatgctccatgaggaaaatccctgtccacattggaataaaaaagacatttttgttacaaagtttgcagtataatagagttaacagtactgtctaggctgttgcaatatattctctttcaatgtaccttccttcacctcgtcgtatatatcctcgataagtattaaaacagtatttgagtttaaaagagtttgtatatatttaaatgaataactttttatactctttgttacatgtttgtatcagtatttagtggaaaaccatttgagttgttttgggttagaatttttctttttgtactgtttctttaaaacagagttcttagtaacaggggcagttcctgaattcaaataaaccattttgtatgtttggattttgaatgggttaactaattacaggctaaaataatgccttttttagtgtttttaatttttagaattcactacataaattgtaagtaattgtgggtctcaaaaacactaggaacttttaagtgtcttagcacttcctcgatgtgcctgccctgagggagtgagttcacatttgagacaactgcactccagtgtggacgtgcctttgtcttcaggccatgccgaagggtgtttaaagcagtcttgcaggtcgctcctttcccagccgtggataaaaactgaagctaggaatctaataaggaatgctgatttcctcagttccattttgaggaatggggaaggctattctaaagaaaaaaatgggatttgttttctcggcagatctgcaaggctggctttaagagcacaaggagggaaagtaacgaaagggctggactactataaaagttacaaatacgtagttagaccaatagatttatatagtcaggtttttgtcatgtaatttattaactaactattacagaaacacagctaagaatatcaagtatttctctggctcttgacagaaaaaaatcagttgacttaaccctttgctgtcaaaagagttggcgtttcctgttctgggtgctactgccaaacgttatggtacttagagtcgggatgcacaacttcaaccaccgacttatcaatgcagccgcctgtgtattgcaattggccgttaccttaagcactgagccacccgggtttagttcagccatttcaagaagtatatttaacgtcggtagttctgctttattaaaatgcagcagaggtactcttctgtcccttccgtttatagttctctgagagagttctattttttggttttgttttgtgttttcttttgcattttgtatcttgtatttatccctgaacatgttttgtaccttttttttttttttttttaagaaaaggaattcttttgtgtatatatagatacttgcatgatatactgtagtcaatgttcggttcctcaaaaggtcttgctgctgtcaggtgttatgcactccatccatcataactgtatgaaacacatttcatatgtaaataaacgtgggacatttggcccttgtgcttctgtgagagaattattgatggtgggtctctgacatctttgtgaagtttgggaagtaattaattgcagcgacaagctacagggtgttgcagaattcttcccactcagaagaatggcatattcgttctcattagtaatcagctattttgtcactttcttgttgactccatcagtacatgggtacaatccgagggtgtgaatttcagcttgaaattccattgctgttccttgttttgtttgtattgctctaagttgtattcataatagcactttcatatgtttctgcatttgaaccttgcaataagcctgtgtggtaggccacataggtccgaataacctagttttacagttgagggagctgagctcagattcagttctttgccgaagccctcatagctggtaagtggctttgcatattagaacccaaatattttgctctctaaatctaatgctcgctctatgtggttatgtacatattgacaaatattcatttattcaacaaataaaaagtatgtacaaaacatgatacagaatttttgtttttggcactatggctttataaataacctgaaagtctttctactcttaaatacccagagatgcttaatataaaattaacacctggtaaatgcataggtgagaatacaagaaaattttaaaaaatgcccagaggtccaaaatgaagaaaccaaaatctagattctagaaaaacactacacagtgctgtaaccctgggggaaaacctggattgttcagctgaagaggaaattggtaaactggaagatagcccttgagaaaattagcctcagcacagagataaagtgatgtttccaatacgaaagagaggttaggaatcaaggacaaaatgagaagatccagcttcagtttaatggaagttccagaaagggggactagagagaactgggaaggtcagtgtagaaaatcttagccattaatgaaagacattaatacttggatcaacagtgaatgctcaacaaaaatcatgctgggacataaattctgcccattcttcattagttgtagatgctgggtgtgggcatttgaggaggaggataacatgaggtatgcttaattcttaggaagtccatgtactcttgagtgcagaagtgagagctaagcctggaagcaaaggcttaggccaagttgtaaaaacccttgaatgaggctgggtacggtggctcacgcctgtaatccccatattttgggaggccgaggtgggtggttcacgtgaggccaggagttcacaaccagcctggccaacatagtgaaacctcatctctattaaaaatataaaaaatcagctgggcgcagtggcaggtgcctgtaatcccagctactccaagactgaggcaggagaatcacttgaacctgggaggcggaggttgcagtgaggggagatggtgccactgcactccagcctgggcaacaagaacaaaactccatctcaaaaacaacaacaacaaaaaaaccttgaatgatagaatgaaggggtttgtattgatagagatagtcatttggacaggggagtgataggaccagattaattggtggcagtgtttaggatggagtatatcaatcaggataggtcgggttatgctgtggttatgaccttaagcctaaatagcttatcacaagacatttcttgttcacattcagtgtccactgtgggttggctggaggcatggctccgtatctccttgtcccattaccccactatcaaaaagttgccagttgctgtggcagagggaaaatgcaatgaaatgctgaggcccagaagtgacagatgccacttctcacaagtcactggccaaaaccagtcatacggagccacctagtcacaaggaggctgggaagtgcaatcctcccacgtgcccaggaggctgaaaatatttggacatcacaggaataacgtttaaattggcatagctatggtgccaacacagtaggaacacttgacctagggtggtgggagtaggcttggaaagaggcttcggttgtaagtagcatttcagaaacagtttccagagggtttcttaatgtggaatacagagaaagtctgatctgaaagttcaagcttatgtgattccttacattttttctcaaggtttaggttacttaaaaatatggaagtaggccgggaatggtggctcacacctataatcccagcactttgggaggccaaggcaggtggatcacctgagatcaggagttcgagaccagcctgcccaacatggtgaaatcctgtctctactgaaaatgcaaatgagccaggcatggtggcacccacctctagtcccagctactcaggaggcttaaacccaggaggcagaggttgcagtgagctgagatggtgccactgcacttcagcctggatgacagagcaaggctctatctccaaaaaagaaaattttatatatatataatatatagtacatatatatataatacatatgtaatatataatacatatataaaatatataatacatacataaaatatataatacatatataatacatactttatatatatgtaaaaattaagagttgattaccaggaagatgatcttaagtttcaggtatacatacaaattatgcttttgtttttatgtgtttgggtgatatatcaatagctgagtaacaaatgcatacaaaagaatgccagcaaaacgttacttgcaaaatgagaaaaaggaaaatgtaggcttacactgcatggcaaagaccacttccttcctcccaagcacgttttctgcaaattccttactcctaccacagcaagtagtccaaagaacagctgttctaccctgaagctctggtgggcatgcctcaccagtgtcagcaggctagtgagtttccatcctaggatctttgaccaacagtgaaatttcctcttgaaatttttgggcagccaagaaatttataaaatatgactcagaggaacccttcatctatcccaaaggatagtctgaaaataaaaagtaatgtgccaaatgtaggatgctatttgtgcaatttacacacacacgcatgcacacacacgcacacacacacgctttgcaaatatcagatgctgtaaggattccagattgtagctcttaattttaacatacatcttctaaacaaagaacctacccttaattaccttaaaaacttggctcctactcaagaggtgtaactcactctgcttaaatgcatccttgaaacttcttgttttctttgacaatttttgtttttcttttctcagttatgaatctcacacccttaccgagttagctgtaagcctttggaatatgacaatgtgaatgtctttctttataaagatcatgataaccagaaaacaatctatagtagatgcacagaacataaatagaaaggattattcataacatcccactacagcagtcaaaccacaaaccatccagcaagacagggagaaacaaaatacatccccaacaaccagaaaacaaattacaaaatggcagtaataagttctcacctgtcagtagttactttgaatgtaaatgggttaaattttctaatatgaggacagagtggctgaatggattaaaaaaaagacctaagtacccgactgtatgctgcctacaagagactcaactctcttaaggatgcacatagactgaaaatgaaggaatgagaagatactgtatgcaaatggaaccagaagagagcagagggtagctatacctacatcagacaaagcaactttaagtcagaagcaataaaagagacaaaggacattatataacaatgaaagggtcaattcatcaagaggatacaataattataaatgtatccaacattgaatgaagcacctaaatatataaagcaaatattaatagatctgaagggagatagaaactataatacaataatagtaggggacatcaataccccactttcaataatggattaccatccagacagaaaattaataaggaaacattggacttgaactacactttatgacctgacagacatatacagaacatcccatccaacagcaacaggatacacatttttctcaagtacacacagaactttctccaggatggatcatatgtttggctgcaatacaaatctaaacaaatttcaggggatcaaaattaccttaagtatcttttctgaccacaatggtgtgaaacttgaaatcagtaacaggagaaatcttggaaaattcacaaataagtagaaattaaacaacatgggtcaaagaagaaataaaaaagaaaatcaaaaaaatcttgagacaaatagcaactatgtaccaaacacctatgggatgcagcagaagccattccaagagggaaatttatagcaagaaatgcccatatttctgtgaaaagtctctcttcatgctactagaagtttctggagtagccagttgtcattctatagtcactgttacccccaatcaacccattctgaacagcccagcctcagttcacatggtttgagtataaggctgaatttgagactaggctactctcagtcttttcagagtattttcttttcacatccattttttcttcacagtcccaatggattttgaatgttttagtaacgattcaatacattggataaaactttaatgatcttagcctacatttttctaggcatttgctcatttatatttgctgccttctttggaaatctagatttgggggtaccctagatcctgtttcaattaaggtcccagcagaatgcagtgcagcacactgcaaaaggtttaactttcaagaaattaaggaagggactatacacagagctgtgtgctggaacaaggcctgagaagcctgagtaggggtggaagctggagctgtgggaaaagggcactcaggaagagccactgccagagccacagtgaagccaggaaggtgtggggagcggaatcaccaggaggccctctcatcacactcaaagatttcctgcccgcacctcccacctgccaaagctaaatacaagctagatgacaaggcagccacagtaatagtctatagatgtccgtgtgttgggcacaaaacaggacaaagaagggtggatgaaggatctgggtttccgagtgggaggttataatgatcactgacacgtggcatgcactttcaggagtgcgtgttctatgcctgttttgtcaacatgcattttgtcccctacaggcaggctctccaatggaatacggtacttcagattctacatttaccctttctaattaccttgccaggtttctcctggaattataccttttccctagtggttatttttatgcaaggaaacagaatcacatttcccagaagatattccttaccagtttctaaattcaatttatgaggttagttctgactcatcacgtagcgctatttataatgtttcccagtatttaagggaactgattattaaatttgctgtgctattttattgcaagctgctttatccttgagcttttcttatagttagaactgtacattacatgaccatggcagatctatttgcaaatacaatccttggcaagaccatgttttcacccgggggagttctataattagagtccaccatagcacacctccaagtccaactcagttccagaaagtgtgggtttcgcccctgagtccatgagtcatttcctgaccttcaggtcatgtcatgcttaattggattggttatttttggagaacaaatgctatttgttttttaaaaaagaacaaggtaggcacaggtccgctgatcagagaggatggtgtgatgttgacaagagttaacgggaagtagagcaacatcttccaccctttccaaggtggaaacagatgcatctgtaagcaggagtaatgaatgtctctactttgccagttcagcacctgaacttccctttccagtgttgggggtacctgccattgtatgaatcttggcaagagatagatcttacctcccactgcagaatccagaaggtcactcaccctgactcccagcagcctaacttcaggcacgggatgaccaaaactatgctcctgctcgactcttcagtaggtgatacaaaggagcgggccagttcaacaccatttgtctggtggcgtgatggcagcatagtggcaatggccgtggtgactctgaattgagagtagacttgtgaactgtttgtcaaggtgagggaagtcagtttgtctttaaggaactactgaatgtcttggacacaagcagtgccaacatcatggggagaacctaaagtttagactcttggttccctctgaataagacaccagctaaacaacatgccagtctctgttgtttcagaagagaccaaaataaatggaagcgagtgcctttcaattgctataagaccagccccggaagacctccctgctcccgtcaccatatctaacctcacctcctatcacttccccctactcccatgtcactccttttcgttcctatccacgattcatattcctgttacaggaccttggcacatgctcttccttctcgtggaatgctctttccccagttctcatgagggtttttcacatgtttcacatccggtccatgcagaagtcccccgcctggagagccttccccaattcccttactgaaatgtgcccaccccactgagcacacacctgctttgccactctccatctccgcttcccattatttttctccctggcacttatcactgcctgacatgatatgcttatgtgctaagtgtctgccatcccctggaagaatgttctaagattttccatgaactctctgcttgctttctaatctgaaactgccatttcctctcattgcaagaggcattcttccttttgcggcctgagagcagtgggtattagttatattttcccctttgatccttattctggacagtcaaaactgatccttgttttctcaaacccattgccaagtgatgggagcccgaatgccctttcctttttaatagttacttgaataaagtgaccgtgtcataaataatagcaccagccggttgattgctgctgcttccggaaacgttagaggcctgctttcaggaaacgaaggcattatttattttcatgtcctatttttatgcccagcaaactgcttgcaaaaaacaaaaaacaaaaaacaaaacaggtacctaaaatatttttgtaaaatgactgagcttccttgagccttgattagtcataattttttttttcttaggggttgggacaaacagaaggatcttgagctattaattacccagaagtaagatcctctttttcttttttatttaggtagtatttttaaaccatcgtaagtggtttttattcctaatgattaaaatgtggaggtgggttctgctcattatattttttctccacttgaaaaaagatgaagtatttaatgctgaattctaaaagcaatgtcattcttactttcagtgactacatgacatcagcaactaacccgggaataaatccaagtttcagagatttttctgtttaatcattcatacagacttcccttggtattggcagtggaaaagttccagaaccacttcctgtggataccaaaatccactgatattcctggatataaaatggtctagtatttgcatataatctacattcccctctatactttaaatcatctctacagtacgtacaacacctaatacgatataagaacttgttacactatattgttttatttgtatttttaaaagttgtttttttttttcccctctgaatcttctttccaccattgattcaaactgtggatttgaaaccagcagactgcattcaaattatctaaacctctagttttttcaatcccctctctcacccttttctaaggtagaaagatggttaagcaaaacaaaacccaaaaagcaacttggcagtgggagctctaatgctaacaaacatttatttaggactcgggattctataaatgtttctgtatcatgagctttaagttcatactacaatgcaactgtgtgaagtaggctgagttcataattttacagatagggaaattgaacctgcttctgtaagagccaggacttaaaccctggtttctggcaccaaattcggtttccttcttcctacaagttgttgatttatctacatattccaagttggatgctttcatttttacatggaaatttcattgtctacttcaattagacaacactttcagaggtgtttaataataaccaacacattaatggtaaaaaaaaaaaatcctttttgtatttttgtttgttttttgtagagatggggtttcgccatgttgcccaggctggtcttgaactcctgagctcaaagaaatctgcttgcttcggcctcccagagtgctgggattagaggcatgagccactgtgcccggctgaaaatacttttgaaggtagatgcagaggatttcaaagttagagacctgagaggtaatttgtacaaggcttgaatctctctaatgccttcatgcgtggtcaacaaacagctgagcacctccaaggctggagaccgtgatgtcatttgaaagagccccagttcatctttgagttagttttgactactagaaaattatttgttttaaagctgcccctttgtaacttggatcaaaattatctgttttattttttttcagggaactatttacctgagagtgtgttaactatttcagcttgtgtgccttaatgtttttttctttaagccaataacaaaaaaatcctaaattgccacagtacctactgtttattaagggtctacaaaaggtcagatactgtaatgtccccttgtagatacattatcaggatatctggtatatacattatctgccaggtatgtaagtgggcatttagaatataaggacaatacgtagtatttcttgagtatttataataggccaggaactctttcagtaccttttttttttttgaggcagggtcttgctctgttgtccaggctggtgtgccatagcacaaatgcagctcactgcaccctcgacctcctggcctcaggcaatcatcccacctcagcctcccgagtagctgggactacaggtgtgtgcccctatgcttggctaattttataaatgtttggtagagacaggggtttcaccatgttgcccaggctggttgacctcctgcgctcaagtgatcctcctgctcagcctcccaaagggctgggattatagacatgagccactacacccagcctctttcagtacttttaaaatttatttttatttttttagacataggatcttgctctgatgtgcaggctggagtgcagttgtgtaatcatagctcactgtaacctctaactccaggactcacgcaatcctcctgccttggcctcccaaagtgctgggatggcaggaatgagccaccacacttggccttcttttaatacttcatattaaatttcataattccaaggtgtagagactataattatcttcattttcaagataagataaatgagactgcacaattgctctaggtcacacagccagtaaggaacagctttggctcttaatcactacccagaaggcctgagaatattccaggatgattaaaagagcacagtgcctgccctcctggagcttccagtctataagagaaaaggagacagaaatagataccttcaaagtgaggaggtaaagggagtgtgcaaagcaattaggcagcagagggaacaggctactctcatagcctactctcaggaagcccagaagggcttcctggaagagccaacacctacttagaagaataagtaggaatagatgaggatgcccagcagaaggggagctgggggaaggttgctccagacagagggcagggcacgaacaaaggaacagaagtcagagtcggcggggtgtgtgcatagaaaggggtggtctgggatgctagaatagaagatgctctgaagccaactggcagcaggaagcacaactgagtcacggccacccacaagtgcagatgtgttccagcagtgtaaacaagatctacagaaattgcttcccattttaaatggagatatggaagttactatttaaagcaagcctttctggaaaaagaatatttacaccgtgagaaatccagatcgacacattttatgttttctcaaagtagttgtgtaccattcccatggtccttcatcagcgtctgacttcccaggatgtgttttcgaaactcccacatgtggatgtgtgtgcatatttgtcctactgcaacaacttccttcccacggggcagttcaacattcccacgctgataccactctggaagtccagcacacgctttggcagatgtataccctatgcagactatcacggagaagcccttctttatcattcatccaaatgttttacgagctcatcatccttcttggacaaaagccaaatattgccacttaacatagtcactatatttttgaaacccagagacgtactccaggccatctagctagagaaaatccagcattatccatgttaactggaaatgttaacctgcataactaaaggaagccaggtggtcagcagcccccacatccacagtgctgtgttactcaacaataacaagttgtatataaattggtttccatggtttgttcatctcggccgctttgcaggtggctgggagacgcagcttgtctctccgcctgttaaggagcgagcatgtcccatttacccgcgacatattatacaccagtgtttcataaatatcaggctgtttgtcaaagacgtgaggcttatcctaacaggttaggagacaatgatgagcctgactctactattttgcctgctgtcttttcaatttccttttgtttttcctgcaagaaacatctctctgaagtgcgtgcaagatactgatgaattcctttccgatctgaattcagtgaagcccaaagaatacgctctaagaagtaagtaggtttccctggcccattgtgtaggtgaacacgtgtaggtgaacacagggcagtggaggtttgtgctgggagcattctagacaaactcttgagaattaaagacacagaaccagaaaggaaagagaagatgagccttaatttgcattttgccaggaatcaaagagggaggagaatttttagcgtaggaggctctaccgtcagtctagccagaagaatctcacgaagaccaacctcttaagatgagaggccgggtacgggggctcacatctgtaatcccagcactttgggaggccaaggtgggtggatcacttgaggtcagaagttcgagacctgcctagagaacatggtaaaaccccgtctctactacaaatacaaaaatcagccaggtgcggtggtgcacgcctctactcccagctacttgggaggctgaagcaggagaatcacttgaacctgggaggcggaggttgcagtgagcagagatcatgccagcctgggcaacagagcgtgacttcttctcaaaaaagaaaaagatgagaatagtttatatactgtatgatgctgattattattaacatcattgatgtcatcaatatggataacatttcactgttatatgagatatcttgggtttttttttttttttttgagatggagtctcactctgtcacccaggctggagtgcaatggtacgatcttggctcactgtaacttcgaccttctgggttcaaatgattttcctgcctcagcctcctgagtagctgggattataggtgcccgccaccatgcctggctaatttttgtatttttattttcaccatgttggtcaggctggtctcgaactcctgacctcatgatccgcccaccttgacctcccaaagcgctgggattacaggcgtgagccactgcccccggctggcttctttttctagacatttagtttgcttttagtaatgagttgcttccttatttggggaaaaagtcttgcccattctgtgcttgatagtaaatgctaaggagtgtgttggtaaatgcacgggctcaagctggaaggagtgagactgtagccacgcctcttggcatgtgatatagatggacttcggatggtcagaagtttattattagtatttcccaaaatcattcccacaactaaagagacacatactttcctgccggaaagggacaaaaaaatcagatgtgttttcattggggtaacctctttttcagaagaatgattcatagttgatgctgatggaaaccactaacaaggaaaaatgtaaaaacttgctttttccaaagccagacaaatgaacatagcaatttccattcacattttgaatgcatgactaatgtactttgtattgaaaaatgcttagtagcataatatccatcataaaggtaatcaaaagctttcatctgatattttgtaattcaaaatagcacataatttgaagcagttgccattctacatgggattagatgtctggatacttaatgaaatagcgagagaatacaaatccaattgatttactagccatcttcttcaagtcccattttgaaattgattgtgttttgctacaacacttggtgatgttgacagggaacattctgacaaactggggccaaataagcgggccaagaaaatccagaaggtgccatggctggctcagattcctggtgatgaggtggtggcacatattgtcatcattagtcacagccatgttaatgctatatttgccttgtaagttgctctagtcatgcactaaccttgttccatctgtaggagcctgaaaattgaaaatcttgtaagttaaaaagatacctccaagataaatggtttgggaaagaattgaatgatttatctaagtggatagatgacttaatttattttaacagatgaatacaataatcggtagttttttaaactgattttcattctaatgtaccggaaaatacttggcgttgttgctctgacatttcgcctgagatttttgagcacagcatgtcgttctgaccttagttctcagcttggttttcctggcagtcatgcagatggaaaaagaataagagtcactggtgagagtacttttatacggcaggcatcattccgaggcttggacgggagcggtgccatttagttctagcagccactatgcgggggaggacagtgttagtatcatctcttttataaaagaggaaatggagccacagaaatgcaaagtatcctgcctgcagtggtagaaataggatttgagctcacatcgtccgattcctgagtctgcacttttaattgttgaataaaataagcaacaacagggctgggtacggtggctcacgcctgtaaccccagcactttgggaagctgaggcaagcggattgcttgagctcaggagtttgagaccagcctggccaacatgatgaaaccccgtctctactaaaaattgaaaagttagcctggtgtggtggcacatacctgtagtcccagctgctcaggaggctgaggtgggaggatcacttgagcatgggaggcggaggttgcagagacccgagattgctccactgcactccagcctgggtgacagagcaagactctgtctcacaaaaaaaaaaaaacacaaaaaataaataaataaaataagccacaacaagagaaacaagaacaacagaataaaacccaatagcaagaagagtgaagcagagctacacatatcaatatggaaggatcgcatggaaataacatcaagaagaaaaaaacaagctgtagaaagttatatacatatataagtttaaacaaatgcaatttaagatgctatcttgctctatgtggttctacatacgtaggtcaaatgttcagaaatgcatgagaatgataacctccaaattcagtccagggctagccttggtggggatgcaattaggaacacacatttcaaatgattggtcaagttttactttttaagctgggtggtgggaacataggcatttgttttattgtttatgcctttttaatgtattaaatatcacacaatagctttttttttttttttttttttttttttgagacagtttcactcgtcacccaggctggagtgcaatggtgcgatctctgcgcctctgcctccgggattcaagcaattctcctgtctcagcatcccaagtagctgggattacaggcatgcgccaccacacctggctaatttttgcaattttagtagcgacggggtttcgccatgttggccagtctggtctcgaactcctgacctcaagagatctgcccgcctcggcctcctgaagtgctaggattacaggcgtgaaacaccactcccagcttcatgatggcatttttaaatgccacctccaatccccaaacacaaagatggtggcaggcatgggctatacaggagcttggataatcggccagggcctgaggaataaggtagagagagagtccttgagtcatggctgttctagaacaggagagagactgatatttagagagactcaatccagcagtgggcaagatggattaaaaggggcagccatggtaggaaacactgtagtaatctaactccaaaaggaggctccgtttcaatctttccaccatctttttccatttgctttctaacattctcatgtccaccatccttacagaaacaaaatccacgaagtacttttgtgtgctttggttttgccaccctccaaggatcttgggatttttattttatgtctcttttcgctgctgaagtccttagcgagtgttctggactcactgtttctggttttgttgctgctgttttaaactccataaacctcagaagtcctacattcaacttcttatcacgtacaaaaaccacatccaggccaggcacagtggtttatgcctgtaatcccagaactttgggaggcccaggcaggcagatcacctgaggtcaggaattcaagagcagcctggccaacatcgtgaagtcccatctttactaaaaatacaaaaattatctgggcatggtggcaggcacctgtaatcccggctactcaggaggctgaagcaggagagttgcttgaacccaggaggcagaggttgcagtgagctgagatcactccattgcactccatcctgggtgacaagagctaaactccatctcaaaaacaaaacaacacaacaaaaaccacatccagaaagatcactggtatcctctctcctggttattgttaaatgttctttctccttaatgtctacaaagagtcaaactctgtaaaatacttgaagagatttattctgagccaaaatgagtgactgatgtcctgtgacacagccccaggagatcctgagaacatatgcccaggtggtcagacttcaggttagtacattttagggagatacgagacatcagtcaatccaggtaagatgtgtattggttggtctgaaaaggtgggacaactggaagggggtggggtggcttctaggtcataggtggattcaaagcttttcctattggcaattggttgaaagagtttatctaaagacctggaatccatagaaggaagtgtgtgggttacgttaagggattatggagacctaggttattatgcagatgaagcctccaggtaacaagcttcagagacaataggttgtcaatgtctcttatcagacttaagtctgttctatcagtcttacgttaacactggccggttgtgcctgaattctgaaagggaggagggcataatgagggatgtcccccctcccttcccattgtggcctgaactagtttttcaggttgactttggaatgcccttggctgaaaggaagggtgcattcagatggttgggggtcttagaatcatatttttgtttacattaaccaccatggaatgagctgcccttcctctttcttcatacttatctatttctattgtaattctgggtcgggtcccctgtctgggctgtccttctatgctgataattggtctcttttctccttctctttctctctctgcctgaccccctgaaccttcccacaggcactttgttcctttcctcattgtacttctcttgtaaacgaatccaggtttagagacaggatactaagcagtggaaattgtgctaggctggcaatggtaaggcctgggaccgcctcctgcttaggccaatcaccagctgtgtggccacatcatcttgcttaacacttcacctttaacaaggttcctcacctgtaaatggccaggctgtgtcctcaattctggaaatctacagcaactttaagaaattccaaccaaaccctcatgacacatagtttacctataacaaacctgcacatatacctagaacctaaaatttaaaaaaggaattccaactcctaagcccagcagtgtgctacaggtagtctgtgctggcttgagagagccaattgttaagtgtcaaggtggttgttaaatatatttttaggggctaactcatgcaaatttacaattaaattttattaagaacaacagtaataatttttttgagacagagtcactctgtcacccaggctggagtacagtggggcaatcttggctcactgcagcctccccctcctgggttcaagcaattctcctgcctcagccttctgagcagcagggattacaggtgtgcgctgccatacctggccaatgtttatatttttagtagagacggggtttcaccaagttggtcaggctggtctcaaaactcctgacttcaggtgatctgcccaccttggcctcccaaagtgctgggattacaggtgtgagccaccatgcccagcccaaaagtaataaatattcaaaactcatcacttcctaattattttactacattaaaaaaaatctatctgtaggtcaggtgcagtggttcatgcctgtaatcccagtactttgggaggctgaggtgggcggatcacgaggtcaagagatcgagactatcctggccaacacggtgaaaccctgtctctactaaaaatacaaaagttagccaggcgtggtagcatgctcctgtaatcccagctactcgggaggctgaggcaggagaatcgcttgaacctgggaggcagaggttgaagtgagccaaaatcgcgccactgcactccagcctggagacagagaatctgtctcaaaaaaaaaaaaaaagaaaaaaaaatctatctatattgttaatgctatttacagctctcatgtctgtatagtggaagtcactgctatgctactgtgcacggccttctaagttcgtgttcagggacgtcaccttgagagctgggggtcagccacgggggctgtatcttcatcagggaagtcagcaattgctacaagtcagggcttgatttattgttttattgtctagactgaggaaattaatggataaaatgttgagtgtaaattagaagtgtgtaatgactaaccattacattatgaatagcacaaaaagataaggaagtatcttcagtactccgttataaaattcagcaaaaaatttgctcacatcatggacaaataagttctgacatacatcttccttgtttcacatctgtattactcattaacttgaaaatatcaacattcatgttgggacaatacttagtcagctgaaaccatagattggctacagatacaagagttgggcaaaaatcaatgaaagtattccaagagaatcaattcattatatgtggaattgatactaaggacctcattattatactgtaggcttcattatttgtaatttgtgtatgttatgggctgaattgtgtttccctcaaatttgtatgtttaagtcccagtatgtcaggatgggattctctttggagacagggtttttaaagagataattgggccagacgcagtgattcacgcctgaaatcccagctctttgggaggccgaggtgggcggattgcttgagcccaggagttcaagaccagcctgggcaacaaggcgaaactatctctacacaaaatacaaaaaattagctgggcatggtggcacatgcatgtaatctcggctacccaggtgtctaaggtaggaggatcacctgagcctgggagttcgaggctacagtgagctgtgattatggcactgtagtccagcctgggtgacagagtaagactctgtctcaaaaaaaaaaaaaaaaaaaaaaaaagagagattgattattaagcccaaatgagatgagttggggtgggggttgttttaatcaataactggtacccttataagaaaaggagcttgggacatagacatgcctggaggaaagaccacatggggacacaagaaggcggtctcctagaggacaaggagagaggcctcagaagcagccaaccctgccagtgccttgatctcaggcatacagcctccagaactgggacaaatgaattcctgttgtttaaaccaccccgtctgtggtacttcattatggcagccctagcgaacgaatccaatgtcccgcatggtttttatatcagtgtaatcgatactaatccccacctggtgagtgttataggttgaatgtgtctccccaaaagatatgttgaaaccataaccccctggttcttgtgaatgttaagttacttggaaataaggtctttgcagatatgtaagaggaggtaatactagattagggtacgccctaatcccattattggtgtccttataagagggaaatttggacacagacacagagggagaacattccacaaggatggagaagagattggggtgatgcctcctggcctagggctgctggcaacttctagaagctaggagagcatggaactggttcttccttggagcctccgaagggaaccaatgctgctcagcccttgatttcagatttctagtccccagaactgtgagataatacatctctgttgttttaagccacccagttcatggaaaattctgaagacagcactagcaaactaatacaaagaactgtgtattaaagcctctcaaatgcaccctaaaatcaaaagcatgcatttatcatccagaacggggggaggggggagaggaggcgggaaagcaaagcactgtgtctcaggtaggtccagggactcattttccttgagacgtagcagagcttttttttttttttttttttttttgaggcatctcattctgttgccaggctagagtgcagttgcatggtctcaggtcactgcaacctctacctcaccagttcaagtgattctcctgcctcagcctcccaagtaagctgggactacaggtacacacaaccacacctggctcatttttgtattttttctagtagaggtggggttttgccatgttggccaggctggtcttgaactcctgacctcaggtgatctgcctgccttggcctcccagcgtgctgggattacaggtgtgagccaccgtgcctcgccccagagcattttcttaaagtgcaatgggcccatgtgtgtctacagcagaggacttgccagggaagctactgatgtggaattataactttgctgggcagatcctggctcctccccaggcttcatgtgattgctgcattttgctgcacttgattcctctgggacagaatgaggagggaggaagggaggcctctggatcccaagcagcctgcagggcttttcatttcctgtttctctaatctcatcacattcttgaaattgtccccaagcagctacttttgctctgagactttcttaacccttcaagtccctcttccctggttcctataccaagccctgatggccagggcactgagcttcctactcgggtcacttgctccctttggcttcctcgtttccctcccggaatgcttatttcatgtttcttgtccgtgtgcctcaccttctttcctggaagccaaggccacggctgatgccttgtcggaggcaggggtctgcaggcagacactgaatggaccagcacccatcatgggcccctggccgagcctggttcccctgtcaccagggcaggtctggtcatcttgattttcagtctctgaatgttgcctcttttcccacccagctgttagtctggagggcattttactcaaggcctgaccctctcctggtgctagagcaagggacagaaaagatgctgaaatgaagcaaatgttaaaataaagggtgaaactgggcttcactgaaattccgggttcactggataccaaatatccatgctgcagtagactgaaacacagtcccccaaaagacatcccaattcctggagcctgtgaatgttaccttgtatggaaacagggtctttgcaggtatgattaaattaaggatcttaaaatgtgggggttgtcctgggttatccaggtgggccctaaatgcagccccatgtacctttagaagagagagacgggccaggctcacgctggtaatcccagcactttgggaggctgaggcagttggatcactgaaggtcaggagttcgaaaccagtctggccaacatgatgaaacctcgtctctactataaatacaaaaattagccaggcatggtggcaggtgcttgtaatcccagctacttgggaggctgaggcaggagaattgcttgaacctgagaggtagaggttggcgtgagctgagatggtgccactgcactctagcctgggtgacagtgagaatctcaaaaaaaaagggagacaggaggaaatatgcatccaccacacaggcacacgcagatgatgtgaccacagaggcagagtctggaatgctgtggccacaatccaaggggagctggcagctggaggaaggaaagaacagattcttcctgcagcctccacaaggagtgcagcccttgctactgccttggtttcagtccagtcatatttatttgggatttctggtctccataactgtgagaaaataaatttccattgttttaagccatgaaatctgtggtaattgctacagtagccacaagaaattgatatgcatgctattcttgttcttttggtctaaggttaatagctgaccagacacaagggggactgccaggaagtgtctgctaagagcctgtcttgggaactaggctgtgaaatggagggcacattcagctctttcttttaccgcaaggaaatctctggcaccagatagttagcattttactgtatgccctgtatcatcaactataaggcaaggactattctcgtttttaaaaatctccagtgtaacagcaatctggtaggtgctcaataaaagcttcaaggtcataattcctttcaggatttgtttctggcctggcattccagaagcttccactgctttcaacttcatgatgtcaatgcatcatatttaaaaacttaagactgtagaccaaggtctcctttttcctctattcaaacccagaaattaatcagctgtgcattttaatatccacatttcattgccaccaagcgagaaagaaaatttgcctgccaattagcacagaattgaaacaagttgtttttaatcttttgaaaatgaaacttggaacaactgccatatgatttgacgtagcaagtgcgattaatcattcatttatcctatttctccctccaatgacaatcagaatgtattttgatttggagggtgcctgtgccctggcatctcttaggttcttgacagaagctaattaaggattagtttggaaaagggcaacttgtccatttgaattcatactcagaaaggaagcaaatgcaatttgaaaatttgcgtagcaaatgatatgagctcagctagacaatcacaaatgcaatcagtttagaaagcaaataccaagtggaaagaaaacaagaatttaatcttctcaaatgaagaatgggatattcttcatgtgcccttcaggatttacctaaggagggagacagcctcagttttgacatctcttttgtctccttcaaagtttatggttccagaccctttcttacactttaggctacagagttggggctactctgtgacggaataggggatttgaaaatcatttagtgtgttacaggccgggcatggtggctcatgcctgtaaccccagcactttgagaggccgaggcaggtggatcatttgaggtcaggagtttgacaccagcctggccaagatggtgaaacctcatctctactaaaaatacaaaaattaactggatgtggtggtgcacgtctgtaatcccagctacttgggaggctgaagcacgagagtcgcttgaacccaggaagtggaggctgcagtgagcccagatggtgccactgcactccagcctgggtgacaagattctgtctcaaaaaaaaaaaaaaaaatttagtctgttacagtaaatgcacccagttttttttttgttattgttttgttttcctgacacaaggaggacttcaaaatgtctctgtggagctggattttgggcatttgaagttagatttttttaagtttaatttgattcagcaaatgttcactgagctcctgccctgagagatacatgaagacatagcgcctcctccctcccctcaccatgggagacagacaggtacacaatgacaacatacctttaaatgtgatatgtaagcaagaatctggaatgcttcttagggaagaacatccttcagcctagacttaaaggatgactcaacatttgccaggcagatggaaaggaggaacattccaagcttaaagacagtgtcgcctggtgcgttctgtatctcggagcagaggaaatgagcgtgggttgggaggacgagaccagaggggcaagccaggttacgaagggccttttaaaccacactcaggagtctggaattaatcctaaaagtcagagcaggcaagcctggctgctcattaaaatcacctgggacattttgaaaaacaattaaagctcaagcctcacccctgaccaattaagtcattctttgcgggggtggagcctgggcgtgagttttttttttttttttttttttttaacgtctcaggtgatttgaatgcctactagaattcccaccagagctgagaatcacagccctagctaaccggtctgcaaagtttttccctaaagggcctgatagggtctctcttacagctactccaccctgccattttgtgcgagagcagccctgacaatatgtaaacgaatgagcaaggccatattaaaaataaacttttcttaaaagacaagcagggttatagttggccaacccctactctagatgatgggacgccattaagaatttaagaagtatattgattcaaaattttttacagattattacatgaataatacatgaatttgttcacactgtaaatgaatctaaataatgcagacaaagttcaaggcctttttattccctcattcaaataccaatccctttcctagatgataagtgttatcaatgaggtataaatttttctagaattttctccttcctctttttggtatgtactagaaagacataattttgttttgtaagtttaaaaaatatatttattgtttttgccaggcacggtggcctgtaatccggcactttgggaggccaaggtgggaggatcacttgagtccgggagttcgagatcagcctgggcaacataatatatagaccctgtctatacaaaaattaaaaaacaaaattagctgggtatagtggtgtgtgcctgtagtcgtagcgactcaggaggctgaggtggaaggatcgcttaagcctgggaggtcaaggctgtagtgagctgagatcataccactgcactctagcctgggtgacagagtaatgttctctctctctctatatatatatatgtatatatgtgtgtgtgtatatatatgtatatatatgtgtgtatatgtgtatatatgtgtgtatatatgtacacatatatgtatatatacatatatacacacatatatatacacacacatatatatatgtaggacacagtctgtgtccaattctttttgccattacaagaattactgccacaagcatcttgcaatgtgtgctcatgtgtgtatccctggggcagattctgagatgttgacttgctgggtcactgtgcctagcagttagaaaggagtctttggttaaaccccagacactgactctggcaaacttcaacataaaagaaagctattggcggagtatggggcagctcagaggagggagggaaaggccaaagacctgcttcctggcagatgagtggagcccaagcttggctttgggccctgtctaacttcactaaagtcctggcagagggttgaccttgtgtcacagtgatgagaagtaaggctgggtgtggcttccagggatccctttgggctctgtaatgagaggacagagcaccttgattttttggtcaagattgtgcacagttggggagtggtattctctaaaagaaaatctagttgcttactaagaagagaatggcttctaggagaccaaaaaaatttcttcaggcagggtgtggtggctcactcctgtaatcccagcactttgggaggctgaggcaggtggattacttgagctcaggagttcaagaccagcctgagctacaaggcaaaacctcatttttatcaaaataaaaaaaataaaaataaaaaaatttcttcatattcttactgtcttagttcattttctgctgctataacagaatatgatagactgggtaatttataaagaaaagagatttattttctcacagttctagaggctgggaagtagacttcccagcatggtgttggcatggtgttggcatctggtaagggactttgtgccgtgttatcccgcagtggaaggtggaagggtaaatgagagagaaagcataaggaactaggctagcttttataataacccactctctacacaagtgacccggtcctgcaataatgacattagtccattattaggtctcttattaggcctaatgagctcttattagacctcaccctccaatactggtacactggggactcagtttccaacacatgaattttgggggagacagtcaaaccatgacactcaccaacacttaattggattaactttaaaaattttaaccaatacagtaggtagaaaagagtggtatctaattgtcgttcactggcaaggctgaacagctttctcatatttattaatcagttggatttccttctccaagggtttcctgttcatatcttttgtggattttaaattagtttctttgactttttaaaaatgtttgctttgtgccgggtgcagtggcttacgcctgtaatctcagtactttgggaggccgaggcaggtggatcatgaaatcaggagtctgggaccagcctagccaacatggtgaaaccccatctctactaaaaatataaaaattagctgggtgtggtggtgcatgcctgtaatcccagcaacttgggaggctgaggcaggagaattgcttgaacctgggaggtggaggttgcagtgagctgagatcacatcactgcactccagcctgggcaacagagtgagaccccacctcaaaaaaaaaaaaaagtttgctttgtaagagttctttatatgttctgaatgcgattctttatctaagctataaatatggtgactgtgttctctccttatcttttaactacgttcttggtgccttgaagagtttaaaggaggggagggacatggtcagtcttgtgattcagctcagtctagaagatcactgatggctataaacggccaagttggacaccagctctaaagttctgagtgtggtgagaaacaaggagactcaaactcattggaagaaaaatgggagggtcggtaattctcattccagcaaaaacctggaataatgaaaacctatggaaaagaggtcactgataaccagcacccactggctgagcccaagaggtctgatgcagtggaactggccaaagaagaggcgagggctcctgtcaaaagccagttaacccggtgaactcagcaagtaccgtttgtcaagttaggaccaggaggttttcaaaatgacatattcctttttttttttttttttgagacagagtctctctctctctctcaggcttgagtgcagtggtgtgatcatggctcactgctgccttgaccttccctggtgaggtaatcttcccacctcagtctctcgagtagctgggactacaggtgcaagccaccacgcctggctaattttttgtacttttgtagagagatggggttttgccacattgcccagagtggtcttgagcttgtgggctcaagcgatccacctgcctcagccaccaaaagtgctgggattacaggtgtgagccaccacactcggcctatgtagttcctttttttttttttttttttttaaagcacacatgtaagcaaaatgcagttccttcaacctgatttccagactaaatctcagaaatccaattgcagtagttaagacagaaatgctggaggagctgggtcatttcacaagctctattggggttttctcctcactccttctaaggattaccattatctttagttatgtctaagaatctatattccaaactgacaagtaaaaactgggtccttgtgtctattttaaagagtaagaggttatgaattcagcttaaactgggtttgaatacacagctctaattcttgctagcaagtaaaaggaggtaggtttatgttgttgtgtatattacttatcatttctgagcctcagttttctcacttctactaccctttactggtaatgtgaccttgagtgaatgacgtgacctccctgtgcctcagtttccgtatctgtaaaatggggactataatgattacttagctcataacattacacagttgtgtgagggttaaatgagacaatggacagaaagcaactcaaaacatgcctggcacacactagggcctacgtgttagttgttattgttactgatgtcaaaactgggagaagcctttagggtcctgaaggcagtcacccggtatgtatggtgtgtgtgtgtctgtgtgtctgtgtgtgcatttgtatgtgtgcaagtggtactgcctacacagtggtcctcaaagtggttcctaatcagcagcatctgtatcacatgagaatttgataaaacacaagctcaggcacatgttatacctactgaatcagaaactctggttgtggggcccagcattctgtgttttaccaagcctgcagggacactgaagcatgctagcctgtgaaaaccgcaggccaccattgcccctgagaaagaaatccacagtagcagccagggtagcctctgtctgaagcattcgcggcagggcagggctctgatcccaccctcctgccccttctcccgcctccctggggttaggggctgaccaatattcctggtcattcactcattcacccttctgccctctgccttctgccctctttcttccctaagaagctgggggatcacagtcacaggagattatgtcttctcagtgctgcttctttcaaataatttgagggaaaattccagactgagagagttgcttggtagggctggaattgcggctgattctgtgtgccagggttttctgccctgagggtcatgctgtcttctctacactctttaaatttctgaggtggcacacactctgggggttgggctgtcacatgttcttgaacacatacacttcaccagacagagtgtaagaatgcacaagcaaaaacctccaaatccttgaggagcaggcacataaaagagggacattgaattgaataaacatatgtactatgggaagctgaatgattggaacaggtgggtcatcaggaattttaaaaagcacaataaatataatcagagataagggagaatatgactgatacaaagcacgaaaacacaatcaggaaaagtcaagaggaacagttgaaatcaaaacaaaattgatgggatagatagtaagatggacagaggccaagaaaaattagtgagctggaagatcagtttgaagatctctcaaagcagtgcagaaaaggataaagagacatgaaggtaaaagaaaaaccaaagaatattgaggctaaaggtgccaacagttggataatagaaaccaaaaggagaaatgtaacaaagcaaacggaaggaaggcaatatttgaacgcataatgacaatactttctctggaattaaaggaagattaaaaatatcagattgaaagggtttacaggatgctaaaacaaataaagaaaatttacacttgagtacatgtcagtagagataaaattaagaatattaaaagcaatgaggaaatcctaaaaatttctggagagaacagcaatcagattgacatcagacttcaaaatgacagaagaaaagctgaaagagaaaccttctctgtatggaaactaaatattatattaccagctaactctttgtaaaaaaaaaagaaagtgtactggaaagttgcacacacacacacacacacacacacacacacacacacacacacacaaacacttagagctgaatgataatgaaaacaccagaggtcaaaatttagatacagatatagcagtacttagagggaaattcctagctctcaatacatgttataaggacacaaggaaggttgaaaacatgagctaagcaatcaactccataaatttataaaagatagatcaatctcaaagaaacaataaggacataataaaaataaggtcagaccagcctggccaacacagtaaaaccccgtctctactaaaaacacaaaaattagctgggcatggtggcaggtgcctgtaatcccagctactcaggaggctgaggcaggagaatcacttgaacccaggaggcagaggttgcagtgagccgagatggtgccactgcactcaagtctgggcaacagactgagactccatctcaaaaaaaaaaaaaaaaaaaaaaaaaagtcagaaatgaatgagacagaaaagaaacaaacccataaagaataccaaaattagcaaaaccaaaagctgattgttagagtcctcaagcaatagtgaaggaggacaagtgagaaaagatagaaataaaaactgaagaatgaaaaaggagtaaatatagatacaacaaagaataaaaaattataaatgaatatttggaaagcaagacaaaacaaataaattaaaaattttttgaatgattcaaaaagaaatagaaaaatggaaaactattaagcatttaaaaaatggaaattaagacctttcttctcactgaattatagactatgatggttgaaacagttccattctacccaacttcttacaatatacaatctcagttgttccagcaaacttcaaaagtgtgaaagttgtccatctcactttacttttttaaacctttttattttaaataattatagcttcacaggaagttgcaagactagttcagcaatgtatcagttgtacccatgggattttaatttatggaagtgacttagcatctccattgaaaggacaatgccattgaaagatgatttttaggctgggcatggtggctcacgcttgtaatctcagcactttgggaggcccaggcgggaggatcatgaggtcaggagttcaaggccagcccagccaacatggtgaaaccccatctctgctaaaaatacagaaaaattagctgggcgtggtggtgggtgcctgtaatcccagctactcgggtggctgaagcacagacttgcttgaacctgggaggcagaggttacagtgagctgagatcgcaccgctgcactccagcctgggtgacagagtgagactccgtctccaaaaaaaaaaaaagatgacttttggtacttgcatttcctggaaggaggggcctgccatgccacacagagccacctggggaagcatatggttggccaggaggcaggagggtgaaggagaagcataggtcactgcctttgtcagggtttctgcagggaagccaggcagagcagggtgaacagtgcaggactgcctggtttgaataccgtaggtggcctctgggtaacatgggtgatctcagattgtctggcacctggccctggggtgctttagggcagaggaacattgacttggtgtgtgagagtttgataaaggcgatagctggggtcatgggctctggattgattcatttgcatgttaatggtatgctcctaggataagcctttgctccttctaagaattgggtagccatgggaggggcagtctcttctcagtcagcaaggccacagatatcagagcttgacaaatacagaaaataagaaaatgtagttaacacaattgagtgatgaatgagtgaatgccaaatagacaaatacaaaatctatgaaaacacagatcaagaagggtttcacatatctttcatacagttttccccaattgtgacaaacataattacagcatatttttatttatatatttatttttttagacagggtctcgctctgtcacccaggctggagtgcagtggtgaactctcagctcattgcaacctctgcctcctgggctcaaacaatcctcctacctcagcctcctgagtatctgggactataggcatgtaccaccatgcttggctaatttttttttttgtattgtagagacagggtttcaccatgttgccccagctggtctcgaacttgagcgatccacctgtcttgccttcccaaagtggaattacaggtgtgagccacctcgcctgacctatagtacaatattttttaaaaaatgaaattgacgttgatgtaatctgtggatatagttctatgtcatggcatgtgtagatttacgtaagccacactccaaccaagattcagaacaatttcatcactagaatgttctcctttgtgttacacatttacagccatatataacccatttccctcaacatcagtaaccctagtaaccaataatcattacagctgttcctgaaagcaaaaaagtgtgaaagctgcccaactcactttgtaaatttgattataactttaattccaaaactagaagaggaagaaagaagtggtacaaggattacagagggagaaataaaactgcagaactaataagaaagttcagcaaattcaccaaatatcagaacaaattataaaaatcaatagcatatttctatgtcagcaacaatcaattagaaaatataaattgaaaataaaataccacagaaaatagccaactctactctatttaggagttgttttatctaatctgttttaaatttaccaagaaaaaaaagtaaaattataaggatacaaaaagatttgcataaatagcatggtctccaatgatggcttggtataaaaataatgtcaattcttcctcaacattaatgtataaattcaaagtaattttaagtcaatagtctagttggatgttttgatgaactcagcaaacatttttctgaaacttgtatacatgattaattgtccacaactaactagatccactttgaaaaaaaacaaaaaaaaactaaaggcagaatacctgatatactacaaatccataataataaaaaccatatagttttgtttgtttatgcttatttatgtcttttttccttcatttaaaaaattcatttcctttcatctttcttcatctcttcctttccctttctcaaattccccttgttccatatgtgtgctgtgtatcctctcatttgtaggtgttcttgttttgtgtatgtgtatttgccatatgtatgaatggttttatgcttccaccctccttctgtttttatatatgtcatgcagtgctatatttttacaattttatgtgtatctagtccagtgctagaatcagggctggctccagggcatgcaattcctgcagtcacacagggatctactcttaaaagagcctcatacttggctgaagtgtgatttgctgtcatcatcttcaaattcttaaccatttttaaacaaggggccctgcaatgtcattttgcgttggccctacatgctctgtagtcagtgtcatctcagataaacaaaataaaccagagagctcagaggcagatccatgtatatatgagacctggatataagaagaaacttgctccatgaatccatgatgaaagggaaaactatttagaggtggttttgggataactggtccaccttttggagggaaaaaaaaatgcaccatgattcagatggattaaagacttaaatacaaaaggtagaactataaagatggtaggaggtaatattagaaaatccttttgtgacctatgaatggggaagaatttcttaggaaaacaccaaaaacacaatcgataagcaaaatatttgtggatttcatgataccaaaagtatgggtttctgttcattgaaagacaccatggaaaagccaactgacagataactgccagagtgtctactttcaatgactcagacagacagaatcaaggtatagaataataagcagctctggcaaaccagaaagaaaaaagtctattaaaaattagcaaaggacacatggattcagaagagaacatttaaatggctgactaatcaataaaaataccctggctcatttgtaattagataaatgaaaattaagccagtaattaaatatcattttatatccattaattgccaaaaattaaaaagctaaacagtacaaagcaaaaaagaaaaaaaaaaaaaaaagagccagcatccctggggaatatagattgaaggagtccctctagtgagtaatctggctggattaacacagactaagtatttgtatgccttatcattcagcaattccactcacaggtagaatctgagctccatcttcatgttgctctataaagggacacatataaggatgatcactgtgtgtttctgtgggctggagtcatctatccatccatcatctggggagtagttaagtcaaaggtggtgatggattattatacagaagttagtggccctggactagataacacataaaattgtaaaaatgtagcactgtgtgacatatatagaaacagagggagagtggaaacacaaaaccattcatacatatggcaaatacacatacacaaaacaagagcacctacaaatgagaggatacacagcacacatatatggagtgaggggaatttgagaaagggaaaggaagggatgaagaaagatgaaaggaaatgatttttttaaaatgaaggaataaaggccataaataagcataaacaaacaaaaaagactctgcaggaccagggctgaaaatgccatgaactgtggaacttgatcactctaatcttccgctcctaaggttaaatgaaaaaagaaaaaaattaactctctctaaagtaaggtctcacagaactggataaaattttttaaaaacatgagtattttctcctgggtatatgtggtggagaaagaaaagctatcaaattttagttataccttttcactccccagaaagcgtttgttttttaaaagaaatcaaactcttcatctttttcagcactgttggtagacaatgtaatagcacgaaaattcacatcattgttctcccagcatgatgagaggggctatgtatgcaaaacataggctcaaagagtagcatctgactagatctgtttctcttctttttcagtcacataagtttgatagattcagaaggtagagctgagtacctatcaatttatttaaacgtgactccagaaaagtaattctgcaaacttatcttgccttgcaattcagtgtatgactctctggggaagcttgggagcaacactttcaatggaaacaatggacaggctgggatcatacatggagtgtctttccacccctgctcccaaggggaacttccgagggtggtactgcaagcttcatatactgcaggtgagtgtgggagacctgcacgcttgctcttgcaggacaagtgaatgtcatgatatagaacaaaatacaactccattgattccttttcttaattaaaaaaaaactattatgatgttttgcaaaaaataaaaactaagttttaagtacttgacagaaacctgctccgcatcttgagtgtgggacattaaatgagactgttgttcacaaaccacataggacttgagatattccttctaccacattgtatggggcaagacctctggacaactttcaccgggaatccaaggtcaaacactggtcagcagcttctatagcttcaaatgctatagctctctttttgagagctattttgagtttgctggtagctctcttctgcccttctctgctggggtccagtagggactctcctctacttcagattttgaggtcctttaccaaaggaccgcatcattacttggtatgaggtggattaagtcaaggagctttaaatgcactcctgattcatcaacagcttttagaataccagaggcagggtggacttcccattacccttaactcttttctcagaaacagagctctgaacatgaatttgaggttatcctagcagatgggccaggacttttatgaaaacattactaaatcagttgaccaagtttgcagggctatcttcaaagcatgttaatccttttattgctcaggaacaaagcaaacaaacaaaacaaaaacaaaaacaaaaaacaaaactaggaacagcatagcctgttattaaatacaaagatagactttatgtgtgtcacacagtactaaaggaaaattacaagttggctaataacaactgtataaagtaacaataagaaatccaagctctctgatattaatgctataaaatgatcttagaatggttcgccgtggagacagggagatgaccacctagctccatttgtcatgctgagggttgggatagtgattgcttgaggggattaatcagtgcatacaaatgtcattttcaaagcagattaatggttttgatattggagaaaaaggtcaggcctacacaatcctctaaattacgtgtttaaaacaatcacctcagaattttttatttataatttgatgttttctctattgggatggcattctagttattggcttgatttgttaataaaatctttatttgatacaatgtgtcctgccaccaagaaatggcaacttggaaattgtattgaaaattgcaggagatgcaactcttaatgaactctaatatggaagagacaggcaatggggcagattatccaaaactagtggttgctttttaaagaatcagctacattaagccttgaggctttttttttttttttaatatgcatgtgtctgatgctctggaaattcacttgaactactcagtaatggaaaagtcatcttttaagaagttagaacacttttcttctttcaacatccttctctcccactcccaatctgattatttagcagcaaacttacttgggatgatcatgcgtatatgttatgaatgccaaaatgaaagaacattgtggcgatgtgtttcccaggatggggctgactacagtgtgggcgtgtgtgtccctgattcttgtgctgaagaggatgtgactctgatgtctcggctgggtaggtacaaaagaatatccagtgaaactatcatctcacagcataatgttgggaaaaccccagctcttagaaccaagaaaggtaattccttcaggattgagccaacctttcatcgtgatcaatctaataaaccgagcctaatggaggtttgaggggtccaggggtaaagatggtggaataagtaatggagtaggtaggaagggagacaataaggaagagatagagttgaatctttatgtaataaaaatataaagttaaaccatctttcctcacccacagctgcctggttaggctgaagaaaggaggtgggtggtgtttggtttcactattgtgagtgttctgtgccctggcccatgtgtggcaatctgccacctgccatatccagaggccattctgaacgaggactgtgtactgtcaacatgttgtaatggattagcattaagagcccagcatttggtcctggttgtcacctcccagctgtgtgatcctgggccaattacttaatctccccaagttcagtctcttcctctgtacagtgaggggtggctctgcatggctctctctatggccttctaatcacttctcccttagctatgcagaaggaatacattttagtctccacagaaactgatttgacttcccctaagtctttcaaagttttcaaagcaagaattttaaacctagatttttgccactattgtattttatatttattctggtcatccagagaagaactaacacacactaaagttatacattattaggagtgagaagaactaacatataataaagttatacattattaagagttctcctttaaagtattgatattgcagctagttgtcaaaatcttaaatggtcctttgcatttgtgacgattcctgtagctttgggtatattatctatctagccaggtatttcatgtgctgtttaaaaaagcaataaatcattgcaaatcaaattcaaatttcaattcttgttggataagccgtaaatatcctagaaacaaagataaatgtgtagttattattaaattagcatttcaagtgactaagtgactctgtaagtctaatgagttaatagtccttattatttaagagatttgtcaattagcctaatttttcagactaatgccaagctttctagccagagttgacattagaataaaataaaatattagaaataattgccgttgataaaaagatgttttgagaaagaagcattcaaagagaaacaagatggagattctctttgaggaaccaggaaaagaaaacggcctggttgttgtgagctgagctgacgtgggtggatggataaggggaatttagtctttgctgcccaggcatttttccagctctggcacagaggcagcagatagaaattagaggtctttgcccagggtaaaaggtccccatctggaaaggatttgtcagctattccttaaagctgtttgatggagctgccaatatttcctctacagatgtgagacaaccagctcggcagtaccaggtggaagctgtttgcacggactgcactcacccagaggaggggagcagggagggctggtctcagatcgggcgagaaaaagtgccccagtactgcagagggagagcaagatcctggcaggtcaggacgtaactgcttttggccaaaggctagggcaaaacgctgcacagttgttgtcatagaatgttataaaatttcacccaacagactttaccagagttcctaagaataaaaatatgtaacaccagaatgctgagagcctggatggaacttggatgtggtgattatgaaacccaattatgggatattttcctaaaaatccagacccatgcattttggtgtcattaatagtcctttcccatcgctgctgtaacaagtgaacacacactgggtggcttagaacgacagagattcattcttttgcagttctggaggctaaacctcagaagtcaaggtgttgatgaggttggttccttctggaggctctgagggagagtctgttccttgccccactccacgtgcctggtggctgccagcaattcttggcactccttggcttgtagccacatcattccaacctctacctccacctgcatgtggagttcttccctgcgtgtccaaacttccctcgcataaggacaccagtcatactggatttagggcccaccctaacctcatcttaaagttgattacatctgcaaataccctatttccaaataagatcacatatgctgtactaggagttaggacttgaacctttttggaggacacagttcaacccaaaagactacctaatacctacttcctagtctggctagattatctgagttccctttaacataacagggagttgggaggatagggactcatagccccttagctcagggccctgctcttagaatatgcttgacaaatgttagataatcttgctgaagtttaattgtgaggcagaggcaatctacctggtcacagggaccacaaaagagctgacaaagaaggggcttgggtgtttttgtttttgctttgtttttttgagaaaagaatttgctctgtcccccaggctggagtgcagtggcacaatcatggctcattgccgcctctatctcctgggtccaagccatccttccacctcaacctcccaaatagctgagatcaggcatgcaccaccacacccggctaatttgtaaatgttttgtagagatggggtctccttgtgttggccaggctggtctcaagctcctggagtcaagcgatccttctgcctcaacctcccaaagtgctgggattacaggtgtgagccaccgcacccagcctggggcttgttttaaaggtctgtttaacactgacttgtgtctgattttatccagacacaacactgaagagctgcatatttccattctcggggactcactctaagtctgagacacactcactctaagtctgtcccattggagactttataatgttttatgattatcacactgtcccagtttgcagtggccaaaagcaatgagttccgagtcgcttagaatcaacgtttaacagtcctttacaataagctttaaactgtgctctttcctatgctctattaggctaatttcaccttgctttgcctgtgagaatcactaggcctacatagcagaacaactgtgctagaagcacgagggaagatttttctcctcgaactctctcttacagattccctgagcgccaatggagaaaatggaactcttttaatagtaactccttgaattacccatagaattgcctttctggctaaggattcaaaaggaatccaaaacatttcacagaataccgttttgtgttctcaattcaattcagaaaatatttattgagcaattttctctctggcctttgtatgagacatcacctgtatgcgctggggaggaggaaggggatcaaaatgattgagagtattcgtttcaaaaaaatgcacaatttagttaggaagaaaagtgtgtgtgcctgagctattaggaaacactgtcaggaaagaaatgtccaacctcacatcaagtgctggggctgggcatacaagctggagaagcagagcccagcatggatagagtaagagtggggaatttagacagggcttgagctgaccttgtgttagtgaagaggtcagggtggggtggggtgagaagttgttggaaaacagattcaacagaggtttccaataaaggtttcatatttcccttgtagatctggaatctagcacagcatagacatttaaggctgattacttaaggccgattggatgtgcgtgggctgccggttgtctttgtttactatggcaggatttagagctgggctgtggttgattgacaaaaaaaccaaccaaccaaaacaaaaaaaaccaaaccaaaacaaaaatgccatttgattcctttaaaattagaaatagaacttccaaagggaacagacgtgcgctggctggtcagtacacttcgttttcagtggaagagtttagtttggatacccaaatactaacaggaagtagctccagggagcattggttcagagcaaatggaattggattatgaaaaattctgctgccaggtctcctgtgggaacctgctggtaacctagatcaagcaccccaactcttggccagggctgaggacacacagatgacccttccttctcgtctctacccttaccatgctacaattaagaatcacagttaatcacatattattagtctttcagcagcatttttggacatttcagaaacccttgggtcacagactcatgggaaccttgagggttagagatggaaaggacattagaatacatcatgtcccttgtgtttattgcagcattatttacaatagcaaagacttggaaccaacccaaatacccatcaatgatagactggataaagaaaatggggcacatatacaccatggaatactatgcagccctaaaaaagaatgagtttacgtcctttgcagggacaaggatgaagctggaaaccatctttctcagcaaactaacacaggaacagaaaaccaaaccctgcatgttctcactcataagtgggagttcaacagtgagaacacatggacacagggagggaaacatcacacacggggacctgtcagggggtagggggcaagaggagggagagcattaggataaatacctaatgcattcggggcttaaaacctaaatgacgggttgatgggtgcagcaaaccaccatggcacgtgtatacctatgtaacaaacctgcacattctacacatgtatcccagaacttaaagtatgataataataaaagaatacatcgtgtctgacccacccttcactgttacgcagatgaggaaatgagacccagagagatgaagcgacttgctcagggtcacacagcaagctagctcaaacttgagcctcttgaatgcaagactaggcaatgtggtgtggtgagatgaggaacacccaacatttatcaaacttactgcctgtcctgcactgtcctaagggctttacaatcattgtgtcacttagttctcatgacaaccctacgaggtaggtactattatgatccccattttaaagaaggaggaaaaccgtgttcccatcctttgtggggattttggaagtcccctggtcttaattctaaccgtgtgctcctgggattcacagcaagagcacctgtaaacttgtcagaagtgcaaagtcaggttccacctcgaacctcctggatcagaaacttgcagggaggggaggcagagagccaacaggccctcaaggtaattctgaggcttgtaaaattggagacaactgccctagtcttaccagtaagatctttacgcgcaatttcttccagtgctcatcagctgtgtcctgactggctgcttcttacctttaatttcagacggcacctttccccagactatgggctgcaattgtatatttccatcttatattgcatttctctctcagggggcttgttcactaatagatttgagccagcaatggcacgtgtttagtttttttgtacccagtaccgtgtgctaggaaaggccaggagaaaagactgattcaggagacccgggtttacttccagctaggctaagagttcctcattccgtgagtttccacatttttgtgccctgtttccctccagctgtaaatcagatatattcaaaaccagctgtccccgccctgtttttttggagacagtctcgctctgtggtccaggctggagtgcagtggcatgatactggctcactgtaacctctgcctcccggactcaagtgattcttgtgcctcagcctaccgagtagctgggactacagacgtgcatcaccatgcctggctaatttttctatttttagtagagacagggtttcaccatgctggccaggctggtctcaaactcctgacctcaagtgatctccctgcctcggcctcctcccaagtgtaggattacaggcgtgcgccactgcacccagctccagctgtccctttttactgtaaaagtttcgttttgaaacaatagatatgaaaacacttggaaaaatgtaaggcattattacaaactaaatgatttatacactctctttttcttttctggtagatactttaagattcagaaatacttcatttttggccccttccctctttctttttacaataaattcttcctccttgtctggtgggagtgtgaccagatgtgctgctggaaagatccccctggacacatttgctgccgtatgtctgtgagtatggacatccaaggtacctgggtgggttgtgatctgtcggtactgttttatcaacttccccttatccactgcatttcactattacatttcattcattgcacgatgtctggccagtgctgcctgtttcaggatattatggtctgagtgtttttgtttcctctacaaaattcataagttggaatctcacccgcaatgtgatgatatccagagatggggcctttgagaggtgcctgtcatgagggcagagccttcacgaatggggtcaggtagtttagacaagggaccccagagagccctcttgccccttccaccatgtgaggacacagctagaaggcgccatctatgaaccagaaagtgggctctcaacagacaccgaatcttccagcactttgattctgggcttcccagactccaaaactgtgagaaattaatttctggggcatataagccgcctagcctatggtattttgttataacagccaaatagactgagacacagggagatcaccatttaccttttttttttgagacagagtcttgctctgtcacacaggctggagtgcagtggcgtaatctcagctcactgcagcctccacctcacgggttcaagcaattctcctgtctcagcctcccgagtagctgggactacaggcgtgtgccactgcacccggctaattttgtatttttagtagagacagggtttcatcatgttggccaggctggtctcgaactcctgacctcaggtgatccacccaccttggcctcccaaagtgctggcattacaggcgtaagccaccatgctcagcccaccatttaccttaaacaagaaaatgcacaattgttcaaggggaaggccgaccatgcccagtgtgattggtttcaggaccactgagaaatgtattctatcccaaaacattcctgttccttgctgtcaggtgaccactgaagattaattttttatttgaggcattgccttgcctacagacattacagcaagtcacccaatactttttgggtgttgcccaggctggagtgcagtggtgtgatctcagcttacttcaaccttcgcctcccaggttcaagcaattctcctgcctcagcctcccgagtagctgggactacaggcacatgccaccatgcctggctaatttttatatttttgtagtagagacggggtttcaccatgttggccaggctggtctcgaactcctgacctcatgatctgtctgcctcagcctcccaaagtgctgggatcacaggcgtgagccactgcgcccggcctcttagcataaattaaatagaagtacaattgctgggtcataacttgaaccatttgatgctgttttcctgaacaattcatttttcctgcccccagtaggaaactctcatgtgttcctttaccctctcaccagcatcaaaagctactacctttataaaaagtggaaccaatttgataggtgaatacattggtttaatttacaacttcaaaaaactggcaaagagggtttttctttcctaagtttatctgtcacttgtatttttctcttgtaaattcgtattctttacccccttttccatgtgtgtattagttaggctcttctttttttttttttttttttgagacagtctcgctctgtcacccaggctgcagtgcagtggggcgatctcagctcattgcaacctctgcctcccgggttcaagagaatctcctgcctcagcctcccaagtagctggaactacaggcacacaccaccatgcccagctaatttttgtattttcagtagagttggggtttcaccatgtaggccaggctggtctcaaactcctgacctcaggtgatctgcccacctcggcctcccaaagtgctgggattacaggtgtgagccaccgcacccagccaggttcttactaatttttaaagtttattatgtatataaagaatattaattctgagtcatatcagctgcagacatcttcctcagtattttggttgctttaagattttaaaaataattatgacaagttaagtgaaatccattaatattttcctttatattttttctcttttttcattagttttattcttacagcatcattctccatccttaaaattgttaaaggtttttctacgtaagtatgcagcggtttgcttttcacaggcccgttttctcggcgtcttgtttcggtgtcctgagatgagggaaggcacagctgttgtgtcttcttcctgcaggttcatcaccttgctgggtctcatcctccctccggctggaacagtctgcgtggcagctagggaatgggggtcagcctgcaggacatcgcgggaacacggggaacctctggccacttacgggagtctgccactgagcgaggcggagagcaatgaacaaagaagcagaatcccacggacacactgccgggcacatctcctcctgtcagcagcctccagcagaggaaaaagtaggcatttgaatgaaactaagaccacccaggagaagtgacttagccgagtgtgcagttggaaacgaatgcctacagtgctggcttctagcaaacgcccggcagcttccaaatgtcagtgtggaggttggatctccgctcttgacagtcccatctttgtttaccagcagcatgctaaggtcaggcaaggtcgctaaaaatgctgctttattttgtgggtacaattatccagtgtgtttttgtgctgatcaaagactagaacagggcttggggtttcactgcagcaattctctaaggaacaattccatggccacagtgtctgctttcagtgtcacacttacacacatgacccgtagaagcttcctgacatcaccaggaaggggagtgatttacatagaaactgaagggagggtgttgagtgtgcaacacaagctaattcacacagcatgctatgtgtgagccagaaacagattaacccagcataggtagtgagaggccggattttgatgagatagactgcattgggttttagtgaaaaatcaggagcattgccttcatttctacctgcctacctatacaccaaggcaaacagaatgtgtctctctctcacacaaaaaagcctggtcactcaagtaccttcagaacatgtggaataagagggtcgggctcagtggcttatgcccgtaatcctagcacttttgggatgtcaaggtgggaggactgattgagctcgggagtttgaggccagcctgtgtaatgcagcaagacccccatctctacaaaaaaaaaaaaaaattaaaaattagccaggcaacagagtaagaccctgaatcaaaaaaaaaaaagaacagagcatggaataatatttgacagatttcttttaggtccacacaattatcctttcttactgcaactagggggataaaaataaaaatgaaatggctgggctcggtggctcacccctctaatcccagcactttgggaggccgaggcgggtggatcacctgaggtcaagagttcgagactaacctggccaacatggtgaaacctcgtctcttctaaaaatacaaaaattagccaggcatggtggtgggtgcctgtaatcctggctattcgggaggctgaggcaggagaattgcttgaacccaggaggcaaaggttgcaatgagctgagatcgtgccactgcactccagcctgggtgacaagagcaagactgtctcaaaaaaagaaaagaaaagaaaagaaaagaaatttcagtgaatgaactagaaggatatgaatggatatgaataaatgataagtagcttcagggaatatgcctactgtggaaggcatagaaattattttctcaaatcctattcagattttttttttttttttttttttgggacagggtctccctctgtcacccaggctggagtgcagtggcatgatctcagctcactgccatctccgcctcctggctcaaatgatctttgtatttttagtagagatggggttttgccatgtgctgcccaggctggtctcaagctcccgggctcaaatgatccactcgcctcaaccttccaaagtgctgggattctaggcgtgggccactgcgcccagccctattcgggtcttaaggccaaaagaaaaacagtagcaacaccaacaaaaagctcaacaataagaaaaacaaaacacatgtatgtgtaagcagagatatgatataagaaggagccaagaaggcctagaggtccctggcacaacctctttcccaaagctggaagcagctctagcagccgggtggcttcctgtggacccatctgtgatgggaagtgctggctgtcaggcttctgaatgagaggcaatccctgctgtcctgtaattcccaccaggggccctggttttgccttctagggcccagaaaataatcatgctctcttgtttctattgcagccccatcagatgttgagggcagttatgacggccctgtccaagtctcagaacccctcaattacttcacacgatgtggttctagacctctgtctctgtgccactccccgcccccaaccccgcactcccacaccggcagcctgtagacagttccacagtcggagtggcagaaagagcacatgctcagggatcctgtgacccagtcaaacatgctttgattgctaactctcaccttggtcagattgtgtgacctctatgaacctcagtttccacatgtgtaaaacaggggcatagaatgggatctgtggaaggaattaaatgagatcatgagcacttaccacctcctcctaaattcattccttgtttcctcattctcttcggttaagccacgagaggaaagaaagggtaggggcttaaatctgccaaggctacatgcttgggctgctctgacctcgctcagtgagcagcagggtcagctggatcgcagggacataccacgtccacagagctgggttgcagggacatgccacgtccacagagctgggttgcagggacatgccacgtgcttccaactctctgatgggagtggagcccacagtcattagaattcaccattgtgctcatctctgctaggctggccctcagagcccgaccttttaaggctggatcacaggatttaggccagacacacctggtatggtgttagggactgaaactttaggttcctcacccaaaatgaggcaccctatgatcaggacattaacgttatgttagctttcttttagcaggcacattgaaatgtggtctcaaaataggggttttccatgttctgttgccataacaagtttttaatttttgtacttaataccattaaaggatgctgggcgtggtggctcacgcccataatccccacattttgggaggctgaggcaggaagattgcttgcacccaggagttcaagaccagcatgggcaatgtggcaaaacctcgtctctacaaaaaatacaaaaattagccgggcatggcggtgtgtgcctgtagtcccagctacccaggaggctgagccaggaggattgcatgagcctggagatggaggttgcagtgaactgagttcatatcactgcactccagcctgggggatagagccagaccctgtctcaaaaagaaaaaacaaacaaaaacccatcaaaggtaaaatatcacatctctgaatgtttgaaaataaaaatcaattcggagagacccagagattcagcatttttttctctctccacttttacgttaatcagtgagtcaaatcaacataagaccaccgtgtcttctagaagtttagagctaaattgggtatttggattcctgactctttatcctccaaataaccattgcatttgcttagaatgctttcccgtcacatgagcctgtcctttgctctttagatgagaacaatatgagtgaatgtataaggaagttttcatgacatacatacatagctatggattcagcccctgggcaacagggctcttacttaacggcctgttgcttaaagtgggctcactgtgattgagcaaaccggaagtggctgcaaagttttttagagcattgtcacaaccaatgggtcttcaactttggagtgcatcagagtcacctggaagactattacagcacagattcctgggccctgacccaaagactctgacctggtaagtctgtggtggggcctgggaatctgcatttctaataagttcccaggtgatgttgaagctgctggctcagagacctctgctttgagaaccggtgattgcatgcatcatttcagccaatcctccccacgttcttattgtttataacactttccatttacaaatgagctaaatgagcctcagggaggttgtcctccctctagaccagttattttcagaaacctttataaaccactgatgggtaagttcattcactagcagaatttagatggaaaaaacatagtaacaaaacatattgagcactagcttgccacatgaggcatcaaaccagatatttgatgttctagaatccccattacaaccctaccaaaaattatacccattctaaaagcgaggaaactgaggctcagggaggctaaagaagttggccaaacctggcagagcccgggtcctgtatctctccactgctcgggaaactgaggaggagcaggtgaatcagctctaggaggctgctggttgtgctgtagttgtggccaattcctgagtgaaaacccctgtgaatgaaaagggtgggtgtggtgacttcagacagagacgcaatcacaaagtgacttaaatggaaaaacttgtattcacggctggaacttcaaaatgttaggtagttaaattcttcaatttaagaaattgccttagatttccagagtttggttatgagccagacctcatttgtgaataagttttaattctgcaaagacttctttgtgcccacaatgttgaaggcacggggctctgtccaggaggaaatgtgagtctctcagagccggcttgagcttggaggcccctgttttgcaattccagacacttgcttcgttctcagataggtaaacattaaattctttaagaaagggaatgaattaagaagatggtattaaccattcttaaagtgatagggcttaaaacagtggtagtagtagctgtgttctcacgagtacatactaggttgcctctatttaatgtgatttataagcattatctcatttgttcttcatgataatcctttaaaatctactttgattattttgcagatgtggaaacttagacacagagaggttaattcacttgccgggggtcacagagctgataaatgacagaatcagagccaggagcatctggctatatggcctgtgccctaagctcctgtgccactggtccttctgttttcatgcctatactttgacctacgttagggttgttattcattattattattattattattattattattattattatttttgagacggagtctcactctgtcacccaggctagaatgcagtggtgcagtctcagctcactgcaacctccacctcctgggttcaagtgattctcctgcctcagcttccggagtagctgggactacaggcatgcaccaccatgcccggctaactgtatttttagtagagatggggtttcatgttggtcaggctggtctcaaactcctgacctcaagtgatccacctgcctcggcctcccaaagtgctgggattacagacgtgagccaccgcacctggctcattattcataagtaactagtcctcaggattgcaggggtgttctttcaagtgaaagtcttgctttgtgtatcacatcgattcttactgatgtctgcgttctccttccctcaactcttcgtcaagcaggactggggtcaggggttggcatctctggggcctgagcttgggcagcgtattctgtgcaaagcatgtggggcaccaaactcaggtcaagtctgttagggaaagtcaagattcaaaagggagggataccaagtatgaaagtccacagatagatgaagatggaaccacggaggctgagctgagaagcccagggtcagagcaagagagcctccgagtaactgccaagatctgtggattgtgctttggttcttgttgcggggtggtgtgtggataccctggcagtcaaggtggacagtaacatctttgctcttgcccagggtttctaggagccgtggctcatgctctggagtgcttttcttggcagaagaatgtgccagccatctggactacaaaggcaccaggtggcacctgctctgcactgaatggcattcgtgtcttgagtcttctttggatcatctcgggacacaccagtcagatgactgcatggctgtctttgggtgcggagagttgatgagcctttactctaggagcagtcagggaagagacattctttggtatggcgggatcacgttggccaaaggatgggagactggcagccttcccacgagcagacttccttctgttttagacacactgtgtgtaacctcccatcagtaagctttccaggccagtgtctagtggctcctttcactccctctaggtataaatcaggtacctggctgccaggtatatagtgatacctgggtattgtattttcgttatccaaagagccgaattctctctcatcatggttagtgaagccaggacctaacatttatttttccttgaaaagcagacaagcataaacatggtccactaatatcaaatcagtgtttctccaccttctccctgctgctaccctcctgaagcgctcctatcaataatagtggtactctctaaatagggagtaaacacagcccagggcagattgaagaagcctcccgggtggtctgcaccagcccatgaataggtggtgctacagtccaggggggctgtggccaccgtgagtgcacaaaggagctcaaagctcctgaacgaccagtagggacctcagtcactgccttttattcccagtctaacttctccttcgacatgaattacattgattcttcttcttttttttttttttttttcttgagacagaatctcactctgtcacccccaggctggagtacaatggcatgatctcggctcactgcaacctccacctcctgcgttcaagtgattctcctgcctcagcctcccaagtagctgggattatgggtgcccaccaccatggctggctaattttttgtgtttttagtagagacggggattcactatgttggccaggttggtcttgaactcctgacctcatgatctgcctgccttggcctcccaaagtgctgggattacaggcgtgagccactgtgcctggcctatagtgattcttaaagcctgcccagcacaactgaaagtcgaaggtgttcctcttgctttttctgaaaagagaaatcacatgattttcttctatgaaacaaaaagacactgctttttaatgtttgttacagataatgtgcttgaatggaacagcagagtgcttagaaacccactgtgtgtttactcttggagtggtcccttctatcttggagttgatacatttttcctgatcaggtaataaggttgaactacgttttcagtgctgtagggcttgtggtgtttgttttgggatatgtgtatgcatatgtgttaccattctcactctaatgagaaaagcggaatgacccacatttattcatctgagcctttgtccatttctagacagtactgttgtcacaggagactctccactgtatcttccgtttattacatgagttaggatggctctataacacaggccttttaaacattgattgtattcatcaaaattgtttatttcagtgcttctcaaattctggcccacagagtggtacaggtgcttgatgaagttccgacttctcactatagtgaaatgggaaaaattcagaaaatggcatgatgtttcataaagttatgtttatttatatgaactattaacaggtaaaatttcttaattgtttgagaaatgtcaggcactgtggtaagcacgttgaaatagtatctcatttaatcctcatgaaaattctcatttttgcttttaaaaattggggtaaaatttacataacataaaattaaccacttagtgtaaaattcagggcatttaatacatttacaatattgcacaaccacttttttttttttttttttttttttttttgagatagagtctcactctgccatccaggctggagtgcagtggcgcaattttggctcaccacaacctctgcctcctgggttcaagcgattctcctgtctcagcctcccgagtagctggaactacaggcgcctgccaccatggctggctaatttttatatttttagtagagatggggtttcgccatgttggccaggctggtctcgaactcctgacctcaggtgatctgaccaccttggcctcccaaagtgttgggattacaggtgtaagccacggcacccagcctgcacaaccacttttatctagttccaaaggtctcagaaggcttgtctgatggatgaggtgctatttcagctgggaccggaatggcaagaaggagctggccatgggaaaatctgagacaagaaagttcaggcaaaggatcaattagtgcaaacgtgctcaggcaagagctcgggagccttattaaggagaagaaagaaggttgaagcttagtgaaggtgaggaagagtggcagaaaacacaagagaagggcaaggctagaccatgggggaccttgtaacaacactaaggagtttagacttccgtcttggtggaacgggaaggagtgagagagcttgttttaatctggacagtgatgtgatctggtttatttgaaaaatgatcactctggctcctatgtgaataatgcacctaagaagggcaagagtggaagcaggatcaactaggtgacctttgccctattttagatgagaaatggtaaggctggggtgatggtggctggaatcaagaaagaaggtcacattcaggatgtgtttaagatgtggaattgctaaggcttgttgatgcatcagatgtgaagtgtcagaaaagagacaagttgaggatgatttctagatttgcgtttcagtgtctgagtcgatggtgatggcattcattaagatggaaaaggtgggaggagaagcagggtctggagggaaaaccaagctttctgttttggatgaattaagatgaaggggccttttagacagccacatagaaatgtcaggtgagtagctgacctatcatgagtcacatcataacttgtgatatgatagctgacattcataagtcatatcataactcgtgatatggtagctgacattcttaagtcatatcataactcgtgatgtggtagctgacatttgtaagtcatatcataactcgtgatatgatagctgacattcgtaagtcatgtcataactcgtgatatggtagctgacatttgtaagtcatatcataactcgtgatatgatagctgacattcacaagtcatgtcataacttgtgatatggtagctgacattcataagtcatatcataacttgtgatatggtagctgacatttataagtcatatcataactttgtgatatggtagctgacattcataagtcatatcataacttgtgatatggtagctgacatttataagtcatatcataactttgtgatatggtagctgacattcataagtcatatcataacttgtgatatggtagctgacatttataagtcatatcataacttgtgatatggtagctgacattcataagtcatatcataactcatgatatggtagctgacatttgtaagtcgggagatcagtggaaacatcaaggctggagacataaattttggagtccttgggatataggaggcatttaaagccacagtattgaatctgatcacattaagaggagaatggaatgaccgatggggactgaaggccaggacctctggtgttccaacctttagaagctgagaagaacccacaaaggagtctgagaatgagtgaccagtgaaatggggcacaagtcagacactggggaccaggaagccaagagaagaaagtgcctcaaggaggaacgctgtggtcagcggggcccaatgctccgggagttgattgtgtaaagaaacaatttttggctttggcaaccagaggcctgccttttggtgacattgtcaggagcagagtcagtggcgtggtggacgtggaagtctggtggagtggggtgaggatgggaggatgcagacacaatgactttggacaactctttcaagatgttttgctgtttaagggagaaaagaaatggagtggagctgggctctgtacggggcaccaaggaaggttgctaaaagagaagggactcaagacatacctatggtatgttgagaatgactgaggagaaaggggcaaactgatggctgctggagatgctattgtaggtcaaactacaatagccacagagcaatgttttcataagtgcccctgttttttaaaaaaggccattaaggccgggcgtggtggctcacacctgtaatcccagcactttgggaggtcaaggcaggctaatcgcttgaggccaggagttcaagatcagcctggccaacatgacaaaaccctgtctctgcaaaaaatacagaaattaggtgggcgtggtagtcccagctacttggaggctgaggcaggagaatcgcttgaacctgggagacagaggttacagtgagccgagatcatgccactgcactcaagcctgggcaacagtgagactctgtcttgaaaaaaaaaaagtcattaaattcaaatgtgtgtgacccacacagttaggggagaactagctcccatgctgcacagagcaacagtaagggatgactaatcaccagccactttctgtgacacttacctccctaacagcctggtggcttgattcctcttctccttcaagtttttacacagcaaagccttcctcgtcccctctgtttgaagtgcaactacctagccttcttgacttcattttttctcttgatccaacatactatagctgccatttttgattgattgattaattgtctgtgtctctccagtggaatgtaaggcagaaagtttgtttttctgttttgtgcactgctgtgtcaccaggtcactgaagcagtgctagccacagagtattgttcaataagtcattgttgaaatgaatgatttcttgtcttatttccagaatctagtgtatagtttcttgtggtaatgctgaggaagagggatgaagaacgagctcagacctgtccattaaggatcgtgctaggaggtggcaagtagcccagacaggccaggctcagggtccacagtatgcagcaaacccagcagtgatacaggaatccctgggctctagactttccaagacggcagcactgggtctcaccaggcaggggaagcccagctgcagaagaccgggagtgggcccctggaggacggggaggctctgccacggggcagcaggcaaagaccagaactctgttccctacaagccaggcaaaaacgtctgtatgctggggtgggactgactggcagggtccaagccctgggagggacactggcgaggacagatcaggatgacaggcaccgaagccaaactcaatctggggactaggaaacctgtcactaggatggaaagatggagggcacgaaaggccactggtcatgtctgggccatcagtgggaatcggagacaccagagaagccacgaggtcagtcctgagatatctaaagcacaggccaaggctattgaaatacaaaacagcccagaaaactacaaatatgtagatgatttatctcccacctgggttggtctggggtcagggagggccgtgccttatgtcagtggtcctcagagagccgtcccggtgcagtttcaccagcatcacctggaattggtagaagtgcaaattcttgggcgccaccctagacccattgaatcagactttctgggggcatggctccagcaatctggactgtcacaagctctccaggttgtgcctgctgaagcctgagcagctctgtgtgagcccaggcaggaaaagccgaggccaacagaggtggccgaagccaggcagattctgacagcagcctagagacagagaagtacatttcttttctctttatccctatttgcttccatttctcaccatcagtctctgtgactgtctttttttccttttcctttagtttttattgtattactttcaaaggttcatattttcttttatttaaaattttcttttgaacaatggaaccattattaatagtgatacctagtattaccattatgctaagagcttgaaatattttatcccatgcaattctcacaataaacctataaaactggtacccatatcatccccatttttacagatgagaaacttcttgatgttcagtaatgaggtaatttgtccaagtctacacagttagtaaggttagaattagagcttacgtatagcttgtttcacaaggaaaccatgtcttactcactatgtcactgatatttacatagtaaaagcaaagccttctgattatcttgaagaataatttgttggcgactgttttgtaatcctctctcacctctcgggctgacttcatccaacactagtgcgtgctttgctctgttgcagtgtgttcaggtctttgggtcttagccccttggagctagctatcttgctcagagcctgttttcctgccagtctttctcgttgccctctcttgatgaacttgcaggccgggaggtgcatgcccacacacacagcgaggcccaggctttgcttagcaaccgtgttggcagagggggagccagtcactctgaaaagaaagaatcgccctgatttatcctttcctgaaattaataggaggccggaatcagaattggctgccctgcttcctcctcttagcactgtcttttagatgtctctataaattttgttcctatttaatgagtccaacttgctgcttttcaaaggaaaatctggaaggcagagaatggagacattctccaaccctccctgatcccttccaagtcccacccaacacacagctttgttttacaataggaaatacattagctctttagggaaacacccacaaggatcactggtataaatgtcaaaagtttgagaaactcacatacttgcttaccatccagtagcaattaaaaggcataacttttgtttctttagctgcacattctgggtaatgaatttgtcatcagggtatgttggttaagaattctgtgatcttgggcaaccctcttaataatctctaggtctcacttttcccatcagagaagccaaaatgaaagtgtcttcctttttacctaatagagctgtttattcatctattattcatctattcaatcattcactcaacaaacaactatttatttttttgggatggagtctcgctctgtcatccaggctggagtacagtggtgccatctcggctcactgcaacctccacctctcaggttcaaacgattctcctgcctcagcctcctgagtagctgggactgcaggcacatgccaccacgctcagcaaatttttgtatttttagtagaggtggtgttttgccacgttggccaggctggtcttgaactcctgaactcaggtgatccacccatctcccaaagcactgggattacaggtgtgagtcactgggtctggccaacaaatgttttttgcaaagtagttttgtacgactggagaagggaaagcaatctcattagcgaaagtactttgaaagtgatgtgctgctacacaaatggaaagtcttggtgttattatttcaaaagaccaaatggtagtcattaatattgttcaacaaatctttctgtgttcctcccttttgggcacttggcaacattccacttcctggacccattgtgattgggtgggtcacatcattagttctgaccaagtggtacctggtattgccattgcgctaagtgctttagactcttatgctaagagcttaaaacgtgacacttttagattagagggtttcgttgctattttgtggccctccagaatgctgttgtcatcttccatggtcactagtgaggtttcagatggtagctgctctgtcaacctgggcatgcagcatgagcaagaacaaaacaattgtttttggctggccaccgtggctcacgcttgtaatcccagcactttgggaggccgaggcgggtggatcatgaggtcaggagttcgagaccagcctggccaacatggtgaaactctgtctctactaaaaatacaaaaattagctaggtgtggtggtaggtgcctgtaatcccagctgcttgggaggctgaggcaggagaatcgcttgaacccgagaggtggaggttgcagtgagccgagattgcgccactgcactccagccttggtgacagaactagacaccgtcttaaaaaaaaattgttttaagacttggaggtgctttgttaatgcatcataatttattctgtacagattgggacaaccaaatgaatcaatcaatgaatgtattattgataagtaattcctgcgacaattcttctttttcttttagtggttggttaagtgcaagttcgtttttaaagatgcatcagaattcagacaaaggaataacccccaaaggcatactcagatactttctcagtcacctggtaaggtaggtgtcacgtgtgtccgtgtgaagagaccaccagacaggctttgtgcaagcaacaaggctgtttatttcacctgggtgcaggtgggctgagtccgaaaagagagtcagcaaagggtggtgggcttttcattagttcttataggttttggtataggcggtggagttaggagcaatgttttgcggggggcagtgggtggatctcacaaagtacattctcaagggtggggagaattacaaagaaacttcttaagggtgggggagattacaaagtacattgatcagttagggtggggcagaaacaaatcacaatggtggaacgtcatcagttaaggctattttcacttcttttgtggatcttcagttgcttcaggccatctggatgtatatgtgcaggtcacaggggatatgatggcttagcttgggctcagaggcctgacagtaggtttatttacttaatttctcaattcctcattgctatgtaacgatttattagttttctgtctttaaccctcttttcaaagaatttccaaagaaaaataaactgaaagaaatagttttcttccctaaatacagttgatttaagctggtttaatatggatcaaattctactgggacaaataccatgaaaactggtatgttccactggcaaaaacatccttagtcctcagctgatgggcagcagagttcaataaatgcactgtcagatttccatggaatctgtattcaacaggaaaatttgtttgtctgcaaattagtagtaattggatcctataaatcagagtgctaatggtaatgataaaaataaaacagtacgtgaccaggaaaggaacttggttgaagctctgggccatggccattctgctgggagggaggcaggaagaatgacgatctccttttttttttttttttttttttgtttttgagacagagtctcgcactgtgacccaggctggagtgcagtgacgccatctctgctcacttcaacctctgcctgctgggttcaagcaattctcctgcctcagcctcctgagtaggtgggattacaggcgcccgccaccatgactggctaatatttgatttgatttttttttgtatttttagtagagacggggtttcactatgttggccaggctggtcttgaactcctgacctcgtgatctgcctgtctcggcctcccaaagtcctgggattgcaggcgtgagccaccgtgcctagctgacggtctcctttaggaatgtgtggttggttgatgcagaagggattccaacactggggcagaatacggaatcggtggtagcagagtggcagtgacagaatgagacaaccaaagttaagggaggaagggctgggcacagtggctcatgcctgtaatctcaggcgttttggggaggcccttgggaggctgaggggggcatatcacttgaggtgaggagtttgagaccagcctggctaacatggtgaaaccctttctctaccaaaaatacaaatgattagctgagcgtggtggcacacgactgtaatcccagctactcgggaagttgaggtgggagaatcacttgaactccggaggtggaggttgcagtgagccaagatcctgccactgcactccagcgtgggcaacagagtgagaccctgtctcaaaacaaacaaacaaaaaaaacaacaaagttaagggagaaaaggaaacttcagctcatgtcatccaaccctgccattgatatattttctatgtcgtggttatttgctgagctggaagccagcactcctgactcctggttcacgttcatcttgttataccacactgtcacaaaataggaagaggagtgttgtcataatctttgggactagtgaaatgcagtgggcaagtgcagactctgtagttggactgctgagcgtgtattctggctcaatcacatagcagcggtgtgaccttgagttaagtgtctctctcagtctttctgtgcttgcatttgctcatctctaaaatgggaagaatagtgacacatcacaggactcttgtgaggattcaatgagataatgtatgtaaagaacttggaagggtgctttatacatagtaagccctcaatacgtaggagctatcattattagcgtggtggttatttataccttttaagctttccatcaaataggtgaagaatggggagaagctaaggaatagacctttgttggtttcttttcaccacagtctttgtggtttcttccaagctttataaaatctaaccctcctccagggaagggcagaaggcttatgatttcaatatattttgggtgtgtggcactggggtaagcagcctgtcctgccctgaggttttctggaggtgagaggctggcatacaggatgaggggtcatggtgataaatgctcagaggggttaggtgggggttggggcaggggatctaatggcatggtgggttctgcttgggaaaccaacttttttattttattttattttattttatttatttatttaatttattttttgagatggagtttcgcttttgttgcccaggctggactgcaatgtcacgatctcggctcactgcaacctccgcctcccgggttcaagcaattctcctgtctcagcctcccgagtagctgggattacaggcatgcacgaccatgaccccctaatttttgtatttttagtagagacggggtttcatcatattgatgagtctggtcttggactcctgacctcaggtgatccgcctgcctcggcctcccgaagtgctgggattacaggcatgagccaccatccctggcctatttatttattttttgagatggagtcttgctctatcgcccgggctggagtgcagtggcacgatcttggctcattgcaacctcttcctcctgagttcaagtgattctcctgcctcagccttctgagtagctgggattacaggtacccaccaccatgcctggctcatttttgtatttttagtagagacagggttttttgtgttggccaggctggtctcaaactcctgacctcagataatctgtccgctttggcctcccaaaatgctaggaatacaagtgtgagccactgcatccagccttgggaaacctacttcagagtaaaagtctggagctggggattgaggagagaggggttttttcaaggtggatagagcagtggtaggggcaggaggagcacggggtgagagttgggtggtagtgagaccttgtaagacaaggaccccagtgagtaaattactgcagtgtctgggcaggagagcagggtttgcactggcaattggcagtgggaatggagagaggagaaatcaaggactcaggaattttctggcttgagcaacatggcaggtggtgctggcattcttgagctggggaactctggaagggaggcaggtcagagtgggagcctagggagacaatcagtccaacctgggaaaaaatttttttgaaaatggagggaactgtcacaaacccacaagttgaactcaccctcactaaggtaaccccagtgaaaaaacagtcatgatcctggccattttgaggttctcatgtgtgctggtataactcactgatgctacctggttagcacttatcacttgtctgcttatctccaggaggacaggggtcagaccatctgttcattcactcattctgaggcccattttgtgctaggcgctgtcctaagccctgagaacagagttttaataagccatgcaaatgtgccttccagccctcaggttacattccagtgaatacaggcagacaataaataaatgaatatgcaatttgaagttgcagcatgcaaataaatgtatgctaggccagggaggatgggtgccacaaagtgatcatttggagaagaggctgggtgcagtggctcacgccttacaatcccagcactttgggaggcaaaggtgggacgatcccctgagcccaggagtttgagaccagcctggccaacatagtgagacctcatttctacaaaacatacaaaaaattagcctggtgtggtggcacgtgcccgtggtcccagctccttgggaggctgaggtgggaggattgcttgagcccaggaggcggatgcttcagtgagccgtgatcgcaccactgccttccagcctgggcgacagaacgagactttgcccaaataaataaataaataaaagaagaaagcaagctggaggctttctctggaagggcagtcaggggaggtgacttttggccagagcccagaagaaaataaaggaatgttctaagcaaagaaaatcctgtgggggaagaatggtccattccgggagaaccgaatcacaaaggtcctggggaaggaggggcgtcgcagtgtgtgaagagcctcaaagagcccaaaggtgttgtgtggagtgaagtgagccacgtggacagtgggaggaatgaggtcagagacgggcggaggctgccctaaggactctccctgttgttctgagacataaacctctgaagggtcccagcaagggagtggcatgggcagatttacatcttgcaagactcactctggctgcagggcagagaatggctgtaaggtccagatagggggagaccatttgggagctattgcaagttataagaaaatccccaaacccaacttctaggggtaagtcaggacagagattatctaacaggaaaggaagagagtaaagctctagaactgtagaactgcctggttatgtcaactagcagctacattttaaaaattagggtttttttttttttataccttgtgataaaaatgtctaactataacagaagcttataactaaaataaagggtcccccttctagtctcactccccccaggacacctgtatttaacagtttcttaggaattcttgcagaatctttccatgtatttataagcactgttcttctcctgcacgcataggattgcagtatatacttcactgtttgtacgtggtgttttcatttataatacagaattggcctatttctctataagcacacaagaacccacatccctgatgttaaaggttatcagtatggcacagtggggtaccattatgtatttaacttgtccccattagtggacatggagctaatgtccaaattctttgctgtcttagacaatgggataatctctatatatttttgtgcacttgtatagacatgtttgtgggctaaattcctacaagtggaatggggggttttgggcatttaacatttaatgtgcattttccaatttaccttcccacccaccaggtatgagaatccctgcttctcacccctccaccacactggccagtatcccacattttaatctttgaaaacccactttgacttttattctcttggaaacttggacaaaaatgtagcacctgtatatttgagggtggtttaaatatttcaaactgttttcttgttagattttcaaaaaaatcttagaaagcagaaaccctcatttcccttttagaggagaggaaagaggagacattacatgattttctcagtgtgaaaagtttagatgaacttgctactcaaggcgtggcccacccaacagcctgcagactccaagtctgcattttaacaagcaccctggggaggggggatttggcagaggtgagggatgctgcctggagtggggggcaggggaatgctcccttctgctctccttctgaagggagcagcgctggctactttccccggggaggggaggtgacagatggtgggaaggatgatcaaaaaggcggggccggaggcttgtaggggcagctgcggggcagcatggtcagatggcaaacatggcaggacccagtgcctaggacccagggaggctgttgcctgagcaaacccgcaggcgagctgatctgggaagctgtgtcttgacagagttgcctgccttttctgtatgacattgatcaacaattccactccctctcctagaatgcctaccgccctcccacccaccggacactctctatgtaggacgttctcattgtggggagaacaggggaatcaatggtctccgtccccaggtgcagaccagaggcttggtgctgagcccctctctgctggggatgtacctctaagtggagacgctccaagtcctgccagttcccatctgtgaccaccaccccagcccccaccctctcacctaggtgtctggaggtactgctgggccattgttctgccctagttgagccaaaactaccctggatttttagctatattcttttagaagagggctctgaccccagcccatgcagaatccatgccagtattatatgcgcctccaggctgcaatctcatttctaaactctaaacccacactgtccagcaaatagccaccaggtaagtgggtaagtgagatgtgctatgtgtgcaaagcccacactgggctctgaagactcagtaaaagggaaaagaatgtcaaatagcttattaacaatgtttcatattgggtacgtatttgtaatgataatattttggatatattggtctaaataaataacattaaaatgatttgtacctatttctttttaccttttaaattgtggctgctggaaagtgtaaaactgggggcagctgtgcttgcatcctgtttctgttgaacagcgctggtctagacaccttactcctgattcttcccctttgtagctgcttcagatcttgcttggaggaggtagggcgtgaaggaagggagaaatgaagcaagtgagggagggaaggaagaaagagtttttcatcgtgtgaggccatgtggaaagaacatgaaccagtgtcagatcttggtactgctatgtggttggtgaccttgggcaagtcaccctatcttctcttagctataatttcttcataaaatggaggtcatagctaccttgcaggattgttttgaggtttagaaatctctagcaggctcctcccacagtggttggcctatatgacttgctcaataaataacagtatttttagtggaacatggtggcatgcgcctgcagttctagctaattgggaggttgaggtgagaggatcgcttgagcccaggaggtggaagtcagggccgtagtgagtgagaccctgtctcttaaaaaaagagaaataaatagcagtatttttgcagcagtagcacctgagccagtacatgataggtgctcagtaagtgatctggaactcgtggatgcttgaacgtttgaggtgtggctgggtggcagctgcccacggtacaaacaatctgttttagagcaccttatgccccacccgccacgtgcccactgagatgactggagggaccccggtggaaagtcaccttctttctctcggttctctcctgccaggttgcagcctcttcacctgtattcaatgtgcttgttggttggactgttctctcttgttccctggggacctgtctgggaaatgcccaaattccactgggataactgccggcaagcatggtggacgaatctgctgttgctaaataactttgtgtcggtcaagaatgcggtgagtctcaagttgctggctttgaaaaggcagaagggtgcaaacctggagtctcatttcttcaagcagtgtggtgaactttccaagggccaacctgattctggtattttctctggagtactggtgatgctgtaggaaggtgggctgtgtgagtgggggatggcttcttgccatgcagttggtgtaaccgtaccaggctatgcagagggcagccgctgtgaacagcagagggaggggagcatagcattggccaacaaggggccagtcatcctggcacatgtcccggaggcagctgaccctgccccatcactgttcttgtgccagcccatgttgcccaaccgggaaaggacaaattattcacctccgcctgttgagtctctactgcaatgggacatcgcatcacacccttactatgtggaattctactcaagttcaaagatcttgttgctttggagcaacaagatctatgtgcgtcttggcttctccaaagccccagtttcctcgtaatgcatttgaagcaagtgaaagtgaaatagctgtaatgaaattatatcaccaattccacatatgccttgaaatcaaggctgaaaagggaatcgctaaagcgtggcagggccctaatctttgcacgtaacaactgactaactagatggctgccttccatttgcaaaggcccagccatatggacaggcttgcatcaccagctacctgcctgcaggtagggcccgcttgtctgtgatggggtacccaggggataatctgggctgttttccctgatgcaaactgatttgggccacttgcaggaagcagtggcaaggataccagccagtggcctttttgaggtagagcccaccttagatccttgaaagcagaggtgccagggccctttggagagaattgcccccaggcgcttcctcacattgacgaaaaaaatactggtaaccatctcatctggcacaagcatggactgtctgtggaactcattttgaccatgtcaatcatccatgggaactctggggttctccacaaaacatcatctggagccaagccctggttctaaatgaacatgttctttccacctagagttggggcatggggagaggcaaagaaaagagaaaaacgttgacccctctgacttccaaccgcaccataatgatgagaaactcttacattcccgtaacatgacagagttcatttcccacaactgtcctaggagatgggctatgatcattttgcttttttaaacaaaagagaaaatttgtctgaatctccattttgtaaaatggcagcaataatacccaccatccaggcttggtacaaggctcaagatgagggatgtgaaatatgaatatctctaactcaatttcctttgtcttcccatggaaattcgccccacccacctactaaattcttcctcctagtccaggcaggtggagagtgtggagcagaactggtaaatgaaggaagagtgacctttgctgctctcttttcagtgcaatggctggacctggtaccttgccaatgacttccagttccacctcaccacaccagtgattatcttcatccatgtaaagtgagtctgattgggacaagcttttctcctcatgtgccctctttcacaaaaccctcagaaagtatcccagttccgtgcagagctgctttttaaaatctaggaaactttacagaaaagtaaataccaaatcctctacggtctgccttcttctgcattcttttccaacattgatcctacgccagtcagtgtgtgttttgcagagttacaatcagtgtgtgcatgtaatatctagtgctcagctttttccatttaactgttcttataaacattgccacatattgacataacctgcatacttggcagttttagggtttatctaccatttttatggttgggtatctagattgtggccaatttttcatgattataaatgtcactgcaatgcatgcctttgaacacactactttttctcttagttattttcacaggggcagatttccaactggaattgctaggtcaaagggtaggaacaattctgtggcacttgtcacatattgtgagattgctctccagaaagagtgaagtaatttacaacgccctcagccatgtatcggtgcaccagctttcccacattggatatttatcaccttaatttttgttagttttagaaacaccttaaggcctcaataattcatggagagacttgtagttgtggattattcatgccatattttaaaaatttattgttctttgtgttaaaatatatgttcaatttaagaaacattggaaaacattaggagttaagagaggggggaataatcaccccagttccactttgtcagtcaagggaaggagaatttgctgctaatattttggggcttatccttctgatattttttctgcccagttttttttttttttttttttttttaaagagatgagggtctcactctgtcacccaggctgctatagtgcggtggtgccatcatagctcactgcagcctccaactcctgggctcaaacgattctcctgcctcaacctctcgagtaacaggcatggaccactgcaccttgctaattttttaccttctgtaaagagatgaggtcttgccgtgttgcccaggctgtgccctgcttttgatacatgaaagcattctgtatatacaccttggtatctttctttcaatagttttatgacacatgcatttccctatattattttatttttaaagcaacataatttaaatgtctgcataacattccattccatgaactaactatataatttatgtataccttctattgtttaatactgggattatttccaatgttatgcattcataaataatggcttgataaatattttcatggaaaccatttgtctccaactttgatacttctctacaacatatatctttgaggggaattaataggtcaaagggcatgaatgtcttttacgctcttgaatcataatgataaatcactttccgtagagggaacatcaatattcagtcctctagtcatccaatttaactgttgccagaatggaatattaataataaaacaaaacatctgagtcttcacatgttcttccttctgtgtccaagtttcctcttcttataaggacacagtcatattggattaaggcccaccccaatgacctcgtttaatgttaattattgctttaaagactctatcttcaaatacagtcacactctgaattactgggggttaggatttcaacataggactttgttggggacataattcagcccataacattcaatgtcaggaagatttatgagtttagttgaaatggtgctagctggaagagacttgtggagtctgtggtggagatactgatcttggaagtaggtgccagggactgggctcaagtcccccagggagttaaacacatatttactcgggtggctgtgggtttttattggatggcctgactaccacttacctaggacactgagttcttatgcctccgcactctagacttgcctgggaacccatgtgagtgtccttgtgactgaggagcactggccccgtgtcagcatctttcccaaaggctgtcgtggaaggtggatttcagtccttcagctgaaaacccacactgtccaaacttgtgactatgcaacaagatttagcttataagtggagggaaatataaaagtagggcttttcttcctttagagaatataattccatggaatgccagtggaatcaggtctttctggagctcagtaattcaaggagagaagagctaaggggtctggcagaagtcatagtaaatatacatacagcattattaccataaccccctgcttaccctcatagcagacattagtaatcaatcatagcatcatggagctagaattcatccttctttccaaatattacactaacattggtactctggctgaaaataattttctccctgtatcacttgataactgaatagtatctatctcatcccttcctcatgaacagccatggcaactttcactagcagaattgcattgtcaaaggcattttccaggtcaggctgtgcctggatggtctcgcacttgtgtttgacatttcttccacaccactgtggatcctcttaatcccaaccctcacacttcggagcaggtacaaccagacagcgcctcactctgggtgcttcaggaaacatcctagtcttatacatgcacggtcccaaagtgtggaggaattaatttgtgtgggaccatccttaacccatttgagatagaagacagtgggaaaatccttctgtctttcatctcacaggacagttttaaggtacatttcatatggccctgtggaacattctggaagaactgagcattggccaccttgatagcacatcctggtattggttttccctgcttccctgttctcctaccctatccctcattcctacacccacgtgaactacctgcacccggacatttgtctcaggctctgctcctcagttgaaggcgtgcctggttccccctctgcattagtccgttttcacatgctataaagaactacctgagactgggtaatttataaagaaaagaggtttaattgactcatggttctgcaggctgtgcaggcttctgcttctgggaaggcctcaggaaacttacaatcagggcagatggggaaccaggcacatcttaatatggtgggagcaggaggaagagagcaaagcggggaggtgctacacacttttaaacagccagatctcatgagaattcactcactatcacaagaacagcaagggggaaatccatccccacgatccagtcacctcctatcaggccccacttcaacactggggattacaattccacatgagatatgggcagggacaaagatccaaaccataccatcctccttctcgatcctctctcccctgtgcttggagtgggtccaccccgtgtcccaccctgcctttgacagtcctctctcccaaatcaaccaccacttgtatccatatcgggtttcatagatgacaagggacgttcccaggcatggactccttttgagctgcatagtaagcctcagggtgggcaggcgaggatgcgattactgttcctgtctagaccaggaaactcaagctcaaggccctgcccggtgtggcacaactaatggatggtcaagaccgaggctgcctcaggtcctccagccccagccccgctctccctgccactcatcagcctctcaaaagcagggcctctcaaaagcaggaagtacctctgatggtcaggatttccagcctttcgtgccataggaagcgcatgtgtggggcaagaaactgaagggcactcctctccgtatcctctcttctttgcaggagtacacagatcctcatcctccttggggccatgctgttcttggcatctttcacagccactgctctgatcaccttggcatataaacttcctgtcgtggctccatcagaaaccaggtaatgcggttccccagcctgcccctttctggccaggacttcccggggagggctgctgaatgccaggctgttcaccctgtgccctttggttcatggaaaaagtgggtatgaaacttttggtctggatgggaaagctgattgccttcttgcttccaaacttctgaacctttcaacctgcactggtaggtcctctctgaactcaacgttgcccattgaaacgcttcccagaggaaggagcgcccccatgtggctgtactgtgtttctcctccagcagccaattgctgcttggtggctctgttggatggagagactgaacctacctcttcaaggtcacacaactagtaggtggcacaggtgtgatttgaacttagaagccaatccacagtgctatttcccctccccaatgaggcatgtatgacacttacacaggaaaaactgttatgattacctgctaatcttctctcaatgcagtgacacaaatgaaaatcagattatgtcagtcatctgcttgaattc

SEQ ID NO: 45 - DNA, 182303 bp, Homo sapiens
gaattcttgcagaatctttccatgtatttataagcactgttcttctcctgcacgcataggattgcagtatatacttcactgtttgtacgtggtgttttcatttataatacagaattggcctatttctctataagcacacaagaacccacatccctgatgttaaaggttatcagtatggcacagtggggtaccattatgtatttaacttgtccccattagtggacatggagctaatgtccaaattctttgctgtcttagacaatgggataatctctatatatttttgtgcacttgtatagacatgtttgtgggctaaattcctacaagtggaatggggggttttgggcatttaacatttaatgtgcattttccaatttaccttcccacccaccaggtatgagaatccctgcttctcacccctccaccacactggccagtatcccacattttaatctttgaaaacccactttgacttttattctcttggaaacttggacaaaaatgtagcacctgtatatttgagggtggtttaaatatttcaaactgttttcttgttagattttcaaaaaaatcttagaaagcagaaaccctcatttcccttttagaggagaggaaagaggagacattacatgattttctcagtgtgaaaagtttagatgaacttgctactcaaggcgtggcccacccaacagcctgcagactccaagtctgcattttaacaagcaccctggggaggggggatttggcagaggtgagggatgctgcctggagtggggggcaggggaatgctcccttctgctctccttctgaagggagcagcgctggctactttccccggggaggggaggtgacagatggtgggaaggatgatcaaaaaggcggggccggaggcttgtaggggcagctgcggggcagcatggtcagatggcaaacatggcaggacccagtgcctaggacccagggaggctgttgcctgagcaaacccgcaggcgagctgatctgggaagctgtgtcttgacagagttgcctgccttttctgtatgacattgatcaacaattccactccctctcctagaatgcctaccgccctcccacccaccggacactctctatgtaggacgttctcattgtggggagaacaggggaatcaatggtctccgtccccaggtgcagaccagaggcttggtgctgagcccctctctgctggggatgtacctctaagtggagacgctccaagtcctgccagttcccatctgtgaccaccaccccagcccccaccctctcacctaggtgtctggaggtactgctgggccattgttctgccctagttgagccaaaactaccctggatttttagctatattcttttagaagagggctctgaccccagcccatgcagaatccatgccagtattatatgcgcctccaggctgcaatctcatttctaaactctaaacccacactgtccagcaaatagccaccaggtaagtgggtaagtgagatgtgctatgtgtgcaaagcccacactgggctctgaagactcagtaaaagggaaaagaatgtcaaatagcttattaacaatgtttcatattgggtacgtatttgtaatgataatattttggatatattggtctaaataaataacattaaaatgatttgtacctatttctttttaccttttaaattgtggctgctggaaagtgtaaaactgggggcagctgtgcttgcatcctgtttctgttgaacagcgctggtctagacaccttactcctgattcttcccctttgtagctgcttcagatcttgcttggaggaggtagggcgtgaaggaagggagaaatgaagcaagtgagggagggaaggaagaaagagtttttcatcgtgtgaggccatgtggaaagaacatgaaccagtgtcagatcttggtactgctatgtggttggtgaccttgggcaagtcaccctatcttctcttagctataatttcttcataaaatggaggtcatagctaccttgcaggattgttttgaggtttagaaatctctagcaggctcctcccacagtggttggcctatatgacttgctcaataaataacagtatttttagtggaacatggtggcatgcgcctgcagttctagctaattgggaggttgaggtgagaggatcgcttgagcccaggaggtggaagtcagggccgtagtgagtgagaccctgtctcttaaaaaaagagaaataaatagcagtatttttgcagcagtagcacctgagccagtacatgataggtgctcagtaagtgatctggaactcgtggatgcttgaacgtttgaggtgtggctgggtggcagctgcccacggtacaaacaatctgttttagagcaccttatgccccacccgccacgtgcccactgagatgactggagggaccccggtggaaagtcaccttctttctctcggttctctcctgccaggttgcagcctcttcacctgtattcaatgtgcttgttggttggactgttctctcttgttccctggggacctgtctgggaaatgcccaaattccactgggataactgccggcaagcatggtggacgaatctgctgttgctaaataactttgtgtcggtcaagaatgcggtgagtctcaagttgctggctttgaaaaggcagaagggtgcaaacctggagtctcatttcttcaagcagtgtggtgaactttccaagggccaacctgattctggtattttctctggagtactggtgatgctgtaggaaggtgggctgtgtgagtgggggatggcttcttgccatgcagttggtgtaaccgtaccaggctatgcagagggcagccgctgtgaacagcagagggaggggagcatagcattggccaacaaggggccagtcatcctggcacatgtcccggaggcagctgaccctgccccatcactgttcttgtgccagcccatgttgcccaaccgggaaaggacaaattattcacctccgcctgttgagtctctactgcaatgggacatcgcatcacacccttactatgtggaattctactcaagttcaaagatcttgttgctttggagcaacaagatctatgtgcgtcttggcttctccaaagccccagtttcctcgtaatgcatttgaagcaagtgaaagtgaaatagctgtaatgaaattatatcaccaattccacatatgccttgaaatcaaggctgaaaagggaatcgctaaagcgtggcagggccctaatctttgcacgtaacaactgactaactagatggctgccttccatttgcaaaggcccagccatatggacaggcttgcatcaccagctacctgcctgcaggtagggcccgcttgtctgtgatggggtacccaggggataatctgggctgttttccctgatgcaaactgatttgggccacttgcaggaagcagtggcaaggataccagccagtggcctttttgaggtagagcccaccttagatccttgaaagcagaggtgccagggccctttggagagaattgcccccaggcgcttcctcacattgacgaaaaaaatactggtaaccatctcatctggcacaagcatggactgtctgtggaactcattttgaccatgtcaatcatccatgggaactctggggttctccacaaaacatcatctggagccaagccctggttctaaatgaacatgttctttccacctagagttggggcatggggagaggcaaagaaaagagaaaaacgttgacccctctgacttccaaccgcaccataatgatgagaaactcttacattcccgtaacatgacagagttcatttcccacaactgtcctaggagatgggctatgatcattttgcttttttaaacaaaagagaaaatttgtctgaatctccattttgtaaaatggcagcaataatacccaccatccaggcttggtacaaggctcaagatgagggatgtgaaatatgaatatctctaactcaatttcctttgtcttcccatggaaattcgccccacccacctactaaattcttcctcctagtccaggcaggtggagagtgtggagcagaactggtaaatgaaggaagagtgacctttgctgctctcttttcagtgcaatggctggacctggtaccttgccaatgacttccagttccacctcaccacaccagtgattatcttcatccatgtaaagtgagtctgattgggacaagcttttctcctcatgtgccctctttcacaaaaccctcagaaagtatcccagttccgtgcagagctgctttttaaaatctaggaaactttacagaaaagtaaataccaaatcctctacggtctgccttcttctgcattcttttccaacattgatcctacgccagtcagtgtgtgttttgcagagttacaatcagtgtgtgcatgtaatatctagtgctcagctttttccatttaactgttcttataaacattgccacatattgacataacctgcatacttggcagttttagggtttatctaccatttttatggttgggtatctagattgtggccaatttttcatgattataaatgtcactgcaatgcatgcctttgaacacactactttttctcttagttattttcacaggggcagatttccaactggaattgctaggtcaaagggtaggaacaattctgtggcacttgtcacatattgtgagattgctctccagaaagagtgaagtaatttacaacgccctcagccatgtatcggtgcaccagctttcccacattggatatttatcaccttaatttttgttagttttagaaacaccttaaggcctcaataattcatggagagacttgtagttgtggattattcatgccatattttaaaaatttattgttctttgtgttaaaatatatgttcaatttaagaaacattggaaaacattaggagttaagagaggggggaataatcaccccagttccactttgtcagtcaagggaaggagaatttgctgctaatattttggggcttatccttctgatattttttctgcccagttttttttttttttttttttttttaaagagatgagggtctcactctgtcacccaggctgctatagtgcggtggtgccatcatagctcactgcagcctccaactcctgggctcaaacgattctcctgcctcaacctctcgagtaacaggcatggaccactgcaccttgctaattttttaccttctgtaaagagatgaggtcttgccgtgttgcccaggctgtgccctgcttttgatacatgaaagcattctgtatatacaccttggtatctttctttcaatagttttatgacacatgcatttccctatattattttatttttaaagcaacataatttaaatgtctgcataacattccattccatgaactaactatataatttatgtataccttctattgtttaatactgggattatttccaatgttatgcattcataaataatggcttgataaatattttcatggaaaccatttgtctccaactttgatacttctctacaacatatatctttgaggggaattaataggtcaaagggcatgaatgtcttttacgctcttgaatcataatgataaatcactttccgtagagggaacatcaatattcagtcctctagtcatccaatttaactgttgccagaatggaatattaataataaaacaaaacatctgagtcttcacatgttcttccttctgtgtccaagtttcctcttcttataaggacacagtcatattggattaaggcccaccccaatgacctcgtttaatgttaattattgctttaaagactctatcttcaaatacagtcacactctgaattactgggggttaggatttcaacataggactttgttggggacataattcagcccataacattcaatgtcaggaagatttatgagtttagttgaaatggtgctagctggaagagacttgtggagtctgtggtggagatactgatcttggaagtaggtgccagggactgggctcaagtcccccagggagttaaacacatatttactcgggtggctgtgggtttttattggatggcctgactaccacttacctaggacactgagttcttatgcctccgcactctagacttgcctgggaacccatgtgagtgtccttgtgactgaggagcactggccccgtgtcagcatctttcccaaaggctgtcgtggaaggtggatttcagtccttcagctgaaaacccacactgtccaaacttgtgactatgcaacaagatttagcttataagtggagggaaatataaaagtagggcttttcttcctttagagaatataattccatggaatgccagtggaatcaggtctttctggagctcagtaattcaaggagagaagagctaaggggtctggcagaagtcatagtaaatatacatacagcattattaccataaccccctgcttaccctcatagcagacattagtaatcaatcatagcatcatggagctagaattcatccttctttccaaatattacactaacattggtactctggctgaaaataattttctccctgtatcacttgataactgaatagtatctatctcatcccttcctcatgaacagccatggcaactttcactagcagaattgcattgtcaaaggcattttccaggtcaggctgtgcctggatggtctcgcacttgtgtttgacatttcttccacaccactgtggatcctcttaatcccaaccctcacacttcggagcaggtacaaccagacagcgcctcactctgggtgcttcaggaaacatcctagtcttatacatgcacggtcccaaagtgtggaggaattaatttgtgtgggaccatccttaacccatttgagatagaagacagtgggaaaatccttctgtctttcatctcacaggacagttttaaggtacatttcatatggccctgtggaacattctggaagaactgagcattggccaccttgatagcacatcctggtattggttttccctgcttccctgttctcctaccctatccctcattcctacacccacgtgaactacctgcacccggacatttgtctcaggctctgctcctcagttgaaggcgtgcctggttccccctctgcattagtccgttttcacatgctataaagaactacctgagactgggtaatttataaagaaaagaggtttaattgactcatggttctgcaggctgtgcaggcttctgcttctgggaaggcctcaggaaacttacaatcagggcagatggggaaccaggcacatcttaatatggtgggagcaggaggaagagagcaaagcggggaggtgctacacacttttaaacagccagatctcatgagaattcactcactatcacaagaacagcaagggggaaatccatccccacgatccagtcacctcctatcaggccccacttcaacactggggattacaattccacatgagatatgggcagggacaaagatccaaaccataccatcctccttctcgatcctctctcccctgtgcttggagtgggtccaccccgtgtcccaccctgcctttgacagtcctctctcccaaatcaaccaccacttgtatccatatcgggtttcatagatgacaagggacgttcccaggcatggactccttttgagctgcatagtaagcctcagggtgggcaggcgaggatgcgattactgttcctgtctagaccaggaaactcaagctcaaggccctgcccggtgtggcacaactaatggatggtcaagaccgaggctgcctcaggtcctccagccccagccccgctctccctgccactcatcagcctctcaaaagcagggcctctcaaaagcaggaagtacctctgatggtcaggatttccagcctttcgtgccataggaagcgcatgtgtggggcaagaaactgaagggcactcctctccgtatcctctcttctttgcaggagtacacagatcctcatcctccttggggccatgctgttcttggcatctttcacagccactgctctgatcaccttggcatataaacttcctgtcgtggctccatcagaaaccaggtaatgcggttccccagcctgcccctttctggccaggacttcccggggagggctgctgaatgccaggctgttcaccctgtgccctttggttcatggaaaaagtgggtatgaaacttttggtctggatgggaaagctgattgccttcttgcttccaaacttctgaacctttcaacctgcactggtaggtcctctctgaactcaacgttgcccattgaaacgcttcccagaggaaggagcgcccccatgtggctgtactgtgtttctcctccagcagccaattgctgcttggtggctctgttggatggagagactgaacctacctcttcaaggtcacacaactagtaggtggcacaggtgtgatttgaacttagaagccaatccacagtgctatttcccctccccaatgaggcatgtatgacacttacacaggaaaaactgttatgattacctgctaatcttctctcaatgcagtgacacaaatgaaaatcagattatgtcagtcatctgcttgaattcctccagtggcctcattggtcaccctcctacctgctgacactggaccagccacaccaactcatctcaacgcaccaagcacgctccccgaacccccttccccaccctccccaacccggggccttagcacttgcttttgagcctgaattactcttctgttaaaatctaagatcttggcagggctttctccttcacatctttcaggtgtctgtgcaaatgtcaccttctcagagcagcctttgccgatcttccaaaataaaatggccagaaccgttcctggtatgtgagtgttccatgtgaatctgtgagtgggtggcatatgagaataaatgaatgaattggtgacaacatcccaagcctcctgaccaggagactatcatgcccttcccatatcatggcatggtgaagtgattgaggaggaggctcactcatgtccagcccagcggttttcaaccctggccacatattagagtcacttgggagcttctaaatctactgatgctttcatccccacccacctccgaacaattgaatcagaatctctgggcatggggcccaggcagcggacttttgtaagcattcccagggtgcttacaaattctaatttgcagaataaattcttatgtgcagccacagttgaagaaccatacgtctagtcctcaaacaccttcccttcctccagtggtccctgcatgggcagctaggggctgagagtgcgtctagcttcagtggggaatggtgataattttaacggtgataaatttaaagcaggggttctcaatctgcctttgggaaactcaggagagttttaaaatttctagtccctgagtccatgtgcagagatgatgattccctgggcttgggtataacctggatgcctcccgtgaatggcactgtttaggcaaagcttctcagccttgagggggtatcagggtcacctggagggcttcttaacacacagatggttgagcccactgccagtaggtcagggtggggcccatgagtctgggttcctaataagttctcaggtgatgcaggtgttttttttttttgtctgtgttttttattctattgcaacagagtctcactctgtcatccaggctggagcacagtggcatgatcaccgctcactgcagcctcaacctcctgagctcaagcgaacctcctgcttcagcctcctgagaagctgggactgtaggcatgtgcctccaggcctggctaatttttttttttttgtagagttggggtctctctatgttgcccagattggtctcaaactcctgggctcaatgatcctcttgcctcggcttcccaaagtgctgggattacatgtgtgagccaccatgcctggcctgacgcagctgttgatgtcaagggatgaaaccttgaaaaacacagcttcaaagaatagtttttggtgtccttttaatagcctggcctggacctctcatcacttctctctcaggacagtctctgtccttgggacccttgggttcacatctgggtgctacatttttagaacattctgacatattggccaccagacacagctatttaaaatgaatacactcatgatatttccttgggatctggggtggaggggcctgagggaatttggaacctaaacaagccaactttggctgaggtggggccatgaggtcactgtttgcgcaccatgactaaggaaatgaacaagtgtgccctaaatgtacctttgggcttgctgattattccaatggacatctcagggatttggattccctttgccatgtccagatcaaacataacattttggcttatttccttgtatttttcagtgaagaggcgattgtattgtatttcgtggagtactacacaaagccctactgccgatttgggccagttcttgtgggcctctttctgagcatttacatgcaccaaaaccaccaggaaaacattctcagaaccaaggtatgatttcccgtgcctcactctatgggcatgggtctggctgggactgtgtggcccacctggccaggctcttccaaagctgtggatgaagcagtcagcctgctgggtactgtattgtgctgtagagtgttactgatgtctctctgtgctaaagaatcagaaggaattggccaggtgcagtggttaacacctgtaatcgcagcactttgggaggctgaggcaggaggatcccttgagtccagttcaggaccagctcaggcaacatggtgaaacccctgtcttcattttttttttttaatttaaagataaggcctttatcttcctgccagagcttgattctctgctttcttcactgacctctccttatgatcctccagatttggaacccagtgtggtcccatctgtaggagctttggtactgacccaaagaaaccaccaatgtgagaaaacatacccagtgagattacaatggcaagactttcttctggaagaggatactgagttgggttggatttttaacagcacatgctcagtggtttctatatacaagattcttggtcagatttgatggttgtgtctgggaatcaggacgtgaggtgtctagaggggaagctgttactttgcttttccagatgtaccccaagcactcattttcttctctggctcctttgtgggcaatcattctagttcaccatccaatctcgttactcaagctggaaacccgggttcatcttggatgcctcctcctcactgaccactgctctcagccaatcatcccccatgctctgccgatggtttctcctgccatcctctctcatccttttgaactgaccttaaagctcttctcatctcatgcctggatgttgtcacttgtttccttgcctctagtcttattgatctcaaatctactcttggggtgatctatttaagacaccaccttggctgtgcccttgaacggtgaaaaatctttcaatgacttccttttacatccatgataaggcttgatctgttcaacaaggccttcagagttcccatgacatcactctgcctgtctctctagcatcatctctctcaccactctctgccttgcactttgcatatcagtgataccaacctgctcacagtgcccttgactgccgccactgacacacacacaagctgttcctggcatctgtgcagttgctcatgcttcttcctccgtctggaatctgcctctaccccctcccctctactcacctctccctttcatctgacttaactcctgttttgcctagaaggctcacctagacttttcacctccaggaagtctttccttatccttccaggccaggctgtgtccttctttttggttcctctgtgcactgtatattcctgggccctggtttgtaccgcatgataaagcatttattcaccccatagactgtgagctcctggaattcactacttgtatcacctctgaatcgccagcatctggttctgagatcctgactcactgaaggtactcaacacatgaatgaatgaaagagaattttcttctcaatggaggaagggccagaagttaggatacaactcctgccccaaacccctctgccaggtcctacctttgtttgcctaggctttgtgggtaccttacctagatgttccagagaagaggccctggtccttggaaaaccttgtgttgcccatgggaggaagaagagataagattttaccgaaaggaatgaatatacagaagctgtgtgactttttctataggttgcagttacgatattttcctggaaatgcacaattcagttgtagactataacagagtgccattaaagagaggcttcaacatagtccaggttacatgggagcccagggagaaaatgtgtgtcagcaaagggcaaaacttaacttgaagagggagcatttgggaatgacttcaagggccagggtcagcaccaggaagcccggagctgaaatacaagccaagttaacctggagaaacgcgcacagttgggtacaccaaactcaaagctttagaagctagaaaataaagacacggggtctaaactggaggaagctgccaggagtgagataaggcaggatgcaccataataaagataagcagacaaggacagaaagagaacatgatacccaagatgcattttgagagactgcaggcccatttgggccagggaagtagcaaaggggtgagggagatcccaggctaaaagagtggagtgccactgagtatgtacctttcctctcccgcagccaggaacctgagacctaagcaggtctcagagacaagacggtggactgatccgatgttggttcagtgcagtgtagacataatcacagcagcttgagtacagcacggagaagcaagagagctccttggaagacagatctgggtctaaaaaggtcaactcaggtgacgcaaggtcaagatcttgaagtgagtcaggtgttaggatttaactcatggggctattctttgagctgaagacttctcacattcccattccttccacttgactaggctgctgcccaggccggggctgtgtgctggaggccctcacgtttatggtgaaggcggaagccatcaaggagcattaatctggttaccggacaaaatgggagattaggagtgggttagaacattacttattgattttcttttcactttcattttgaaatgattatagatgccccaaaagttgcaaaattagtacagagaggtgctgtgtgctccagctccccaacaggcaacgtgtgacacaactatggtacctgaccacagccagaaaatcacattggcacaatagacctcagatctaccaacacatactcattcgcgcacgtctgtacggttctgggtaattttgtcccatgtgcaaatttgtgcaaccacccccacagtcaaggtacagaactctctgtcaccacaaagatctcctggccaccccttttaaattacaaccttccattttagtcaaatctatgctgactgaggtttgcgaataaagacctaagtgacaggaataacaccaaaaaataagtttgtgtaggaggagggaattatacaatggctaaaaagggctgggccccgcctctcctctccccggagatgcaggtcctgctggggtggagctgctccctggtcaccctatttgcggtggccgctctggcatacatggtggatgactcctctgcttcctctctagtagctgcagctctctaccaagccctccaccggaccctgtgggcggcggctgtgggctgagtcctctttgcgtgccacggaggatatggaggtatggaagcggctccaggctttgctgtcgggttcacaccctgttcctttaaaggtgacaaatcgaacacacagggtgtgtaccggagtgatttctgttttctggagtggttgatgaatgactgatattgattcaaaaatatcaatttctctccatccttggaaaagacaaaggatttatgtataagatttttacatggatttatgcacaagtgtgggttctgaaagaagaacatgcagcctctccaatgcagctagtttagaagttggaaagggaattcaggcagagtaatgtcatgagaaaaaaaaaaatcagtgcttgggagcactgccttccagccacagcaccttgagccttggtttccccatccgaaggtgtagatggggaatgcttgccaggatcccctttgataactgagttggctttcaacatgcagagagccaagcagataaaaggcttcaatggaaaagaatcttctccaggttagaagggtgtatccaagtcacctgatgcttttctccccgtgatctctatttggcgagaggtaggaactgtgtgcttgggacgtcagcaaacaacagggcaaggctggcaggaagctcccagaagagattctggcctcaagcgacccaaagccctgacagaggagcagtggatctggggggaggcatgcctgcttcatactctagggaaataacccatcaggaggagtttcaacttagcctgtaaacccacaccagtcagcctcagcaaaggtggtgggaaataatgatttaccggtagcactgaccacgcccctgggaggaagacctataattagcaatgagaacaaccatgtcaggagagaaagcaacacagtgaaaatcccacagctggtgagtggctgaagtagaaaatgaacccaggtcccagcacgaagtccaaagccagtgctcttcactcctaagtgatagcacttttcccagatgttaattaaaatggttcctaaattttacaagtattttaatataacgatgctctttaatattgtaattttaaaatgagccttaatgatctttcatattttaattttaaaagctttcccttatatggaaaagtgatactaaagaggaaatggactgcgttctctctgactgatgtatttgcatttatgggaaactctgggatatgttaccacaaccctgctgcctcaccccatgaccatgtccccgagctgtcatagagcctcataaacaactactctccgtggcctggcacaggccatttataatgttgcaaacatcacagtattcctctctactgtgagagctgctgctgtttatcaaaaataactggctaacaaatgatattagagaggaatgacttaggtgaagttacaagattaaacaaatttgcattattattattattattattttgagacagactcttgctcttgtcacccaggctggagtgtaatggcacgatctcggctcacagcaacctctgcctcccaggttcaagcgattctcctgcctcagcctcttgagtagctgggattacaggcgcctgccaccacgcccggctaattttttaatttttagtagagatggggttttgccatgttggccaggctggtctcaaactactgacctcgtgatccacccgcctcggcctcccaaagtgctgggattagaggcgtgagacaccatgcccagcctgcagcattattattacagtggaacaagcaaatgctctccatcattagtctgagtaaggatgctatctcatcacccaggagatgagcaagccagtttacttattattgagcaatttatcattcaaaggtgtgttgtcactagcaaatccacaactgtaggggcacctgatgtcctagatttgtatctccaaaactatctgtaagatatcaatattgattagtaggtgaatgtaggaggtgatagcttaaatacatttttggaaaatatgtgtctacctggctcacacctgtaatctcagcacttcgagaggccgaggcaggtggatcgcttgagcccaggatttcaagaccagcctgggcaacaaggcaaaaccctgtctctactaaaaatacaaaaattagctgggcatgctggtgcgcatttgtaatctcagcttcttgggatgctgaggcaggagaattgcttgaacctgggaagcggaggttgcagtgagccgagatcaggccactgtactctagcctgggcaatagagtgacaccctgtctcgaaaaataaaaaagtgtctagctgatgatctttagaaaaaaataagagtttgaataagaagaaatgtttagttgagactttcaggactagaaaggatcttgatgattcaatgaatatttaaccatctttgcttggtagcaatgttgaccatgctggtcttgttatgctcaaagttgtcttctgttgagctgccagagtcatctgaccacattactccttcagttaaagcccttcagtggtggtctgtcacctacagctttcgtcctcaaacttaagtatatgtgggcctattctaaagaaataagaattattttggattcttggtgttggctcaacttatttttattcttattttttcaatgctttttttttcctgggaacatagattcaagttaccctgactatctgctcttatttttggtccaattttgcctaaacatgaacaaacataaacctagatacaaaattttatgtttatagcacatgcattcagaaagccaaaacaaatttatgaagtaatcataaaactataaaaccaataaaatctgcattagcaacattaatatgatatgatgaacagttgctggaatcacctgtggctcataatatgaacacagtattgtttgctttagggcgcgttcttttgtgtttggcttatctgcgtgagcatggattctttgctgacttcattcttctacaattactttgttttgttctacagtgaaactgtggtttaccttttatagccttcacttgggggaaaagcgtcttttgtctgtaagtccatctgtgtttattcacttaattacataaaatacttcttgaatgcttattctatgccaggtactgttctagaatctggggatacagcaatagacaagaaaaatccttcccttgcgagagattacagtagggtcgggggaagtttaaatatagtgaataaagataaagcagggattagtgggtaactaactggactaggggtacatttgcaaagatgtggtatgaaagcattctgggcagatggaatgtgaaggcagaggtctctagactggaacgagcttagtggcttggaggaagagcaaaatgaccagtgagataggaaccaagggtcaagggggagagagaggtgggaagggaactcagagaggagggtaggacccaggttaggcagagctttcaaggccatgggaagagtttggattttattttaaatgccacatcacatgaagtcttagtccatttcagctactataacaaaaataaagccccataaatgaggtggcttaaaaacaacagaaatttatatctcacagttctggagctgggaggtctaagatcaaggcaccagcagatttagtgtttggtgaaggcctgctttctggttcttagctggaactttctagatgtgtcctcacatggcggaagggtagggctgtctctctggggtcgcttttataagagcactgataccattcctgaaggcccagccctcgtgaactaattgcctctccaaagactccacctcttgatactaacaccttggggattaggatctcaacatatgaattttgggggaatgtaaacactcagatcatagcccatgatttgatttgtggatttgtaaaatttattttcaaatggacaaataataactgtatttatggggtacaatgtgatgttttggtatatgtatacctagtagaaagatgaaatcaagttaattaacataggcatcacttcaccaagttatctcttttttgtggtaagaatgttaagaatcttttcttttagccattgaaaaatatccagtacattattattaactgtggtcactatgcagtgcaatagatcactaaaacttactccatcggtttaactgaaactttgtacgctttgatcaatatctcccccttccccatttctccctgatatgtgattttaaaagattactctggatgtggtgtggggactataaggtggcaagaacaagagcagagaccaacagatccactgggaagctaccatggaggcccacgcaggaggtgatggaagattcacgagggtgttagccatggaggtgaggagcaatggtctgatttgagacatatttttggaagcactctatggagtctggaatgaaaggagtctgggaaggctccaaagatttatcctgagcaaattgtgattcactactgagcacttttaatgaggcttgtgcaaaggagaaacagaagttatattttatatctgtggcttaaaacaacagaaatttttttctctcacagttctggaggctagctgttcaaaatcgaagtgtcagcagggttggttccatctggattttctgagggagaatctgtcccatcccctctcctagcctctggtagctgctggcaagccttggcattccttggctcatggactcttcactccagtctctgtcttcgtcatcacatggttctcttccttgtgtctctcctctgcatttgtgtctccttttctgtctcttataaggacatttgtcattgggtttagggtccaccctaatccaggatgatctcatctctagttctttctcttaatgacatctgcaaagacccttattccaaataaggttacattctgaggttctgggtggacatatcttttgaaagatcactatgcaactcactagagatagcaataagtcctattcagaaaggaagttttcattgcatttaattttaattaagttaaatagccacaagtggctaggggctattgtctgggacaacacagttctagaatatataccaagttacagaatatttgtcctgaaaggcacctacaaatgcaagcctctcactgacagaagagtttgaggcctggcaatgttaaatgccttatcccaacgcccccctgtggctgcatcttgatccagaacccaggtgaatatgaggaatttttaccttgttttatacatgcaatgttttatgctcaggggctgaaaccatgtatctctcttgtgttatcataattcttgcaacagaaaggtggtttttggtttggtacattgtcttaaaatgataacgcataaagactttcttaggaaaagttcacagacttaggcacagaatgcaatgggagcatcgatgggatgatgggcatcttcactggcccagagacaggctgtggcttcatgcatcagtgcttgttccctccaggtctggtgaaccgtgtgctttcttgggacatctggagtttcctgtccagcatcagttatgctcgctacttggtgcatccgattctgatcatcctttacaatggccttcaggaaacacttattcaccacactgacaccaacatggtgagttagcacgcagctcctagttctgttacggtaggttatggtatcatagcttgttctcttcttgagcaacaaggcaacctatttgctttcgtggaagtcttttttttttttaagagcttcattgttctttgctttatttgtggcagaaagagggagggcttcagcacaggataatatcttttattttatttattttatttttaatatgtagcactgattgtcctacagatgcatttcatagagctaggatggtacactttagatctgaacacaataggaatcccagagtaaaactgtgttcaccctgcccactttctctccagttctatcttttctctggacaccgtgtgctgaccttcgtcactgggctggccctgacgctgttcattgagaaaccatgtcaggaactgaagcagcacctgctgggccatgaatgttctggttaaaacacaaaagaatggatgggccttgttggtaatgacgagcaaagatgaggtggccttatctaggtgatgaatgcttgtattcccgagaaggggtgtgaatctcattttgtgaaagtttaatatatacattttctttgcatttaatatgtgaaagagttcttagttcttatgatgtaagagagttctctaaatttttagtagcacaataataaacttctgttgtaccattttagcaaacaacaacaacaacaacaacagaaactggatttctttttggtttaaactccatttgattgtctgtatcaatgatcacaggaaatgattaaatgtcgtgcatttaatgtaatttgggttatgaagctcatttgggttatgctcttcacttttctctgtaaaattacaacatgcagtatgcactttcccacgacagaattgtttatgtgttattatggcgtctttgcagacttgtaactttatcctagaacctcagtggtatgacccgctagcatgcatacttcatgggtctgtcattatagggcctttcaaatatcacctattcttcaccatagtccctgttttggactgaattgtatcccctcccccaaaagctctgttgaagtcctaactcccattccctcagaatgtggccttatttggagccagggtctttatagagataatgaagtccaacgaggtcactggggatggagattctaatccagtatgactggtgtccttataataagcagaagtttggtcacggagacaggcatacacacagggaagacgatgtgaagacccagggagaagacagtcatgtgcaaacccaggaacaccaaggcaaaccccagaaaccgggggaggtaaggacagagtctgccctggagctgcccgagaaagcatggccccgtgggacacctcgattttggacttctggcctccagaactgtgagataattcatgtctgttgtttcaagccacccagtttttggtactttgtcacagcagccctagatagatggatatccctatgcaccaacatagggcctcaacaaaaactaacagagaaggaagagacctcagccagtggtttccagcccaaccccctcaatttgcagcgatgagacctagagatgaggagagactcgcaaggccaaacagagatgctaggatccaggctctcggatgtgtgttttttctaggtgtataattatgcattaactgtctacagttatggattaattaagtccattccatcgcttataataaagctctttgtgtacttactcattaaagtattaacaaccgcaggctacaaggtccttattagcgtgggatgcgccacatctgaggatgctctttgctgtccagtgcgtttgcaaagatgaccaatgtgggtggggaggggaaggctgaacgtttcacacactctgatggccacggacagctaaccttggccttgccagccagccacggggatcatctccctgaggatgatgagatgagagacctcatctccctgaggtctggtccctctgctgaagaagccaacctgagggagtggggcgccaaggctcaacagccgcgctgtgagaaggcagcctaattggcttttcagtgaacgccgaagttcatcgagttcctcgggagccccctggtggcttctttggcacctgaaccctctcacttcgttaggcctccaaggagctgttgaggaccagtggcattttcagggtaacactgccacatgggtggacttcggtgggagatgactcacatgccaacatcgttctgcagccaaattgccaaatgcttccagttatgaggccagaaatctgggacccgtggaagtaactagctaatgactgacacagcattggaaagacttttttataagggaaaaaacccaaccctcctgctgttgtaattttatataacataaggcagggttagagaaatccagttttgttctgggtttgtttcaatctagaattccccggaagtttaagatttatagattgtgtataccttatttggattctgaaacaaattgtaaaaaagtattatgatgtttataagcctggaaatttaaatactgattaggtgatttgatgatattaagggctgattgcactttttatgtaataatggtattgtagttatatattactacatatatatacatacatttatatctcttatcttttagttgcatactaaaatatttatgaacaaaatgatataaaatctgatatttgcctcaaaacaatattgggtggaactggcatagatgaaataagactggctatgtggttaatgtttgaagctgggtgatgggtccatggaacctcatgctttttctctattttcatttttattgttttagagacagagtctcgctctgttgcccaggctggggtgcagtgcaatatcacactgcagcctcaaactcctgggctcaagtgatcctcctgcctccgcctcccaagtagttgggcctataggtgtgtgctgccatacccagctaattttttttttttttttttttttttgagacaaggtctggctctgttgcccaggctggagtgctggagtgtagtggtgtgatcacagctcactgcaacctctgcttcccaggttcaagcaatccttctgcctcagcctcccaagtagctaggattacaggcatgtgccaccatgcctggctaattttggtattttttgtagagatggggtttcgtcatgttgctcagactggtctcgaactcctgggctcaagcaatccacccgcctcggcctcccaaagtgctaggattacaggttgtgaacaaccgcacctgacctcccagctaatttttttaagttcttggtagagatggggtcttactatgttgcctaggctggtctccaactcctggcctcaagggattcttctccctcagcctcccaaagaactaggattttaaatacctagagcaggtatttaaaccccagaaaattctgtaaaggggctcttgaggccctatgctcaggccactcccaccttggggtgtctacattcattttcaataaatcgctgcttttgttgcttcattctttccttgctttgtttgtgcattttgttcaattctttgttcaaaacaccaagaacctggacaccctccgctggtaacacttctagtaaagctcaaagttgagaggccccagggtccttgaagggacgagaagcctttagaactttagtccctagaccccaagtgggatttaaatcaatactgcttgtatatgctgagaggcggcctcttttggtggcctactcacatttacaccccttcctctttcactacacaaaccctgatgttgttcccttatcaaggtgcccataccaagggaaatcatcatatttggtagaaaccaataatgtgcctcctctttttctttgccagtgactggtgcgggtttgggtatgtgacccagctctgaccaatgacacacaaggagaagtgccctggggacttctgggaaagatgggcatggctgaagagggggacggacatcatggagaaagtccttgtctttaccaccttcagccttgtcacgcttctagatctgtaaatgtgaagaaggacaagcttgatgctcagaggcggacagagcaggatgtctaggctgagggaagccaggaggatggggattctacagaagagtgagggctgtgtgaataccgcatcctggaggctgcccgatccctgccagacaggccttgaccctccaggcagaaggttggcagctgcttctttggggattctgactggcccaagatgaaatccctaaaaatattgacattaaaggctcttccagaaaagtcccagccagatcccctccagtgaagctcacaccatgggctcagagtagggtgatcgactcagcctggcttacctgtgacttttttggttttggtgctgaaactcccacgttctgggacacccctcagtgttggtcaccctgactcaaagcttccagtcagcttctaagtccctcacccttaatcatgagcacaaccagggttaccacaagcctgggaaaagcctttgacatctggaaggggtaagactaaaaggattccacagaacaaaggaattttgagagaggagattatgcagagagaagaaaacttaatgaaactatcactatccttgtagaggtaagagatcttgccccagtaaaatagaaacaggatgttaagacagagaagtgattcttccttctttcactcatttggttattgactcagtcattcagttaataaccaaatatttctgacagctacttattataagaatgtcaagaatattaatatgaatgtcagaaatcttgtgctgttccagcacccagagcagggagaatgagctgaagttgcattttgctctcgtttaagaaaggggtaggccgggcgcggtggctcacgcctgtaatcccagaactttgggaggccgaggcgggcggatcacgaggtcaggagatcgagaccatcctggctaacacgatgaaaccccgtctctactaaaaatacaaaaattagccgggcgtagtggcgggtgcctgtagtcccagttactcgggaggctgaggcaggagaatggcgtgagcccgggaggcggagcttgcagtgagccaagattgtgccactgcactccagcctgggcaacagggccagactccatctcaaaaaaaaaaaaaaaaaaaaaaagaaaggggtaaagtgctgggtatttcagcagattctgtgatataaatgcatttattattattaattcaaatgttgattgaatttttaaaatgtattgattatacctaggaatgcattgatatatgcttccaagtaacaattcaattttatatagtatttcctttttgttaggtaagaaacttaaaataattaatgtctaattctgcaccttttgttcctaccattattagcagatattttttcatttttgttttttcattgatgtataattttcatacaataaaatttaccttttaagaagtatacatgtctgtgagttttgacaaatgaatagagttgtataaccaccaccataagcaggatatagaacagttccataactcctgaaaattcctggggcccctctgtagtcaacacctacctccatccctggcccttggcaatcacctatctgttttcaatccctatagttttgccttttctagatgtatttatttttaaatgtttaatttaaaaaactaaaaatttcaaacaagtctagagaatgaaacaattcataccgcatatatccacaatcccaattaaacacaggttgacattttgccatttttccttcagatgttctttttgtttgtttaaaaaataaaacattgtaaactcaattgtagacctccctgtatcccatttacttcctcccttttatccaagtttcacccatttttttaaccaatatgcatgtgtctataaatggtatactctttgtttttaagctttatataattgggtccatgctgtactaccctttaaaatatgattttcccattacacatagttatatagtccattaatttttaatgctaatgatattctatcatgtgcacgtgtatcttaaatgtttatccattccccagttggtagatacttggtctgtttcgtttttcagtattgcaaacattattgtaaacaccctttgatggtgtttccttgttgagatgtgttagttttttggggtatgtgttcaggagagtaatggcagagtcaatcttacctgataatgctagacagttttctaaagcgatttttaccaatctatgcctctactggtggtgtatgggagtagatactatcacttcagtgcctgctccccaatacttggtactattaacctgttcatttactgcctctgatgagtgtaaggtaggatgtgatcatttcaatttgcatttcctatctactaatggggttgaccagtttccaagtgtattggccattcagagtttcctcttcacagactgcctaccatatcctttgcccagttttttattggatgtttttctttttgttattgattctgagacatcccttattgatacggtttggctgtgtccccacccaaatctcttcttgaattgtagttcaggggaaagacccagtgggaggtaatttaatcatgggggcagttaccttcctactattctcgtgatagtgagtgagatctcatgagatctgatggttttataaggggctttccccttctttgcttggcacttcttcctgccattatgtgaagaaagacgtgtttgcttccccttctgccatgattgtaagtttcccaaggtccccccagccatgtggaactgtaagtcaattaaacctctttcctttataaattacccagtcttgggcagtcctgtatagcagtgtgagaaggaactaatacaattgtgtattctgaacattaatctctcatcgattatttgtgttgtaaatactttctcccctatggcaacttcatatatgatgtttttcctatgaaagttttacagtttaatgtaggcaaaattatcaatcctttctttttggttttgtccttttttgggtcttgtccatgaaattcatagaaatattcttttatattttttctgttagggaaaaagtctccagtgaaaattcctgacatcgtgctgtggtcctttgagttctctgttaagtgaatttgtaaggttaaagcagttctcagtgtggaggtgggagaaggggaggcttttttccctccctaggggagaattggcaatgtccgtgggacatgctttattgttctttagtgagtagacaccataggccgtggatgctgctaaacaccctacagtgcagagggtagtgcaccccccactccttgcaaagaaatatccaataaaaaatgtcaatagtgcccaggttgagaaaccctgggttagagaatgatggtgatgattggatcactgagtccacaccagccaggaacactcaggtgtgaagggctgtcagcacttagataagtaacactgggccatcctgtgttaaacttggcaaacataccctggccaagagagacgagtctatcggaggaaacttgactgagtgtgccaaacagtctaatttttgctctaatcacaataggaggaggaggaagtgctgtcagtgctttttaatcagatctcatttccatgctaatgacccctaccaaggatgatttgtattatgtgctgtttccaagggcacacaccatattttctagtccctaacaaatgatcagctaatttccgtgtttattaaaaatttcatgccctctttactgatgcagggtaaaagtgtgtttctgtttcctcctttgtaaaaagataaaatttggccagattagagcctgctggtctgtacaggctggtggcaacggaatcacccaaagagctttttaaaaatctaggttcccaggatctactcctggagatttccagattggagtggggcttaggaatctgtgcttttttttttttttttttttttttttccaaaacttccaaaaggattccaatgagccacaggactcaaggagtgacaggattcgttctacatcacggtctcagttgatgacattcacgtgcaaatagcaacttctccaagacatgcacagtctttggcccaaagtcagctttcttacgcccaaagggcttccctaataggccccctttgggagccatagtcattctttcaagcggccaggtaccctttggccaaagatctcttccattatgggttcgtccaggagcttggggcacttgctctctgacagcagcctccattcattaacggactcaggccagtaccagtgctcactcattcctttgtatgttcaagaaatatgtatttgttcctgctgtgtgccagttactgagctaagcagtaggaacactatgtagagaaacacaggtgcaatttctgctccctttgaccttatagtgagtgccctgcatgagggtcatgataatcacaccaaaaatacctaatttcaacttaagtgagaactgtgaaagcctgaccctaactaggaggcctgaagtggaatttctgagaagctagccctaaattgagatttgtaagacagtgatacctagtatttattgagggctcattatatgccaggtaccttcctaagcactttacagaaaccaaggcatttaatcctaatacagcatgcacataaacactattatcctcatctacacatggagaaactgaggcacagagctatgtcattggtgcaaggccaatggtgggggccaggtgggggcaccaggatatgaatccaagcagttcgaatccagagcccatatgctcagccaccatgtcctgatgggttaaccaggcagggggtttatgagcaattctttccagaagtttgactgtgaaaagcaggagagagatcgctggaagctggagtgtgatgtgggcttggaaggtgagaaagacttaggacatttgcactccttgaggattctgtgaggtattttatgtttcctcaatgcttgaaggaagatgaggactaaggaagcttaaaagagggtcttaccaccagacctgggggaccgaggcctcctccaaatgtgctgctttttccccattgtcacacagcctccctgtatctccccgggaggcccccttgttccctccagttgtgcaaacatgttcaggatcttcatggatctggaccagagacaatagaggacacttacagagactggcactctgtggttttcagatccacgctgggaatgggatggacttgtgaacagtgagctggtgatatcttcctctggtatcagatgaggctcacagcctcataaaagcttctgagacatgtagagaccctttcttgggaaacatcttattttacagaagatgaacctgagaccaatgggcttcaaacaaatcagcaaatctggtcatgttggacacaacaaatcagtgtccagaacccaacagaacccaagtcccatgagatattttctttaactctaaacaaatcccctactacaatctctgggctagaagggcagtcattctccttgatatccttttataaaacccctgcgagaaacaggggaagtctgttaaggttttagatactctacacttcagtgcttactggattgggagtttggagaagcactgtctagctgttaattacattttaaaagttcaaactactgcgttccattgtggtctgacatatagacactttgttgctgaagctaagcattcccaaccgcagaaatttgacttttcagttgctacttggtatgaataaagtaagcaggttgtgatgactatggtgatgagggtaaagggtttgagggggtggaggcttaggtgaacatcagcaggaatctgctgaggggaggtggcatggtgggaatggagggatcagggaagatgggaatgccattgtctgtgtttgcctgaaaggctgcagaaaaccacaggacaggctgaaactggagggagcaggaggacgctttctccacgctggaaatggatctgcagtggggagcttctctggccccagactgtgccttcccagctggcagtctgggagttgcttcccttttaggatttttcaatctcaacctctcctcagcgaggagtggaccaataaacccatgatcttcagctttctgttctccagctgtcagccttcttcatcatgatgacttctggcagggcaaagaaggaagacccaacccactccattcttggaagggaagatttcttacatgaatgccgaggctacactgaactggcatatggttcttctgtagagttttatgaggtttaaggctacatcttgcagatatgggggctacggccactaaaaagagattgttcctggggccagacactaggaaaaaggaagtccttagcccaggaaactgaactaagagggcaggctgtggatagttgagagagacagagaataaaaaagagaactactttctttttgttcaagatcagattgtcacaaaatttagtgaagacaaagattacttggggatgttgataaaaatacatttcctgactcctacatactaacaaaaacaagtaagcgattctgatgcctacacttcaagaaacactgatattgacattaagggcctggatgtcccaaaatatgctcctagaggtagaggatacgaaaacagcaccattgtgtggagcaggatgtggagaagggagcgatgacgatgaggatgctgctaaggtcagatacttccatggaaggtgcctgctccagggcaaaaaaagcagcaaaaggttgctgcctgccttgcttctgtctctttatccagccaccctgtgcttgctcagcaggattatcagcaaggtggcatgctggctgcatggggagaggctggctcatagccaaagaatcatgctcatcctgctcacctgagaattaagagccttatgtgcggtgctcttccatgatagtaacgagggacacaattattgccacacttggggcttattctgagaaggtcttccatacaacttgccccaggccttgtcaagaattcctccagtctcacttcttccaagctgttagtcatctagctaaatggttagctgctgcctgggaattagtgaagatctatatatttggccatctcttcttccaggaattcaaagttctacccattacaaggatttctctgtcctgccagagctacccctgaatggggctataatattgtatcaactttcagatgattgcgtggcaccttctgtaaaccaggctgaatgttttcttagtcaactgatcccaggaaaccagccgtgaggtcatggcagatggcattgtagcagcaggaggtggtgcactgagattgtacagcctctgctccagtgatgtaccgtcactttcaggacctgcccccatattccatatccacttatgatggagacctctgcaggcatccaaccttatgactcactggattagataaaaattcattatggatagcttaagtcacatgaccactaatgtcccatagccaggtattctgtttttacaagggcccaatggcaagttagaaacttttttttttttttttttttagacggattcttgctctgttgcccaggctggagtgcagtgatgtgatctcggctcactgcaacctctgccttccgggttcaggcaattctccctgcctcagcctcctgagtagctgggactataggcgcccaccaccatgcccagctaattttttttttatttctagtagagatggggtttcaccatattggccaggctggtctagaactcctgacctcaggtgatccacccaccttggcctcctaaagtgctgggattacaggcatgagccactgtacctggccacaagttagaaacttttacttagaagaatattaatagccaaagagggcttggctttgattcatgaccccagagacctttaagggtttgtcatagatttcatagagctacttgaggtgccacagatacttggagtactatttataggggccagatagcaaaggtagaccagctggagagtcttctcttgcccatcactttcaggaataattctcaaagccacatctcagtaccatgagagctacttcccaggaagccacgtgtcacttggagagtcattgccgcagctgctgaagcagagccatgcttcctccatcatgttttggcaactagtatcatcagaaatctaccatgatcgggatatcataatataatcatacactgccatgaccaggaagctgccacagaaaaaccagacatgtccaagatgttttccagcagaagcagcagaggttttgtgtgtatctcacttctaccttccaaatcccatgtgaatgcctgcttggcagaatctaagtctcagtcactgcctgtgttagtttgctgtgactgtcatgttaaaatatcaccaacagagtggcttaaacaacagaaatgtattttctcacagttctggaggctggaagtccaagatcccggtgatggcaggcttggtttctcccgaggcttgtagacagccaccttcctgctgtgcccccaaatagccttctctctgtgcgcttgcttcactggtgtctcttcctcttcttaccaggacaccagtcctattgcattaggggcccacccttatggccttgtttaatcttagttgcctctctgaaggccctatctctaaaaaaggtcacattgggggttagagtcccttccttcctccctccctccctccctctttctttctttctttctttctttctttctttctttctttctttctttctttctttccttctttctctctctctctctctctttctttctttcttgagatggagtcttgctctgtcacccagactggggtgcaatggtgtgatctcagctcactgcaacctctgcctcccgggttcaatcaattctcctgcctcagcctcctaagaagctgggattacaggcacccaccaccacacccaactagtttttgcatttttagtagagacggggtttcaccatgttgttcaggctgatctggaactcctgacctcgtgattacccacctcggcctcccaaagtgctgggattacaggtgtgagccaccgtgcctggctggggttagagtttctacgtgcttttctggaacacaatttagagtatctgataacagtgccctagctgcaaatgggtttttaaaaaatgtaacatttagctttctggtttctacagtacagcagtgagaagccggggggatctgtttcaggccagtccctttatggaacccacagctgctgcaaggaccagcctattagaatcttcggacacagactctgcagtggcaccagggaaacaagcttgcctagcatcacacagcagcatatgttcagctggggccaccgccccttttggctcagcacaggtgcaacgcaaaggagctttgcttttcctgggctcagggaaagttgaaggcaacctgagaataggtgcttcctggggaacggtgttgaacctaacccccttcctccactctttaaaatcaggtaactagtgaactggcacccaccccgaatctctcctcatgttacatcggggcccaggatacgtgtgcaaactgagcttcggagtcaccccacaatcccatggttcctctacgtcagcgattctgaaactatttggactcgagatttctttatatcttcaacattatctgggacccgaagagcctttgtttattatgtggaatatatctattgatatttactatactagaaattagaaatggaaaaaatgggataatatttataaattcctttaaatataataaattatacatttcatgctaacatatttttatggaaaataccagttattaattttgagacagagtcttgctctgttgcccaggctggagtgcagtggtgcaatcttggctcactacaacctccatctcctgggttcaagcgattctcatgtctcagcctcccgagtagctgggattacaggcacatgccaccatgcccagctaatttttatatatatatattttttgagacagagtctccctctattgcccaggctggagtgcagtggagcaatctcggctcactgcaacctccacctcctgggttcaagcaattctcctgcttcagcctcccaagtagctgggattacagtcacgtgccaccacacctggctagtttttgtatttttagtagagacggggcttcgccatattggtcaggctggtctcaaactcctgaccttgtgatctgcccaccttggcctcctaaagtgctgggattacaggtgtgagccaccacacccggctaatttttatatttttagtggagacagggttttgccatgttggccaggttggtcttgaactcctgatctcaggtgatcagcccgcctcagcctcccaaaagtgctgggattacaggtatgacccactgcgcctggcctcttttttattttttttttaagctcagggtagggcatatattttcaaaacaaaaaatgctagcgagaagactgtcattgtgctacagtttcagaaatctctttaatagctggctaaatagaagacatagctgatcttacatccgccactgctgtcagtctgttgcagtatcacatatcatgtagcttctggaaaactccagcatacactcactcataaaggaatgagaagggaaaaaagcaagcatcttggttttattctgaaaatagtgtagaccttatggattccctggaagtctttcaggaactcctggagggtacccagatcacactttgagaatcgccgctctaagccaatatgcagattaatggaatgaataaccgtggtgtatttcccacctaaaagacaggctctgtgctgaagaccgacactgacagctttcggccaggaacttatctttcccagcaacaaagaacagggtaagatacacatgaaagttttaggggatcatgaaaagaaggaaaaaaaattcagagacaagacaattggaatacccttgactgagactcaaaaagaaaaatgaaacttttagtacatcatattgaaaatcccatggattcaaaaagaaggcagcatgtatgtaagccaaagtgacggcataaggagttctttgttagaaaacagggaaagagaagcaagagagcaggcaggcagaagggcagccaggaccatcagctcgggtgcgtgaaatgagcacggggaaagaaaggggtttcttttctgttttgttttaagtagaatcgtaattgggatgggaagggactttagagataatctattcaaggacatcattttgtagtgaggcaactgtgttgtctcctgcccgagttcacccacctgctcttcctaccagaccacgtgggcagtgcactggaacaaaatctctctatcagattatctctcctctgtttgtctccctctccacctctgtgttcatatgcataacacacacacacacacacacacacacacacacacacacacacacacacacacacgttttctttccaaatttcctcttaacaaagtctaaagaataatcactgtttcttgcctctatgattttttttgacctcctctgaaccccacacattgacgaagtgccagccatagcaatagtttcagacccgtggagtcagctgtgctgttgccaacctccatcacctgtccgcctttatcctgggctctgttcctgtggatttgaacaaatagatgagcggcatcggaagaaagctttagctgcatgtgtttgggtgaccacgagagggcagcacgtaagagaccagtgtcggccccgctgccttcttgaacacaccggaagcctcctaggaaaactgcagattttgtcagactgtgaagtagaagagtcaaagagccttcattgcttccttttaaatgaccagcctactaaggaatttagaatgcccaagtaaggttttcacttaatcctttaagaaatacatctaatatttctaatctaatctatcattttcaatggaaaacagtattttttttttcagtgattctcactgctttctttctgaggaacttgaaatgaatcttatgttttatttatttttcaatttctaaggtaaggactgctggtcagactggacttcaaaattcctggatccttaagacccaatgcatcagacaaatgtcctgctggatcctcccaccgtcagctaagggacagtgctagctctctggtgagggagatccgtgtggaggtctctggcattcctgggtcagtggatggctgggagaactgctcagctccaggttccagggcctctgatcaaagccaaccctgggggccagccagagatatcgcaaacctaaggactaacgtggaatctacacctgccttgggagtaaagaacaagcagggtgctttccgggatggctttgggatgagatgcccaagacttagtgcccctggcattgctcagctctcaagctgacttccacagcacccccatggaagcttcattggtgcatctttgggtcttgaatgcagtgctacaatattgacgaggaaagtctccttggaaccacaggaagacaaaagtgcagagtgatttgctggccttggctaggacagggtccagggtgcagccaagggagggtgatctaagccagccattctcctagtgtggctcctggactatgcgcaacagcatcacctgggagcttgttagaaacactggttctcagttcccatgcagacgtcttgcatcagaaaatctggggctggggcccagcaatcagtgtctccaaaggccctgagatcattctattcaagtttgggaaccagcaacacagcatttaagtggaaatgtttatagttgcaaagccaggtgaagcttgaaatgcatcatagaggaaatgaggacaagaatgtagaaaaagagtaaaaacagagaggaaaaaaatttacaagccatcatagagtgaaagagcttcccctgctgcctgggggtgtgggaaatgagagttgcacctgctcacaagtatgaccagcaatttaatatctatctagagctttcaaccctgccatgtcaaatttatttagctaaaaacaactcttgtggtggtgaccttttattcagctaatattactcccctcaatgcctccaaagcacacagagaaattggagggctgatgaaaatctttaaagtctactaaatactaaagccttcccaaacactgtgtacttttcagagagagtttctttttattggaatttcagattattgaaaggttatctgtctcctgttcctagagggattaaaataaaacaaaagcaagaagaacacattgtgatgtgtgctttcctcgctgaactggtggtgcttatctgactgcagtgatgggcagccagtgggaagatgccaaagtccttccagagaatttccccaggaacttgggaggctgaatcaccagaatgagaaagttctctggcattctggggatgcatttccttccacattgctgcatccctgtatgctggagttgcatgtgactgccccatgcctcagtttccttttctggaaaatgacagcttcaggctcttcatgcttctggcagccatgattcccctctgcctagctctattctttttctctcattaccttcctggctcttttctgtgttacatcgccattccttgggtttcttttctctgatctatatattttgttctgtttcataattttacattaatttttatttaatgccacaagccgcttacctgctttgagctccacaaaacctatactttgaggtagagtagaattggaagttagaaaaccagattctgaatctttaagcaaatcactttagttgaacctcagttttcctacctgtaaagtgcttgccatgtgccaaacagaattgtttcatttaatacacaaaactcatagaaatagatactaaacaatctttccaagtagatattgttagtatcccattttatagttgagaaaaatgaggctcagaggggttgagttccccaagatcacacagctcataaatggcagagctgagatttcaatcaggcagtctgaccccagaggctgcaccctgactacttattattaacagtgtctgtccctgccttgcagtttcgttacagaaggaattgagacaacatctgcaagaaccttttgaaaaacgaccactatgcaaagggaaggaagcgtgctatacttttccattcatagtggaagtagaggacccccacttttcatgatccctgttcagtcatagcttttgttcaagttgtctggtcgagttgtttaaagacagtgggcaaataaaagggaacaaaatgcagaacaattttaagagtcggaagcacaaaatcatgacagaaacaagatgagcctgaagtggaggctggtaaggcccgggagatggaataggcccccctttcttactgtagtcacagacatcctcttcctaaaccccagaataacaactcagcaactgctatgatgctgttggcactgattggaatccaaccccagggctttgcctcagcaactggagttttttcttctacttataattaactcttcttctccattctcacctctgttctcactctctaattccctcctctgttttttagagatagggtcttgctctgttgtccaggctggagggcagtagtgccatcatagctcactacagtctctaactcctggctgcaagctgggaggattgttacaggcctgagccaccgtgcctggctcccctcctcgatcttctctctttatacccccttgtgagagagactgctgtgtgttccccaacatctgtcttctcctttcataatagcagactgtagctaggcacatggttgcccagctgaacgccatttcccagcctcccttgcaggcatagccatgtgacttcatattccctgactcaacagttagagacatgtgtttacttatatataatctagttcacctgacagctggctgtgtgatgtgggcagagatgtgctggccacacttgatctcagtatcgctgaattcatctgctctcgctcactctgctcctcccaattcaggtgtagtctggctctgaaagaatgcagcttgccagtgtttctttctctggccatctagcttactcatattactttgatatcatgctttgttaaagcacaaaaatgctctccctgggctgggctccatggctcacacctgtaatccccacactttggtaggccgaggtgggtggattgcctgatgtcaggagttcaagaccaaccttgctaacatgacgaaaccctgtctctatgacagggtggcgcctgcctgtagtcccaggtactcaggaggctgaggtgggagaatcacttgaacccgggaggtggatgttgcagtgagctgagattgcaccattgcactccagcctgggtaacagagggagactccatctcaaaaacaaacaaacaaacaaacaaacaaacgttctctctgcatgtgcagaggaacacactgcctaattctctgacccctagactgtcagggagctgagcctggaatttggaggcgggcagagagaaatgcgatttcttttcatcccatagtagaaatgactctaatcaacagctaatcatcactatctaatggggtctgctctgatctgccacaacaaaaagagaactcattgaggttgcaatgagctatgatcgtgccactgcactccaagcctgggtgacagggcaagagcccgtctcttaaaaaaagagagaaaacctatacttgctgctgtgaacaaggagagagagtttgattaagcaggatggacattttccagatgggctgcaagggggtaatgcttttttcaggtgtaaaagtgagtttattaatgagttaacatggattgaggacttaccatgtacctgatgaggtactaaaccctttagatgggttatttaacttaatccatcccaaagtctctactactatttccatactatagttgaaaaaagtgagactcagagaggttgagtcacttgttcaaggtcacacagctagtaactgacagagaagggtttgaaccaaggccagctgattccctggcctctgcccttaatcagcactctgatgaagactacgtggcagtccttgggatgggagattccagatcataggaacagagatgctcaaggaagctttgcaatgaccagaggctgtggcccttcaggcacctccttgccacttgcctttgtcctcttctgatacctgccctttggctacagggtaggatcctccctcacgttcttcattggtgggctcactgggctctcccagcctttccagcctgatcctctaattggtatctcatgtagagggctctgtgctggtgactagtgggtgatgagagctctggcacctgtttggccagtagacaaatgctacaagtccttgtactctcctttccctgcaacctctctaaggggtggaggcgggggggttcaggaaggggcaggagctttccatgctgtaggcccagggacttcccctcagctcaggcctgggacctctggccacagttcctgggccaggggacttagcccacacataagaaagaactaggaaccaggactgtgagacttgagatcacatcatgagtgatgctatttttcaaaaaggaagtaagaggtcgggtgtggtggctcatacctgtaatcccagcactttgggaggccgaggcaggtggatcacttgacgtcaggagttcgagaccagcctgtccatcatggtgaaaccctgtccctactaaaaatacaaaaaaattagccgtgcatggtggcgtgtgcccggaatcccagctactcaggaggctgaggcaagaaaatcgcttgaacctgggaggtggagattgcagtgagctgagatcgtgccactgcactccagcctgggcgacagaacaggagtccatctcagaagaaacaaaacaaaacaaaacaaaaaaacaaaacacacaaaaaaccaaacaaaaaaacccaaaaaacaaaaaacaaaaaaacccaaggctcgattcctgaatacctatcttgttttcccagtgacaaaatacattcctggaaggtgaaatatttttctcctggaattatgtgctctttaacccctttcaacacttagaatctacctaattcatgaagtggcaccagcttatttgacttgtccttttctttcatctgtatacagcaatgtcttgtgtattagtttcttagagttgcagtaacaaagtactaaaaagcgggtggcttaaaccatagaaatgtcatgtctcacagttctggagacctgaagtccaagatcaaggtcttcaaagtcagcaggggtggcttctgcgggctgcgagagcaaacccgttccatgctctcccccagcgtccatggtttgcatgttccacgctttcccccagcatccatggtttgcacccattccatgctctcccccagcatccatggtttgcacccgttccatgctctcccccagcatccatggtttgcacccgttccatgctctcccccagcatccatggtttgcacccgttccatgctctcccccagcatccatggtttgcacccgttccatgctctcccccagcatccatggtttgcacctgttccatgctctcccccagcgtccatggtttgcacccgttccatgctctcccccagcgtccatggtttgcaggcaatcttcggggctcctcagcttgcagaagcactgccctgatctctgccttcatctttatgtggcatgttcccactatctgtggccacattttccctatttataaggatatttgtcatgtttgaatagaagcccaccctacaccagtatgacctcatcttaactaattatacttgcaatgaccctatttccaaataaggtcacaatcctgaggtactggggaataagggcttcagaatatgaatttgaggggaacacaattcaatccataacacctttcaaaactttaggtttctttttcttttttgagacagggtcttgctctgtctcccaggctggtgtgcagtggtgtgattttggctcactgcagcctcaacctcctaggctcatgcgatccacccagctcagcctcccaagtagctgggaccacaggtgcacgccaccacatgtggctaattttgtttattttttgtagagatgaagtcttattacattgccccatctggtcttgaactcctgggttcaagcgatctgcccatcttggcctgacaaagtgctgggattacaggtgtgagccaccgtgcccggcctaaaactttaggtttctaataaagcacttctaagggctctttgagacaatattttccactgtgaatgaggaggtatatgaaagaaactctcttaaaacacagtgaaactgctgtcgacaagacagctgcctctcggcattaaaatgcaaaattggccagggagagcaccattccctttgctatgtgagatgacaccgccatcttgggcatggcaactgagtgcacttccatccttgaagtctattatttttgcaatgagtttcaaaacaggcagaagaaacagctgctctggtgtgaatttgctccctccccgtcactctggctccaattatctgctcagagacaccagaaggaaaacactttgctcttcctcccacatagacagagcttgtcctcctttcagatcaactaaggggcagtttgcagcagggttctgcagagggagacattcttgtttggcctcacaatctctcctagtcttatgcagatttctgacagtctgttatttgtgtggtctttgaagacatggtggccctgcagctgaatggcgctgggcaggcctgtggcatggaataaccagagggccatggaggggcaacttttacagccacccctcaatgttggccaaatgtgactcagcctgatgcactgcaaggtgagtctgaggatcacatgcaaaggacaagctgccactctgttgtgtttttgattggaagggtcggtgtgtgacttgtcttttgagggtagtgacatttccttttctttgtcctgttcagcatatcatggggactatgaactttctgttcttgccactgacattcccctttctaaaaatccaatcaaataactatacaggtctaaggagagatgatgaggagatgatgggtctccgtgaatggcacagaggccacattcagagtaaagctgggcattcacttgggcataggaggccacttccaataccactcatgtcgcctgactcaacatcaaggaatgtagggaccaaagtaaagagtgatgtccccaacctgccttcatcccaacctttgccctgtcttcatgtccgggcaggtgcagccacccagctcctcttttgattgtcttcccgtccctgagacagagttatggaaaagatcctctgatggtttaaatgtatgccttagggtcaagggcttcttgtttttcgcttttcgctttcagggtcgtttttcttttccacaacagtgcacatgatattgcattggggctgtgtccagccttctcccctggtttcttgacttgctcctcttggatctttagagaaggctggctggattcttgcttgtctgggattcctgctgtttttcagattcctggttgccctaccttcctctccaatgtccatgttcttctggaggttctgtctctcaactgcctgcttggcttgcttcaaaccctctcacttccttggagtcctggttgctaatctggttttcatcatcccatccctcagaagagtcactctggaatgtttatactgagcagggatattgaagctagggacagggacccgtgctgatgtcagccctgggcagatggattgaaggagagcagagcatgagtatggaagggcctggatcagtagcagagtgccagtagtcaatggtaaaatctgagccaaataaatggcaaaatcccaagaaaacccaagaccaagatagctgcggctggtgtggatataagtaagaaaccatgtgtattgaatctggctgaagttagattctgaaggcacagggtggtgtttgaagcttggcttctggcatgctgacctcttgagcgataattgcccataattctggaccattccatgagctcctgaagactacatctgccctggctttctcttcccagggctcttttggggcctgccttaccttggtcatcactgaaaaaggcattggatttatattacctgaggttggccttatccatgcaaataatttagctaggttgtgttagaactggattgcctcttcctggagcatctttggggttacgtggatgctttgagcaggaaaatctttgaatcacaaaagtttattaacatgatttagccaatcaaagaggaaaatccttagttccctggggcttctgcacacaactttcgaggagcaggtgtcacctgagtgtatcacccagctcttaggtgcatctctcaaacatctacctttgtgatgtagtcacaagaaatggatagcagtattgaaggtttcctgaaataatagagaagaagaaattaatcaaattccccattagagcatctcagttccttcctcctaagtccctctcctcatctttcctccttctatttgtatgtagggcatctatgaattctctattttgccccaagtaactcctctttttgcttcctaacttgccccttgagagttttaatttgcccatacttgctttcagctccaactaggaattgttagaagcagagcccagctgacctcagctggaccccctgtcctggcttcttcaacccttgttctgtgagccactgctgcataactcagtggccctctgagcttctctctgctccaagtggtgtctgctgggacaggttcagggtggcatcttcaccccatgtccagtgccccagcaaggatggctcaaatggctggaggtggctggaatggctctcttgaggtcatgtctttgggacctcagttcttcccactggcctgggttctttggttcttctgcaggtagtctcagggcttgtgctctccatgtggcctctccagcaggaggttcagattctaacgtggtagcacagggctctcaggtacacagaagtggaggctgccaagtcctcctaaggcttaggctcccaaccacacagcgtcccttctgccacttcgttggttcaagccgactagtcacaggcccagctgacactgaagtggagggaaccaagcaaggtatgaatcaggaggtatggttcactggactcacaaacccagtagcccaccacgcccaggacccactgctgagcagtgaaatccctaggccttgtgtttcgttcagattctgacttcttttgattttgttcggtttctttttgctcaatttcctgttctctatttcctgatacttatggctaaattaaaccagaaatcccaaaactttgcttagtttatggatatggtgcagactcacaagaattttgatctttcatgacacatttatattgattttgtggtggaataaggtataataaatgatatcggctatatgggtctccttctggcctgtaaatccatgtgaagcaatggatttagtggcttttgggatcaatacaacatggaattgacaaatagtggagaagaggtatgcatgtggagtgaattcttctcatatttctgatcacagagcctggcaagacagaatgttccattcttgttcacagtatacactttacagcgggcttttacataaattcttttgcttgctcttccatagagcagagggggatggtagaattatccctcttcatacaggaggatcctgaagctcaaagtcaccctgctggtcagaaccagagctggttgggactggctcctgctcttctgatcttgtgtcagactctgtagtcctggagtcctggttgttaatttagttttgatcatcccatcactcagaagagtcattctggaatgttatactgagcaggaatattgaagcgagggacagggacaagtgctaatgtcagaaaagtgctgcttttgttagatcagtacttcttagatcagtggtttgttttgtttgtgtttaagcagcagaacattttctaaaaacagaagtagaatccggtaagtgaaaccatcatgggccaaactgatctagctacaatagggtaacaatcttggagtcttgtgattgtttgaagaaatatcgaatgtctttcatgtgctaggtgctgtgcaaaactaccaaattcacgcctcagatgagcatcgtctcctgattttaaagacaccaaggatatgagaggttgaaaaacctgtccagatcactcacctggttttccaaggtgtattagtctgttttttcactgctgataaagacatacccgaaactgggtcatttacaaaagaaagaggtttaattgactcacagttctacagggctggggaggcctcacaatcatggcagaagacgaagagcagagggccgtcttacatggcagctggcaaagagagaaggagaatcaagtgaaaggggtttccccttaaaaaaccatcagatcggccaggcgcgttggctcatgcccgtaatcccagcactttgggaggccgaggcggctggatcacctgaggttgggagtttgaaaccagcctggccaatatggcgaaaccccatctctactaaaaatacaaaaaatcagctggacgtggtggaaggcacctgtaatcccagctactcgggaggctgaggcaggagaatcacttgaacctgggaggcggaggttgcagtgagctgagatcgtgccactgcactccagcctgggtgcaacagagggagactccctctcaaaacaaacaaacgaacgaacaaacaaacaaacaaacaaacaaacaaaaaaacccatcagatcttgtgagacttattcactaccacaagaacagtataaaggaaagtgaccccataattcaattatcatctcccaccaggcccctcccacaacatatgggaatcatagaagctgcaattcaagatgagatttgggtggggacagagccaaaccatatcacaaagtgacttgtgtttccctcaaagttcaaatgttgacagctaacccccaatacctcaaaatttgaccatatttagaaatagggtcatggcagatgaaattcattaagataagttcatactggagtagggtgggccctatttcaacacaactgatgtccttataaaaggaaactttggacccagagaccaacatagacggacggggaatatgatgtgaagatgaaggcagagatggggggacgcagcagaagccaaggaacaccaagatcaccagccaagcaccagaagccaggggagaggcaaggaacagaatctccctcgcaggccttggcaggaaccacctctgctgacaccttgttctcagacttccggtatccagaactgggagataatccatttctgttgtgtaagcccccagtttgtggcacttggttacagcagcctgaacagatgaatacacctggcacagagaaccaggaggcaaatccaggccagactgcacgtccctctgcagactgcaaggccaaggggcgccatccgcatgctgggtgggaaagagagagtccccaacagtgcatcagaaacatgtgtctgagtgtttgggaagaatggctgggagtgaggggtggcgctgtgggttaattggccctcagggctttgttttctgtccttctgttttcccagcacaggcagtgagaagaggcagggaaaagacaaacagttgctgccaggtttgatgacaggtgcccagaagtgcagtgggcatatggggaggctcttctaaaagaagcatgccccagacacactccacacggtttctgaacaaacaggtaattgaaatatggtttcgtcctgtcttccgccagctggactttgtttgctgtttgcaaaggctggtctctattaacctgcatgcttccatttggacacactcttctggctaatagcacttcagcaggcttcctggagacaaacaggcctagaatattgttgctttatttgccaggtaaataacaggaagcctgtgtgaggacaaagccctctaactgggaaggcaaataaagtgatgaaaaatacatgatttctcaaattaaaataaagttcaactgatcagaggcattgaggaagatctactcatcaaatacggagagcatgtgtggatttatatccttgcttcaaggtcaggtagcctttcatcattcaaaggaaggtgcccaagtcagtccaaatacacagggaagagtctaagagcaaggctacttactatcttagaataaaagttttttttttttctttttgagacagggtctcactctgtcacccaggctggagtacattggtgcatcttggctcactgcaacctctgcctcccaggctcgagcaattctcctgcctcagcctcccgaatagctgggattataagtgtgtgccaccatgtcctgctaatttttgtatttttagtagagacggggtttcaccatgttgaccacgctagtctcaaactcctgacctcaaatgatccacccgcctcagcctcccaaagtattgggattacaggcattgagccaccgcgcccggcccaagaagagtattttctaataaattcgaccttatccttgcccatggaagagagcaggacacacaatttaaaatgtagatgattgtttttatatgtagctcatttgataaaaacaaaacaataataacctaccctcaaaccattcctgaaagcggaatatttttggggggtagaagggaggggatagtaagtgaatagatgttttcgtcttcaaaattccattttaaaattgcccatctgggaagaagatttttgatgcatatacttttgtatgttttgaatttgaatttgtgaatatagagctacttagaaagcaaagcaaatgccattaaaactattttttttttaattgcctacttttccaaaatataccactggcttctttccccaaacactcaccctccagggttcctttccacccaagctcccgcttgttctcatcattcatgtgcacaaggggagttcattttcttgtctatgctgacttataataggtttcaattgattttggtatcagttgtttgctgaacaattgcaaaaggctctatcctaaattagatggtttgatgaagacgtgagacaagacacagccccttgataacaagcgctggtgaggatgtggagaaaagggaacccttgtacactgttggtgagaatgtaaattactacaaccactatggagaacagtttggagttttctcaaaaaactaaaaatagagcttccctatgacgcagccatcccactcctaggtctataccccaccaaaaggaaatcagtattttgaagagatatctgcactcctatgcttgttgcagctctgttcacaatagctaagattcggaagcaatctaggtgtccatcaacagatgaatgaagaaaatgtggtacatatacacaatggagtacattcagccataaaaaagaatgagatcttatcatttgcaacaacattcatggaactggagatccttatgttaagtgaaataagccaggcacagaaagacaaacatcgcacgttctcacttatttgtgggatctaaaaatcaaaacaatgttactcatgaacatagagagtagaaggatggtaactggaggctgagaagggtatggggcaagggaggtgaggagggtatggttaatgggtacaaaaaaatagaaagcattaataaaacctactacttgagagcacaacaggtgactatagtcaataataacttcattgtaccttttgaaagaactaaagaagcgcaattggattgtctgtaatacaaaggataaaggataaatgcttgagggggtggataccccattctccatgatgtaattattatgcatggcatgcctgtatcaaaacatctcatgtacctcctaaaaatacacacctactatgtacctaaaattaaaaaaaaaaaaggtttttaaaaagacacagcccttgcctgcaggatttattgaggcaagagtcagacctgataacacaagaaatttatggctgtctactaaacaatgaaccttacccaaagagcgttcggcactttggcctccactccagagaggtgatttctaagcccttggaatgccatgcctgataagagcctgtttctctgtgggttctgagtggcaccaaatggtctaacaatatgatttgtgggggagctttgggtcatacagtatcagcttgaccttgggaagggctggagactgagctcagccacatgggcagccacaaacatccacatgatggtgccccagtcaaatctccagacgccaaggcttgggtgagcttctttggctggcaatactcaatagtctgccactgtcacacatagttgctgagagttgtgactccactgggggtagaaacttcatgcttggaacctccctggcccctgccccaggggttctttcccttggctgattttaacccgcatccttttgttgtgattttagcctgtgtccttttgctgcgataaaccataaccatggaaggttctatgagtcctcttagtgaattacagaacacaggggtggtttgggggggcctctaaccttgcaattggtatcagaagtgaggttcattcattttgggggtccctgaactctgcagttggagtcaactaagtaccaaagattgaaagagtcttaggggtttggtaattactctttattcaacatgtattgagtacttactacatgccaggtactttaacactttatctctttcaagcctcatagcaaactttgaagaagatattattgaaatcttacagattagggatttgagactctcataaatttccccacgatgtacagggccaagcctcaactgagtgagagagcttgttccttgcagccattgcctgtggtggattttcactgggggaaacagtctctaccctccggggtctgactcagtgcggggagataggtgagcagacatagaatcaacacagagcactaagtgctgtggaagatagaatggacacttatctttttgtctgaccagcaacccccatccttcttctaagaacagctcccctgagtatttctcctttcctgcttccagtctgtggctccgacaggagctgctgtgtccttgcacccctggccctggaacaggcttggactcctgacccaggttgggccaatggtaaaaccctggccgtggttgatggactaggggtgagcatctgacccaagccaggcctatcagagctttccctggcaaggtagaacttgaactagaaacagggcccctctctcttcctggtggtggagtcggaaaacataaaacttgagagctcacagcagacagatctgtgccatgtggaagtagccggtctgtcctgagagggaaggaagaggagaggagaggagaggggaggttaggggaggtgaggggaggggaggagaatcaatggcttatcattccctggaggcagtttttttctgaggcccagccccatccctcccctagccaatgtcctggggacacacgtccttcaattccgggtggtatctcaggggcctgctaaaaaagctccctgtttcttaagtgtgttgaagttaggttgtttttctgtcatttgcaactgaccatcttggcggagtccaggaaggctttctatggagatgacaatgaaagaacagccattaataagaatcagcctaaagcacacattgaaggacacaggagcttggcctggaagagagtgggtgggagtgcttcaaaaggaattgtttgccggctaaatgaaaactatcatatacctttatgattttctaggataaagatgcagaaaattgtttgaattgtgagcctggaaattctgctaactggcccggctccccaaaactttcctggacctccttgaggttgcttataaagcttaagggtcactatgggatatttatttgttgggtcaaagcatcagagaacttgagcatcctaggctaaaggacaaaagtgtggaaataccattgttctcggaagaggccactccaacctctgcagtctaaacaatgaagagtgagaaaggcaactttaaaaaatctcacgtaacgggtaggtccacagacatggcaaactagacagttataaagtatgactcagtgatgtcacgaggacccagattcttaggttcttgccgtccttggtagattgtataattgtccccaaatatttacagcccccctgtgttaggattatgccaccccctttgttcactcaagcttggccatgtgatttatttgggctagtgaaatgtgtaagagacaagatccatttcaaacagaagctttaagtgtcatatttaaaggtttcatgtctcttttcctctgctaagatgagcaggtcccctacaagagctgtctccatagactggcctcagaacagagacccaggcaaagcccatccatgttggatatacagcatgagcgagcaataaaccccttgtgttgtaagccactgagatttggccttcggtattagcttcaatctccgattgggcatgagatggctacaacgattccagaatcacctcctggcatgacaacacccagaacaagaagagagacctactcttcccaagggtttctctaaaaacaagggatgctgcaaggagacccacacagactttcccttatcttatttgctgcatggggcaggtagaaagacatctaggttctattggtgctagtaggggtggtggcggggattcaccccaggcaggcggttgttctgcccgatgcctgcccagggctaaggcttgtggccagcacactcccccatcagggctcccttgagtaacctgaaggtcccctgtgctcaggaggattgctcaaccactgaacttctactattatcattaacagtaacaaaacataatcaataatccacaaaactgcactcctaactcctttctttctgaaatcacattcctatctaggtttagggaaaaaaagacaggaaagtgtgtgtgaagttaaatatttgtgtatccacgtatgcattccggtcactgaagaaataaaggatagtataaaacatagatccaaccctcagaagcaatttcagagtggtgagggagagaaaagaatcacaaagggcaaagcaagcctgtgtgaccatctccagagtaatgtagacagaggatgtaggaactctgagcacaagtggcttttttctcccatccccaagagggcgaggagggacgaaggagccaggagggagtctgctcagctgcaccgttcctagcatgtggcaggtgcacagcaagtgtttctccaagggaagtaacagggcatccaggaaactcttacgctccctcactctgagccatgttgcttatttccatactgattgaccttaaaatggatttgtgtgcatgtgaaatttgtcatgcttacaagagggtgtataatgtacttttatagctcaaagaaaaataaataaccatggacctgccacccattttaagaaataaaacatttccaagccccttggatctccctgggagccccactccaatcattctctgttcactttcttcagaggtaatcactgtcctgaatctcaattgtctattacttcttttcttttctttttgtttttcccttccttccttccttccttccttccttccttccttccttccttccttccttccttccttccctccctccctccctccctccctccttccttccttccttccttcctctctctctctctctctctctctctttctttctttctttctttctttctttctttctttctttctttctttctttctttcgttcgttctctctttctttctttctttcttgacagtctcgctctgtcacccaggctgaagcatgatcttggctcactgcaacctccgcctcctgggttgaggtgattcttctgcttcagcctactgagtaactggtattatgggtgcctgccaccacacttggctattttttgtacttttagtagagatgggatttcaccacattggccaggctggtctcgaactcctgacctcaagtgatccacctgcctcagtctcccaaagtgctgggattgcaggcgtgagcaactgcgcccagccactattactcattttcattcacttcagagttttaccacaaatgcatgtatccctaagcttttgcttatttagatttgcctgtgttttaaacttacataaacttaatcatactgctacttgcttttgatctaatataatgcttttgaggtatatccatgttgatacatgtgggaataaaatattttttatatttaatatttcattgcttgaatgcatcataatttatccattttactgtggatgagcattttggttgtttgcagttttgttagtggaataatgctactataaacattctgtgtgtgtctccagatgtgggtgtgtgagagtttctctagaatacatacctaggggcagattgatgcttcacaggtttgcgcatcttcaattgtacttaataatgctcatcttcttccacagtggtcctaccaatttactctctcaccagcagagactgagagcttttgttgccctgaatctttaacccttcttgtcagacttttaaatttggttcaatctgggcagtatgaaatctcattatgggttttggttgtattccctccctagttactaatgaggttaaaaaatgttttatatgtttattatgcatccatgttatttatgtgaaatgccttttgttaaagccttttttttagagaattataggatttcttttatattctggaaactagttcttgatttacgtattctaagtatcttctctcaattcatggtatgttttatctctctcttttaatggtatcttttgatttgaaaaagttcttaatattaatgtaattaaaattttcaatattctgtttatttatttattttcttagaaagggtctcactctgtcacccaggctgagtgcagtggtacaatcacagctcactgcagtcttgatcacctatgctcagaaaatccttctgcctcagcctccccagtagctggcactacaggcacacaccaccacgcccagctaattttttagtttttgaagagacaggtgtcttgctcttttccccaggctagtctcgaactcctggactcaagcgatcttcccttctttttttttttttttttttgagatggagtctcactctgtcacccaggctggagtgcagtggtgtgatctcagctcactgcaacctctgcctcctgggttcaagtgattctcatgcctcagcctccccagtagctaggattacaggcgtgcaccaccatgcccagctaatttttgtatttttagtagagacaaggtttagccatgttggccaggctggtctcgaactcctgacctcaagtgatccggccccctcagcctcccaaagtgctgggattacagttgtgagccaccatgcctggcctcctttttcttttttttttttttttacttttcatatgaaaaataaactagcacagctttaatcatttgttaaacaatccattgatttccgctgagagtgggtaccagctatgtttggttcccatatttgtgtgagtcttttttgcacctttattctattctgtttgtctacttgttttccccgctggtactaccacactatcttaatttctactgcattgtagattatttcacctgattcttcttcagaagtgtcttagctattcttgatcttttattcttccatataaattttaggagtcaaacctgttgggattttgacttgaattccatacagcaaacagacaaatttaaagagaacagatatcttttcaagagggagtgttctatccataactttggcatatatttccatttatttaggtcttctttaaagtgtttaaagaaaagtttctaatttatggcataaagataataaatattatgtattagatttatttttagatataacatacgttattgtaacaatttttaaattattttctatttttattgttttctattttaaattattttctattttaaattaaaacatagctttaattttccatgtacctgtctcagaattgtgtttttattagttatctataaccccataatattatagccaaagaatgtgatctgtatgatattactatgttgaaaacttttgacacttattttataaccgtggatacaaccagtttttctaaaagtttcacatatgcttgaaaatgtgcgtgttcttcactcattaggtatactattccacatatctccattagattaagattgtagattttatttttctagtcattttgatagtgctggctgcttgattgatgagttttttgttttgttttgttttttacgacaggctcttgctctgttgcccaggcttgaacgcagtagcgtagtcatggctcgctgcagcctcgacctcccaggctcaagtgattctctcacgctgaccttccaaagtactgggattacaggtgggagccaccacgccaggccaattgatccgttttttgaaagagtgttaaaatctcccagtatgatgatgaatttttttatttttccttttagttctgtcattttgcattgtttgaatgtgaaacttttttattaggtgcccacgtatttagatctattatttcttcatggtgaattgagtctttccgttatatgtagtgactttctttatctctaatgatgccttttagcttaaagtctattttgtctgaagttaatacggtgactcaaatcttcttttgattagtgcttgtctgaaatatattttcttttactttcaacattttcatgaccttatgttttggtgtgaccattaaaaatagcttatagctgaaattttaaaagtcaaacctgacaatatttatctttcagttggaggcttcattttgtttacatttattttagttacacatttagattcatgtctatcatcttattttgtaggttctattggctctgttttcttgtttcttctcttttcttaccttcttacggactttttttccagcagtatttcatttctcattctctctattatttgaaagttaaatctttcataaatattttttagtggaaactctagaaattttggggactaatttatcataagtctaaaactgatcaattttcactctcttgaataatatgaggatcctagaacattttaacatcaatcacttctcatttacaaactattattgtaatggattttagatctattttgatattttaaaactatatatattgttatttacattgctttatattagtgtttatcgagattttacaatttatcatttaaccattttctttgctcaccactcattcttcaatctaatttcttctttccaggatcaataattttcctcccatccagagaacatttttaagaagttcctggaaggaattgttggtaatattctgtttcttatttgtttaaatataccgtttttctttatttttcttaaaagatagttttgttacttatatatttctagattcttagttattttctctcagtacattgaaataattgtttcactatttctggtttctgttgctagtgttgagaatctcttgtcaacctaattgtcacccgttagtatataatttgtctcttttttctaattgcttataagatctcctttgccttggtgctctggagccttgttaatatttgtctagacaaggatttgatgttattcattctgcttaggattcactggaaattctgaaacggaggttcttcaggctgctataacaaaatatagcagtctcttcaggtggctataacaaaataacataaactgagtggcttacaaacaacagaaattgatgtctcacagttctggaggctgtgaagtccaagattgaggtgctggcagatttggtgtctggtaagaactgggtttctggaagaaagctgtcttctcactgtaaccttacttgtccagccagaggggagagtgatctctctgggggtctcttttataagggactaatccccattaatgagaactctgcccctataatctgaacacttcccaaatgccctacctcctaacaccatcgccttgggggttaggatttcaacatgtgaatttgaggggacataaacagtcagtccattgcagtgtcttaggctaattctagaaaacactgtgtcaagtgatactatcaattgtttccacaaggagtaaactcatggagacccacggccacaagtagacaactgaaagatgacattgggactgcatcagacttcccaggaagctctttagtccagatgcatgtgaactcccgaaagcagactgttgattcaagatctggcaaataaagacttgatgaagtatgtctgaattaaccaatgaaagaaataaaatgtggttatttgttttaaatattgttggcattgttttgatattctgttttctgatgggcatataaagagccacttttgtttcttgatgtattcctagttcttgatttactagactctattctcactaactgaaacactttaaaaataatatccaccaggtgcggtggctcacgcctgtaatcccagaactttgggaggcctaggaaggtggatcacttgaggtgaggagttcaagacaagcctggccaataagatgaaaccccatctctactaaaaatacaaaaattagccagtcgtaatgacacacacctgtagtcccagctactcgggagactgggcaggagaatctcttgaacctgggaagcataagttgcagtgagccaagatggcaccactgcactccagcctgggtgacagagcgagtcttcatctaaaaaataaaaaaagatatctttttccctttgacatatcaaaattcagaatcaactattttcctgagtcttttttacattgcatggcaatgtaattatttgcataagcttaacaaaaagctgtctccttatttttatttttaaactagaatataattagacaaattgattgtataaccaagggcaaacctgcaatatgttatttgaaaatcaatctcattttttctgatatgataagcatatcagtaaataggcctaacttcataggtagaacaaatgtctgcaaaatgctcccaggaaactgatctggtaaaaggacagtcccttcttggcaggccaggaatttaggaaatgtgggaaccaccaaggagaaaagtattaacttatagctgctacaaatgaaatctggtggagatgaattttggttttgtagccttggaataactgaaaaaaataagagtgatttttaaaatctctggaatgatggaggctattgagaaagcaaacttggattccttaagaacttgctggaaagaagcgaattgtctggctttagtagatgctcacctcttgatgatcacacaatagagaggcttatgtgtcctaagaccacttgctgctctttctatgtatgtggaccaggccaaataacaaacacataatgactcctgcctttttttttttgcatgcatgtgattttaaataatctttggagaatacctagaaacacaatggggagtattaagaaaagttacctgaaatttggaagtaagggaaaaagatgatcacctgccctacgttgtcattttagggcatcgtttaacaagctgcttcaaagtcatctgcctctctagataagggaaagaaacttttcttcttttgcgatttctattgattagagcccagaaagcttatgactctagaaagttagatgttagtttatagaaaataattgctgatgagatgcaaacaatttttgtctggtaaaggagataattccaaaagctatggcttttttttttttttggccctgtatgacattaagccattaaaactattcagaaatcataatccaacattacatatatatttatacacacaaacagcacacacacacatttagtgtctcttcccttgaaatggcaactggctttgtcattctctggttctcttattaatgagtcaaacaaacactgccaaacattgctatgtatttgtatgagaaatagtggttttctttaacattttgaaaagtatacttggctattcttgtcccctgtgcatgtagcccattaaaatccagggtgtaggccaacagaggtcaacaaataccagcaatagtattgcttgcactctgggttcaggctttactgaggaattcctttactttcctgacagttcaactgttcattaaatttttttgaaaagttcagtgtgctgtactgaaaggaatctctctgaatatctagtctgccatattgattaaaatggaagcccttccaattgactttttaggatttagctgtgctttatattttgtgaaccagggcattcctggacaaggaaaatgcctctgtgggtttcatatcacccctacttccaatttatctcgggaccctaaagggtgggaggatggctagggcaggaaagggcaagatgagttcattctgagcctgggtctagtacaaagggaggatttgtgcagccgcagggcaacataaaggctctggatgtctaaggcattggagggagggaggattgaaaggaaggagggcagaggtgtagtggggtaaggcgtttcatatccacatccaaagtcttcctttggaactgcagtgtgcctggcaccattccagggtgaaaaggaagatcatgcagaatggcatctgcaacacatctgttgcctccggagtaatcgggctggcagtgaactcagctgctgtgcctgagttggaaggcacctcccctggttgctttctccacgaaagctgggtttgcactgcattcactcacactttctgagtcttgctcctaggacttggggagctgactgcaacaggcagactgagaaaaggttacacggtttaggagcgagttgctatccttggttatacacacatgacgtgccaaatctttaatttcccccttggatggtaccctaaactctagcaaggagaggaagagagattaagaataaagaaaaaataataaaacactgtcaagttgtgaaattcagcgtgtttgagcatctactgtatgtgaagcaattttttaggagtatatggttcttaagaaaaaactccagattttctaagactgtcctgatttcgtatattctgccccaatttcagactcattctcagaattttgtctttgcttttagattgaaaactgtgtaactattcccagatgttcttagttttttttttttgcagtatgtagttgaatatgcacagacaagttgccactctctcattctctgcctcctcttctgtaaaacacaaagacacctacagagtggatatctgttgtttggttctgcctagaacctcttctgtcttttgagaacaatatatttatttggggaacagccactttcacaccgtagcctcccgatcatgggggtctagagagggctccagttgtagttcccattatccctggacacagaggtgacatatttcccaaaccagttataattctccagagttttccttctggaattaagtgattcctctcctctctggaggtaaagttgggaaggtaatggccccctgaactgctggatgctagattttggccccatggaaaaagctagtctgagagaataaactaccatgtttggaaaatgaagagagagagagagagagagagagagagagagagaaatcttgagtcctggggctcaactactctgccttccctgagatagactgtagaaaccagtagaaatacccctttgtgcctaatcagctttgagttaggtttctgtcacttgtaacctaaatatttctgacaactcctgatgatcataaggattatccaaagattacttaaatttgttaagctaaaactactatgcaaatgtacaacaaaattattattgtgaaatgatcctgcattcagggacaaggcagatgtagagacacttgacctggaatatatagttctagtgtctgaaaacactcccatagacacagaagtggaccagaagtaaatggaagtggaccggaagtaatccagaaatggaccaaagtagccccagtgagcacgtttgctagtgaggttgagacgtgaagttatgaaaatccttgaacttgttcagaccatgttgttccttgtgtgaaactgttgttagagaacgggttcctgctgcaaatgcaaagtgtgtgtggctgagaagctcctcttggcaaatttgaacccattattaattgcttctaatcaagatctaatacagaagaaaatttgcttcgaagaaaaggactgctgttaactggagaagtcaactaaatctcacagcatatgtgtgaggggagggaatggttgctttacatattattgaaattagctaagaagagaaggaaagccagtttgatgattgacaactgactatgaactgcagataaaaatgcactgatggctctcccctttgggtagggcatggagtgggagcagcatgaggtctgggaaggtgtggacattaggagatctcttattgagtctcttgggctgagtcattcatcagcaaaaagccatccctggggcagatcccagttcggtttggggggactttgggtggatgctggaggctcctagggaagcgcagctttgtggggcacactgtgttttcttcctgctgtggaaaatcaagtgaccatctaccaggtggtctgtgaccctctccagggctctctgggatcctgttcaattttaacaaacacacaaccatgatgtgctggcacttctggcaaaaacgtgttttggcaaaggcaaaattgctaatgaaattaagtagcattgttccatgaccaatttaccagcttctaagaaaactggcacttgagcataatctcagccatcagcctcagatgcttcttacctgggctgcagagagcccctgtggggagaagggtcagggaggttccaagggaagaatgccgtggcccatcatttccttccgtgattgaagcctgcatggcctttcccttcccactgtttctatctgtctctaccttgacaattgtaaggaggttttgaattggctaagactatatttaccagtatactaagtgacagaaagctcatttagtccagcttaaaccaaagggagactcatgggaataccaggggggtctcgcggaaccccggacaggaatgtggttatggcagaatctttggaaggtggaattcagcagggtcagggctcgctctccatttctcacttccccccctccctgtgcatcccttcagggtcccttctccctctttctacaaacgcattgtctctacttctctggttcatggaggaaacatgacagcaggtagtgtagcctcaactaccgagggaaagaccctcacatccatagattctgggaaaaagctcactgtgaaagctgagtcaggtcccccaacccagaatgtgcattaaggtcatgggaataggtactgtgttcagtccagctatggtccagcatctatgccaggacctgtggctggggttggccatattctattggaatatgaggctgcttctgcagccatgtgggtagtgaatggaggggtaagttcctagaaaaaaggagattaggggtaacacaaccctatagctgtccactacaccacctgactggccatgtggcctgactccctacatctccattctactttacttgccgatgaatagctcttcctgaagcccatcctccgcatgtgactcctgctcagaatgttctctgcctcccacggctttgacagttaggtctcagagacctagagtctctgactatgaggttctttagagcccatctcaacctacactttatcaaatgcatgaatttcttctatagtttcccagaagtctctgcttgtatatgtccagggaccaggaactcactactactacaggaaaacctgttccatttttccagctgctaattgttagatctgttctctctctaaagtgatatctttcactcattgatcctggttcttccctctggggtctaatgtctgatgtcccctacagctagtttaaagtaattgcaattccacccttacttccccttctgcatgtcttcttgtttacaacctgaataacctccttttcattttcccatatctatttcttcttctgtgtgtggttgtttttttgtttgtttcttttttttgatacagagtcttgctctgttgctcaggctggagtgcagtggcacaatctcactcactggaacctctgcctcctgggttccagtgatccttgtgtctcagtctcccaagtagctggaactacaggtgtgtaccatcatgccaagctgatttttatatttttagtagagatgggattttgccatgttggccaggctggtcttgaactcctggcctcaagttggtccacccgcttcagcctcccaaagtgctgggattacatgtgtgagccaccatgcccagctcccgtatacatttctaatgtgctattacattccaatcctctccattttaaaagctcctctcctgatgtgctgtagtttgtcaaggatcctcttaaagtgttttgttcagtactgaaaaccatgtaccgggaagacctcctcagcccagagaagaatggatccattgctgcagacattctgaagctgatatttgtactcagtgactctcactttgggcagtctcatcgcacgcacgattacattcaatttcagtccatggaaactcccttagttcctgtgatttagtctaatgttgagcacagatcagtttctgtcccacttcttcccatcacagctgtcttgttcagccttgctgcagaatccagaaaccatcctgaccaaaagcaggaaaagcccccgccccattggtctggtgctggttgacccaatgtcccagtctgagaattgcctttcaccttgtatttgagatctggttctcggccgggcgcggtggctcacgcctgtaatcccagcactttgggaggccgaggcgggcggatcacaaggtcaggagatcgagaccatcccggctaaaacggtgaaaccccgtctctactaaaaatacaaaaaaaaattagccgggcgtagtggcgggcgcctgtagtcccagctacttgggaggctgaggcaggagaatggcgtgaacccgggaggcggagcttgcagtgagccgagatcccgccactgcactccagcctgggcgacagagcgagactccgtctcaaaaaaaaaaaaaaagaaaaaaaaaaaaaaagagatctggttctcatgtcacactctatggacatttagcaacttgatccttgtgagaatcagctgaagatcctggcccccatattaacccatttatgccagaggttgcaatgttttgaatttttgcataaatgaaaaatcagaccttggtgatgaccttgagcagtaggatatgaataactttcacatgcttagcattccaataatggaacactaggcataagtgggttttaatatcctgaagctctgctaggtggatgagttgttcccttgctgagacatttcctgcagataatgagcctgcttactgagcttcccccatcacctcttcctggctctcctctagctctgctgtctgtctggttactctgttcatagatgttggccccagaagctgaggcttgattacacacccactgtcttctcttctaccacataggacattgagctatgcctgtactgtctcccacgacctgccatggagactgagaacccctaagatgtcctgctccagtggatagtggtaaattcagatcctaaatcttcccaagtaccctcatgtctttaaaagtttgtcaaaaggaattctgttatgaaatcaaggaaaattaaaaaaagtgtttttagtgcacaggttagggtgcatgtgttagattagacacacatagactcaaaataaagggatggaggaagatctaccaagcaaatggaaaaaaaaaaggcaggggttgcaatcttagtctctgataaaacagactttaaaccaacaagcatcaaaagagacaaagaagaccactacataatggtaaagggatcaattcaagaagaagagctaactatcctaaatatatatgcacccaatacaggagcacccagattcataaagcaagtccttagagacctagaaagagacgtagactcccacacaataataatgggagactttaacatcccactgtcaacattagacagatcaacgagacagaaagttaacaacaatatccaggaattgaactcagctttgcaccaagtggacctaatagacatctacagaactctccaccccaaatcaacaaaatatacattcttctcagcaccacatcgcacttattacaaaattgaccacatagttggaagtaaagcactcctcagcaagggtaaaagaacagaaatagtaacaaactgtctctcagaccacagtgcaatctaactagaacaggattaagaaactcacccaaaactgctcaactacatggaaactgaacaacctgctcctgaatgactactgggtacataatgaaatgaaggcagaaataaagatgtgctttgaaaccaatgagaataaagacacaacataccagaatctctgagacacatttaaagcagtgtgcagagggaaatttatagcactcaatgcccacaagagaaagcaggaaagatctaaaattgacaccctaacatcacaattaaaagaactagaggagcaaaagcaaacacattcaaaagctagcagaaggcaagaaataactaaatcagagcagaactgaaggagatagagacacaaaaaaacctttcaaaaaatcaatgaatccaggagctggttttttaaaaagatcaacaaaattgatagaccgctagcaagtctaataaagaagaggagagagaagaatcaaatagatgcaataaaaaatgataaaggggatatcaccactgataccacagaaatacaaactaccatcagagaatactataaacacctctacgcaaataaactagaaaatctagaagaaatggataaattcctggacacatacatcctcccaagactaaaccaggaagaagttgaatctctaaatagaccgataacaggctctgaaattgaggcgataaataatagcctaccaaccaaaaaaagtccaggaccagacggattcacagccgaattctaccagaggtacaaggaggagctggtaccattccttctgaaactattccaatcaatagaaaaatggggaatcctccctaactcattttatgaggccagcatcatcctgataccaaagccaggcagagacacaacaaaaaaagagaactttagaccaatatccctgatgaatattgatgcaaaaatcctcaataaaatactggcaaatcaaatccagcagcacatcaaaaagcttatccaccatgatcaagtgggcttcatccctgggatgcaaggctggttcaacatacgcaaatcaataaacataatccagcatataaacagaaccaaagacaaaaaccacatgactatctcaatagatgcagaaaaggcctttgacaaaatccaacagcccttcatgctaaaaactctcaataaattaggtattgatgggacgtatctcaaaataataagagctatttatgacaaacccacagccaatatcatactgaatgggcaaaaactggaagcattccctttgaaaactggcacaagacagggatgccctctctcaccactcctattcaacatagtgttggaagttccggccagggcaatcaggcaagagaaagaaataaagcatattcaatcaggaaaagaggaagtcaaattgtccctgtttgcagatgacatgattgtatatttagaaaaccccatcatctcagcccaaaatctccttaagctgataatcaacttcagcaaagtctcaggatacaaaatcaatgtgcaaaaatcacaagcattcttatacaccaataacagacaaacagagagccaaatcatgagtgaactcccattcacaattgcttcaaagagaataaaatacctaggaatccaacttacaaggaatgtgaaggacctctccaaggagaactacaaaccattgctcaatgaaataaaagaggacacaaacaagtggaagaacattccatgctcatggataggaagaatcaatattgtgaaaatggccatactgcccaaggtaatttatagattcaatgccatccccatcaagctaccaatgactttcttcacagaattggaaaaaactactttaaagttcaaccaaaaaagagcccgcattacgaagtcaatcctaagccaaaagaacaaagctggaggcatcacactacctgacttcaaactatactacaaggctacagtaaccaaaacagcatgatactggtaccaaaacagagatatagaccaatggaacagaacagagccctcagaaataataccacacacctacaaccatctgatctttgacaaacctgacaaaaacaagaaatggggaagggattccctatttaataaatggttctgggaaaactggctagccatatgtagaaagctgaaactggatcccttccttacatcttatacaaaaattaattcaagatggattaaagacttaaatattagacctaaaaccataaaaaccctagaagaaaacctaggtgatacaattcaggacataggcatgggcaaagacttcatgtctaaaacaacaaaagcaatagcaacaaaagccaaaattgacaaattggttctaattaaactaaagagcttctgcacagcaaaagaaacaaccatcagagtgaacaggcaacctacagaatgggaaaaaatttttgcaatctactcacctgacaaagggctaatatccagaatctacaaagaactcaaacaaatttacaagaaaaaaacaaacaaccccatcaacaagtgggcgaaggatatgaacagacacttctcaaaagaagacatgtatgcagccaacagacacatgaaaaaatgctcatcatcactggccatcagagaaatgaaaatcaaaaccacaatgagataccatctcacaccagttagaatggcaatcattaaaaagttgggaaacaacaggtgctggagaggatgtggagaaataggaatgctttcacactgttggtgggaccgtaaactagttcaaccattgtggaagacagtgtggcgattcttcaaggatctagaactaaaaataccatttgacccagccatcccattactgggtatatacccaaatgattatcaatcatgctgctataaagatgcctgcatatgtatgtttactgcggcactattcacaatagtaaagacttggaatcaatccaaatgtccatcaaagatagactcgattaagaaaatgtggtacatatacaccatggaatactatacagccataaaaaaggatgagttcatgtcctttgtaaggtcatggatgaaactgaaaccattattctcagcaaactatcgcaaggacaaaaaaccaaactccgcatgttctcactgataggtgggaattgaacaatgagaacacctggacacaggaaggggaacatcacacactggggcctgttgtggggtgggttggtggggagggatagcattaggagatatacctaatgtaaatgatgagttaatgggtgcagcacaccaacatggcacatgtacacatatgtaacaaacctgcacgttgtgcacatgtaccctagaacttaaagtataataaaaataaataaataaataaataaaataaaatacaaatacaaaaatttaaaaaaatgcacacaattctacattgttcttataatgaggaagagtccattttcctattccttgagtatgggttaccctgtgactttgtgactttctttccttcttattcccatttgtccctgtgccctgccacccccacaccctcaaccttctgaagcaatgatagttttctttttttttcttttttctttttttttttttttgagacagaatctcgctctgtcgcccaggctggagtgcaatggcgcgatctcggctcactgcaacctctgcctcctgggttcaagtaattctcctgccttagcctctcgagaagctgggattacaggcacatgccaccacatctggctcattttttgtattttagtagagatggggtttcaccgtgttgcccaggctggtctcaaactcctgacctcaggtaatccacctgccttggcctcccaaagtgcttggattacaggcatgagccactgtgcctggccagcgatggctttctatatgctgttatggccaataacaaagagtcaagttattacaggcacttaaaaaaaaagcttcattgagatataattcacataacatacaatttacccatttaaaaagtacaatttgatgctcttgccagacactaaatctgctgggatcttgatcttggatttctcagcctccagaactgtaagaaataaactcctgtcctttataagttacccagtctaaggtattttgttatagcagcatgtacagactaagatatgagcctatagtttaactttttgcttagcaggaatatttttctcaagagcacctttagcttgaacttccccacattctgtttcaaataaagttggttcttctggagaatattttggagctctctgttttcacatactgcctctttccacttgtcaaaatctctgacctgctatccagggagctgagtaggagcagtagcctctggtcttcttggcttctctctctcagcatggaaccactgccttaggagtgagctggggcaaaggtgaccagctccaagtattcatgggcttctgtacctgaggtagaggctccatcccatgaatgggagcttgacagaggaaggaataaggtatattaacctcttggttgcactcatcagaaatttagccattcaacttgtagttggagaggatgagaaacgctgatggccagtccctccttgtgagttatggcaacctctgattgaataagaagatggagctccaacttcttggccatacccaccttggagtggaacttccattaagctgagctacagtagggtgagggaggggttggggtgtggttcaaatgccatgaactcttattcttcttagtgacttcaatagattttcttgagtaaatgtttcttcatttgttgtgtgcccttttgacaatttccagaaactctgaatggtttgtttaaataaattccaccagtttttcttttttcactggggactgcatccatggagttcctcatgctaccgtatgggaaggggaccaagttataaactcttaaactcccagtagagaccatagtcttgaaagtctggacttttaagaactggaacctataagagagaaatggcttgtattttcctttttggtccaaaaccttgggtttgaaaagcaagtgctgaggaatcttgaggactgctggctatctttcagtacatctctgttttcatttcctttagacttactactgtgcagtgaaaatttgtgtgcgtgtgtgtgtttaacacattgtaccttgaatgtaattatttatacatgtctcaattccttccttaatttgtaaattttgggggggcaaaggccatgattttgtttggttttgtaacccttagaactctctataagtgcttatagaatgaattatatacccgaataaatgatgcaaataaacatatcacaaaatgacattctggttgctcctatgtcctaccatcatctcaactttgggcaacccaccctcactgaaattcaccattctatctgagtttccatatgtgactaatgcctttttactgttctgatcatttacacattttttgcaaacagtcctaaatgacatctttatactccaggctcttttccttctcagggctttagcaattgctgatccctgtgcccaggatgctcttaccccagagcatggaatggccagctccttctcattacttataacagtataaatgtctaaaattattttttgtctgttagtttactgtctttttccatactaaagcatcatactagcaaggaccttgacttgtacacagctgaatccccaggttctctaaaaatgtaagtagtaagaatttataaatatatgctttttagtgaatttagtgagttttctcaaggagaagcaaacttttaatttacttctacttcttcttcttcttttttttttttgagacagagtttcattctttttgcccaggctggagtgcaatggcatgatctcagctcactgcaacctctgccccccgggttcaagcaattctcttgcctcagtctcccgagcagctgggattgcaggcacccaccaccacactcggctaatttttgtatttttagtagagatggggattcaccatgttggccaggctggtctcaaactcctgacctcaggtgatccacccacctcggcctccaaagtgctgggattacaggcgtgagccaccatggccagctgaaaacctttaatttaaaacttagaatttttttttttaaacagaatctcactgtgtcacccagcctggagtacagtggcatgaatgtggctcactgtagccttgacttctggtactcaagtgatactcccacctcagcctcccaagtagctggggccataggtgcacaccaccagacttggctaattttaaaatttttgtagagatgggggtctcactttgttgcccaggctggtcttaaactcctggcttaagtaatcctcccaccttagcctcccaaactgctgagattataggcatgaatcaccgcacccagtctaaaacttagaattgatatttaaccaagtcaagtcatccagtcatggaattatcatactgtcatatgtggtattgatagttttgctccatttctccatgtgtccattcttttaataccgccgcatgaatcccaggatgctgttcttgccccagtatagacagccagacatgagctacctactttggtgaaaaaaaaaaaaagaggtctctataatgtctgagactatggtggtgaattcttgacttctaaggctaaaatcaccattcatatgtaaggtcagaaagatttaaatggggacaacatctggaataatccatttttctttgaaatcccttcaaaactctagactaaggcatagggaggagagttagaggagaatccgaagagtttacaagggctgcacttacattgtccccctttcagctttgtcttgaaggtgcagcaatgtataaagatatctggcctttctagggttgataattccacagtggaagtgtgtcacctgtacctctgagtgtcaacagcctttccagtgtctcctgagcacagtggtataggataatagaatagagatgggctcaggaagttagccaagaaaggccccaaagagagaggacttgaagaagcctggggcttcaggtctgacggctgctggtgcaagtgggtatgaggaccacagccgtagcaggacctcaggcacttcaatggggacagtgaggacaggagccaatgactcagagggtgtcactgtggaagaggtcacacttgaggcccagctaagacaggctacccttcaagggatgctagaactggagtgagatagatcaagagggagaagcaaatacaaagagctgcccctgaaggccacagtacacctccctgaaactcacttgtcacgtagggggaaaaagtggggataggagagaatcttaaaataatctcaaattattgagattactgacacccagttttaaaactgaaaatgatgatactcagttgttaccgaccaagtaaagggggctttaatataacttttcttttcttttctttcttttcttttttttttttgagacagagtctcgctctgttgcccaggctggagtgcagtggtgcgatctcagctcactgaagcctccgcctccctagttcaagtgattctggtgcctcagcctcccaagtagctgggattacaggtgcctgccaccatgcccagctaatttttgtatttttagtagagacagggtttcactgtgttggccaggctggtctcgaactgctggcctcaagtgatctgcctgcctcagcctcccaaagggctgggattacaggtgtgagccaccgtgccctgccaacttttctaaattataggaaagtaaagttacgtttttgctccccggaggccatgattgcaaaatttatacttgccacagaacatgagaggccacaacttggtttttacagatgagaaaactgaggcccagggagtaagatgggtggttcaaggtggcactactatgtgtgggtacggccaggaggacagcctggatctcccggttctggttccaggctgctcagcatcacacggtgctgccttcctgcatctatcaagcttatgcagaaagtattgaggctcactgatatgtcaagtataagaaaatgtctccctagcatttaaaaaaaaatagagcgttcagttaaacttaggagccaaaatttaaaagctcttgactgtttcatgacagttaagtagcatgggacataaaatcaaaatgagcatcttttgctaaggaatgttctcttcctttctatctttttctcctctccttccctctctttaattattcctgacacttttcttagcataaaattcctcatagctggttgtagcatctacaaggaaaagcgaggcaatcagaacagtcagctggggtggaagagagtggtaatttgagaaacggcttattttgacaggagcacttaggcagcagaaggggagatggactgaggaggagggaaaaggcagcccacatttctaccctctgattatgacatctctagggaacagagccgttcttctgaggcatacccttccacagatgcaaaagatggagaaggtagggagtgactcagagagccggtgtctggccccattatccagctgcttctgactcagatctgagatgagacaactcattcctacccagacagcttgcagtgtttttgctagggctgaccaaattctcagtcattcatcatatgtctttctgtttgtgcttcatttaagaatgagttctacctctctccatcaagaaaaaaattgaacaggatccctgaggttcttcagcactcatgacttggagctgctgttggtttcccccaacaccagtctgtaggcaataacttgaactcacaaactggaagcctcacctgaggctgggtttactcatgcagcctggtggcttctaagggcaggaaaaactgaggagagactatgcggtgcagcagatgacagtttggatttggcagacctgtattcaagttgggcactgtcatctcttagctctgtgatgtcagccatgttgcttatcatctctgagaactactacccattttctataaaatagtttcttttataaaaatgaaattgatagtaaatataaagatgtacttaactgatacaaaataaacacataggaaatgttatctggcattgcttctgtagcaattacaccctccccactcataagggctacctggtatgctaagagtgcatacctttaatgatggcctacctagttcacctgttacacccctacagatgtcaaacactgcacatttacagctttaactggatccaaggacagtgtcttattcacctctggattcctagtgccagatggagcaaataatttaataaataagaaagagaaccaaccgtgtcatgaaagacttcttaaatttctatttcttattatctcacctgaaggaaacaaggctgtctaggaattataaagagatggtttgtggtgtgtgtcagcctgtgtttatggaatttcaaatggaaaatttacatatgtttatttttccatggaaaagggagaaataaagcaatgctatgctttggtttaaactatgtaatcaagaaaatgctataatgaccaggacctaagcagagagaggattcttgatttctaacgctagttaaactagatctccccagatattggcagagccaatggcaatcagactctgcttttcatgcgtctttggaagaacaggctgattagagctaagaccctgtatttgatatcacagcacaactggagatgggaaaatgaagatctaggaacagagaacagagagggagagagctgatccccagcaaagggtgaggaactatttaggtgcttgatgaacctgtgaggcttcacttgactttattgacttcctttgtgagaacaagtcaagaagacaaaaccgggggcccagcagcatcaagaactgatccaagaggcatcttcaagatcacatctgtcacagccacatccgtgctgagggaccgtatggatgctgagagtgtacccttccctgtgaacagggctgtgaggttggaaggatgggtggttgggtgtcactgcttctgcttttttgccccatcacttgggcctcttttcctgtttttttaagggcctactgttaaggaggtgccatatgaacagtgttgaggatgatttttagtcagtgcttgtcccttgctccattttcactagtgaatttaggagctgttcagtaacatttcaagagaggttcgcggattgccttgtcttttagagaagatgctgctgtaggtagaagtttgaccctgatgggttctaaatccctttgaagccttagaagttatgatcctaaaaaataattggccaacagctgggtgatttggactgcaagttcacccatggccaagacacatagatcattttgttggaaatatagggctgttggaagagtggttatattaagagttgcctcagttatccactttgctttgggtcaacaagacttaaatatggaaccattattttgaatgtaattccttaaagcctagtccaacaacgtaagtttccccctgccttccagatttagttatttgtatgacattgaaaagtcatttctctctctgagccttagctcaccatcagttaggtgaaaaagttttacccatgtgatttctatggtaccttctaagtttcacatagcttgactgtctaaaatctttttttttttttttttttttgagatggagtcgtgctctgtgacccaggctggagtgcagtggcgcgatcttggctctcttgggttcaagtgattctcctgcctcagcctcccaagtagctagaattacaggtgcatgccaccgtgcctggctaatttttgtatttttagtagaaatggagtttcaccatgttggccaggctggtctcgagctcctgacctcaagtgatctgcccacctcagcctcccaaagtgctgggattacagacatgggctgctgtgactggctaaaatcttattgtgtgggattagaatttagtttagcctttctggagggaaatttaaaatttaaatgttaatgctgtttggctaagtgatccaatttctaggaattttatcttacaaaactgccaagacaccccccaccccaccccacatcataacattgtttcaaaagcaacaagtagaaacaaattaataagaagggagaggggctagatctggaaggacacacagcatacttccaacactgggaaataacttggattgcattgagagtggagtggggtgaagggagatttcatttgtctgtaatctgggttttccatgggaatatttatgtgttacttgtgtgactatatgaaaaaaacccacccagcttattaagtcagatattgtatttggtggttggagtagcctcttcaatgattagttataccagtcagggtgcagtcaagagacaaagatcacaccagtaatttgaacaaagaaaatttaacatgttaataactagcaactaataacagtggattaactacttagggagtaaagagaactctaaagaatacaggactagcagatacagggagtagccacgacttatagggctgaagcagtatacccaagaacagaacaaacttgaaagaggatctgcctcctgatgtctgagattagatttcgaagctgtggctgtggtcccctggatggtagagaagttctctgaggtgtgacgggctaggatggcaagcaggaaactgcccacagaagtgccagtgagatgcactggaagaccatccacggcactggtgaaactcaaagggcagccaaccgctgtgcaaacattgtgacttgctggagggtgagcagcactgggaatcacgcgtgccactggtatctaaataccacaggtatctacataccacaggaacaggggaaaaggcacacgagagcctgtcctcctctggtgtccccctagtgctctctattggcaaagcttaacattgtgtcagctggcaatggagaaagttcacagggttcagctctgtatcacaaagcagggcaaggaagggtagatttggagagaggtcataattgttcaaaggcacaggtcgctcatttagctaatcagcttccatatgcatcctcctatacatgtttgaacttctggacaacaattaaacaactctatatttccaatgaacaagcagcagctaacctttgaataagtgaaaaagttctcactttctccaaaatgaggacatatgcagtcccagtcattgtatccttgctggctatattatttattttttaaattcagtcacagttccactgaatattctgttacctaaagactaaattataaagttaacatccaagaacttgcatataaatggataataggtaggaggaagaagaacaaaatggttataacatgcaaattaatatgtacatataataggcaaataaaaaaatatgcagctgtaatatagccctcatttctataattggccacaaggtcaaggtgatgattttattctaccactacccattctatagttcccttatttcagcgtgcaacttggctgataattattgtttatatggtgaagtaaccaaaaactttgtttttcaaaggtctgagtcctcagtagttctgtcttttaaagaaatttttggctgctgtagccattttttattgaacatgaaagaactaaaagacatcctagagtacccactgagtttcagatagagctctccttggccccattttgtagtagcaatccgattttcttttagtaatcagaatcaattattccagccatttttctgctttctgattcagtgtataaggagcccaaggggctcgagggtagtttcatctgccaatttgatggagccattgctgtgtccctagcaggagcatttccccttggggaataagattgccaactagcagagcttaaggttgccaagatgggaagcaaatttttgagagtacattaccgggtataatattgagaggaaccaatctcatttccacttttttatttctggactcatgtgttctggttatggaaacagcactacataattgttatcaattgaaagcatatactgcattctataagacaaaactaaaatttttagaattatctccaaattgatatcattatcaaagcttcagggagccctccgacttttcaatcaggccagctgcttatgagtgatgaggtatgtaataaaagcagtttattacataggcatgaaccaatgctgaatatgttctttgctgtgaaattagttccttgatcagaagcaatagtgatgctgcatgtaatgccatgacgatgggtaaggaatgctgtgagtccacagatggtggtgctagcagaagcatttgatgcagagaaggcatatccatatttggatatgtatctatttcagtgagaacaaatctcttccctctccatgatagaaaatatccaatgtaatcaacacctgtgaccagctggctggttagcccaaccaaaaaaatttgccattttggggctcaatgtcagtctctgctatctgcagagtaggcaatcagcagtggcattattcaggtcagctttggagaaggagaggccatattttggcccacacataacctctatcttgataccatgtccaatttagttacaggaatattgagcaagtacttggatggctgaggaaagaggctgattgatatccatggagaatataattttgttcacctggttattaatagcctcctttgtatgatatgcatttgataagcattcacttgggacacaaatatcttcataatttgcacccattttgagagatttgtcacataccttttccaaagacatccttgtcaccaacttttcaatacagttccttccacatccctgatgatccagtcaaataagtagcaaacgtccacaaataactgtagacccatgcttttagccccctctcaacccaatgtactacttgaagttttgcccactgagatgtttttccttcaggtgtcctttggaatcacctctatgtggggctgttaggtggcacaactgtccactttcaggtggtaccagcatatcatgcagaccctattgtaaaccaggcttgaggtttttctttatcagttaactgcagatgggaaaattcccagaaggggactgaaggtatggactggaaaggacgcaatgcagtagtattgaaggagtctgagccacctgcttattcaaattattcattccttgtggatctgcctaagcttggtctcttatataccatttccacttggtggcaaatgctgctacatacatccatcctaatgactaggtgggtcataaaatactcagtacatgataaaaagcttggggtgcatggtcacctgaggtcccacatttggattttcagtccctccaaggaccaatggcaatacagaagctgtttcttaaacagaagagttatctatagaggagggcataggtttcctccaaaatcctaaaaatctgctctgcaattttcctttggtagctgctagagttttcatatagctttcttatttgtcatccacactttgagttattattgtatctgttggataatgagatccaagtggtacagcagctttcacaggagctggatttgctgcagagtcttctctttttatggtcctttcttaaaacagaggcttcactttttattttcccctcttaaagctggcagccttatgggtcactggcagcctatgagtcacagatgggttaaagtaacacactcaaagtggtctaggttgtctccagattccaaaaagacctaccaactgttgtgcatctttacttgcagtagttgtttagagatgtaacaactcatctttcacctcggaagtaacgcctcaacattatccagaccattgaaccaccagaaacgtcactaagatggcagatgtgaaatttttgtgtgttttttttctcacgccttctagtttgcatatttcttactaaggcatctagtgcactttctagttccaattcatcagctccaatcagtataattttatcaatgtagtagaagaatgtgatgtttttcagagtgtcaagatgataaagatttctgtaactatattgtagcagatggcaggaaagttgacatagtcccaagataagactgtgtgggtgtactactggccctgctaggtataagcaaattggttctgctggttcttacaaattgatatgagggggaaaagcattatttaagtcaacagctgcataccaagtgccaggggctgtgttgctcaaatacagatctggaatagcaacacaattagaatgaccatttgattaagtttataataatccatagccattctctaacatttacccatattctgtacaggccaaacaggtgagttaagtgggaatgtgatggatatcacaaactctgtatcattttgtccattaatagtggctgtgatttctgcaattccctgcccctccacccccagggatgcagtattgcttctggtttactatcttggtgaagagggaactttctatggacttctacttagtccctcctaccataatggcccttacctatgggtcagagaaagaacttggggattctgagagtgacaagtatatcaattccaaatatacatccaagaggtgaggaaaaaacaattgagggaaagggagcatagaccagttggtcccactgtgaatcagatttgggctaaggcttaatctgccacctgactgctataagccttcactttgacttgtgagcacagtcacatctgaggtctctaggagttagtcaatacagagacaatgtctgctaattcccaaaatatctgtgtagttccttttccccagtgtatagtcactgttataaatgactacatgttccactgggaaagcttaggaaaaaagctaaggtatacactacctgactgagtattagttatctgagctgtgacagactgggactggcaaagcggaaactgcatactttggtgctgatgagactccctgggaagccaccccctgaggtataagttacacttgctagtaagccactctaagtggtactgggaaaacttgctgaaaagcatgtacccctgggtgtcccacaggccactggaactagaaacagaagccccttcctcctctagtgtctttccagcaccatctactgagaaagcttaacaatatttaaagttagtccagctgacaatgcacaaatgtttccagtatcacaaagcagaatgaagaaggatggatttggagctgaaaggcaagaaattgattagactatttattgtatcagttttttaaaaaattgagcacctgttacctgccaggcatggtatttgctgccaggcatgcagaatttaagagatcgaattgatggcagcggctgccatcacactagctgtagcagagaggtgtggctggggctgcacaccccatggagctggtgggagccctacttcttctgaattggggaaggagctccctgcctgttgctgcagccacccaaactgtggctggtggtttgggtggtttggttctggtggttcttataaattgatatgagggagaaaagcattatttaagtcaacagctgtataccaagtgccaggggctgtgttgctcaaatacagatctggaatagcaacacacagaggtgcaggacctgggcgtctctccagcctgcaccctggggggcctgggaatccccccccccaacccctgcaggctcagaggtgtctactcctgctgcctggcctctctccactccctgtgctggctctgctctcagagtgggcggttggggtggagccctggggccatgaatggcagggttcaggccagggcctgaaggctgggggctggactgccagtcttgcagaccagagtagggactcgtggtgcctcttccaggcctggccatagctcctcatggaccaatcagcaaatacttcctcccctctgaggttcataaaagccctgggctcagccagagcaggagagaggacaaccagagcagggcagagaatggagagatgatgggatgaccacctcagagaggagctatcctctttgctgagatcttcagagacatgcagagatgtctgaagaacctgcctgggagaggagccatgctctccagggttgctcctctctgttaagagtggcagacatccagggtctcctctctgctgagagcagcagatgtcaggataaccagtgggcagagacaagctaccctcttcagggcttctctctgctgagagatgaacacatgacaggacaacctgcctacagagaggagctagctatcccactgtgggtctcctctgagctgttctaaaactaaataaagctcctccttgtcttcttcacccttcacttgtctgtgaacctcattcttcctggacgcaggacaagaacttgggcaaagacaccaccagtcacagaggtttccggaaagaaaactgacaccccaaagatcttgcaacacaatctctaccctaaggaatcacatagatccatgagaagataggaaatatacagaacaactataagaaaaggagtgtctaatgtacagcaggggaaataggagaagggatatctgagtgtaccagggaaatgccttcctgcaaagaagtagggttgggccttttttcttccagggtgtggagaagtcttctagacagagaactgggacaaagggagggcattataaaaagggactccagcaggaaaaaaggcagggtggcatgatcacgtacggtgttcagagcaccatgagtaattcaacaatgatgcagtacaaatttctagaagggaaagattaaagatgaagctggtatcattctatgtgtgtgtgtttaggactctcccctgtcatgcaaaggagttggataaattccacaaagtcacatggcatgggctaagacacaggctttgttgggaaatgcgcaaactcacaaagcagaggtgcatgtagttctccagtcttctctttttccccatggagaagtctgctagggtatgtgataaacatggcataggttctactccagcggatggagtcttagcctatctgggtttttatggatgaagtgagagaaaacgtttttgtcagcaggagaatacacaggctgcttagcaccaggctggatttgagaaagccagctgccctgcaccctgggaaatctggagcagtgggatgttaaaagtttttcgtctagaaagaggaaggctgtggtcatgtaggaagctagacttgggtgttaccctcctgtggaaccagaggatcccctgggtctcagctagctgcctgtttgggcaactcatggtggaccctcagtctcatttccatacagtgttgccctttgcatattagacaagcatgtaaaggccaaataataagggttttattgccatgttaagtagttttgcttttaactggttaggcaatagagaccactaaaaaattttcagtggcaatttgctcaacatgattggacttgcagattaaaaagaacagtccagtagcagtgtggaggttagactggaggggtgtgagaccagaggcagagaaatgaataaggctaaagaaaaagaagaggaagcttgagccagggcattgacagaacacggaaaggaaaagatatgaggatatttggaagtagaatcgataggctttctggctaacaattggatgtgggataaaagttacaggagattgcaggagaaatcaaggctaactcccaggtttctagcttagaaatcttggtagacagaggtgccattaatcaagaagagggatataggaatgaaggagaatagctgacgattcagaaaggaagacaatgatgaattccatcctggaaatgttgagtttgatgtctttggggcacccgtgaggtggtgtccatatgcagttggatttacggattcaggtctcggaaggaagaccttgcctggaatatagatttgagaatctccagaatataagtgtaggctgaaggttatgatgggggaagaaacagtacatgagtgtaagcataaggcccccccaaaaactgccagaatactgacactgagttattatggcagccccaacccaacgtcaagaagagcaactcagtgcatcttaggaaaaggcttagaatcctctagagtttgtgggaaaaaggacttcatttgggaagggaccaccagtgacagaacaatgaagagaatgctctagttctctaaattacttatcatggattaagaaaaaaatagtaatgacaattcttcctactgcttttgagagtctattttgagtcaggtaggtgcttttcacatattacctcacttgactctcacaacatccctgttaggtagtttcattagcttcattttattgatgaagatattgacattcagagagattacctcacttgcctaaagtgacaagttactaaatggtagagctgggatttgcatcgagaaccccatcaatagtgcacctttcactctaagcatggggtaaaaattcatccctgaaatgctttgggtcagtttcgtggtggagaaagcaccagcccaaggacctggtgtcaagtcttggcagtgcccaggtcggctctttgtcattgggtgtaccccttaccctctctgagaggggcagttctcagaaaatgattgcaaggagcatagggcaggggttgacacctaaagtcacaataaggtcaggtaaggagagggaatatggccaaaccaggagctgagaaagaggcctgcagggcagtacacttctcccagagccatctacccacgtcaggaaatttagattgaagttactattagggcagcctcagggaggaaaagactgcaccaaagagcagccttctatgtgccaggggatgggtgggtattaatatctccctccttgtcccccagccgtgtagagctggatggagtggacaacttgataaaagattacccacctagcactgccccatgagccttgcttcatcatggtgctggatgcagggcagggagagcgtactttcctcgctgtggcccttgggctggtgctggcttccatcttagtggtggtagcctgtctctgtttcatgtggtcctcagtggcctccctgtccttcacatcctattttctgatgactgtcactgggttcactgcaaatgggttcatggttttccaaaggtaaaacaaacatgagaacagctcagtagttagaggacctgatgagtgttaaaatataagtttacaacacgtctctccggtcaggaaagcaccaggtgtatgtgagttacactaagaacaagctacacctgccattagaatgtctgtaatacatgcagagagatggtaaagacttcagctatgaacccgaatggtggtgatcactgtgcttgctgatcattggtagtaattaatgatgatgatgatcatgtctaacatttaatgagcactatgtgtcacacactattctatgtgccttacatataaaaatgactcttcataacctactcctgtgaggtaggtgtaaccactatcactataaaaagaggcacagaaaggtaagataacttactcagggctgcacagctagtaagttttagaacctggattggtacccaagactgtcttttgctagagcttaggctctaaacctctctgctaagctattattccagtatacaaactgcatgttatgggttgaattgtgtcctccaagaagacattttcaagtcctaacacctggtacctgtgactgtgaccttatttggatacagggtcttttattgcagatgtaatcaagttacaatgaggtcacattagagtagggtgggttctaacaaatatgaccattaaccttagaagagaagaggaaagacacagacacagagtgaagacatgggaagatggaggcagagactggagttatgctgtagaagccgacgaatgcctggggctaccagaatctggaagaggcaagcaaagatccttccttagagaatttgggggaagcaggtctcagcaaaacctccagaatgtcagaaaacaaatttccgttgttttaagccacctgactttggcattttgttatggcagcccaaagaaacaaatccagcgcgtatcattcacaaaagtggggaagacatcttcacagggcccatgctccagtggttctgtgcaggccaatgtggtttatacctccatttacaggggctgattctctccatgacatatgcttgcatctaacatttataaaatttacagtctacaaaacatttttacttatcctacctgtgattgtcataaccatcagggcagatactaccaacagttgaaaaactttttaaaactagactttatttttattatttatttatttatatttcaataatttttgggatacggatggtttttggttacatgaatgagttctttagtggtgaattctgagatcttagtgtactcatcacctgagcactatatgctgtatccaaaatgtttaggcattatttttttggagtagttttaggtttacagcaaaaatgagtggaaagtatagagatatacccatctactcctgcccccacacatgcacagcctcctccactatcaacttcccctgccagagtagtacatttgttacaattggtgaatctacactgacacatccttatcacccaaagtccacgggttacatcagggttcactttggggttgtacagtctatgttttgacaaatatataatgatatgtactcatcattatagtatcatactctcccccctacccccggcaaccactgatcattttactgtctccatagtcttgcctctagagttcacgggaaggagtacttcactggggaagaggccaccagtgacagaacaaatgaagtgaacattctagttctcttaattacttatgtcctggattaagaaaaaaatattaatagtagccataattcctcctactggttctgagagtctattttgagtcagatgggaggttttttttgcatattattaatacctcacttgactctcacaacatctcttgcctttttcagtatgccatgtagttgggatcatacagtatgttgccatttcagatagacttctttcacttagtaatatgcagttaagcttccctcctgtcttttcatggcttgatattacatttcttttttgcactgaatagcattttattgtctggatatcctgcagtttatttatccattcacccactaaaggacatcttggttgcttccaagtgttgacaattatgaataaagatgctaaaaacatccgtgtacgggtttttgtgtggacatccgttttcaagctggtatttgggtaaataccaaggagtgcaattgctgcatcatatggtgagaggatgcttagttttggaagaaattgccaaactgtcttccaaagtggctgtaacaaatacggtttttatttggtggatgagcaaagggttcatggaggtgaataaattagtctaagactggacaatatgcagggacttctacccaatgtcttcctgtgttgcttctcacccaatgctcaacctaagcaggagcctggaggctgggccaaaggttctgatgtgaagatatcacactgggttctaggtttattggtcacattttggacccttactctattcccacaaacctgttccacccacagctttcctcattgaagttgaggggaactctacccttctagttccataggttaaaaaccctggagtcagcctcaatctcttttcttctttcacgccctatatttattctttcaaaaaatcctgaagactctttcttcaaaatgtatccagattctgaacctttagtgctgccaccttagttccagcaattattagtggcagggttaactatcaccatatcttcctatgtactaagcactgtgtcttgcacttataattttatacatctgatatttggaagaattttacacagactagcttctggatctgtacatttcaaaccttgtttttcctctccatccacttatttccaaggtcaagtgctgcagaacactttcatatcagatgccacttccagtgggacttcctgccacggtgccaggtgagttggcccagtggatggcagtattcccagaagccattttttacacgaggatggcaggaaagaccatgaaccacataaataaattcactaaactcaaaccaaatgtatctccaactcgtttcctccttagctggatccccaaaattctccttgtccctccaacaggaggggaaatgtaatggaggtgaagttggaatgcaaagaaacagaactcttaaccaatagcaattgcaatatcttgcttttgaaagttttacacattctatggttaagtttctcccacaccttggaaaaacacctttgcaattgaagggtcccagaacttacctttcattagcttcatggtaagtcagcttctggtatattttaaattgcaacctgatcctttcccccagacctccccattcaacttatctgcttttcctgttgtcatagcacctccatcctttaggtaccgtataaattatccattatgtctgccttcggtagaatataagcttcatgagggcaagaatctttgcttgttttgttaactgatgtttctcaagtgcctagaacaaggccaggtgcatggtaggtgctccataaagatttgtggataaataaatacaataaagaatgcataatgcatacacgagtgagtgaatgaaccaaaggtaatctaggatcagaactgtgatgatctaggacttctaaatttaaaactttgagttatattccactcatttccacttaaccttggccatgtcaatgaacctttctgggcctttgctttctcgtgtatgaaattaggtggttatgtattcatttaattaatatctattgcaacccaattatggtcaaggcattcaaagatacttccttgcatacaagtggtaccactcaaaatgcagaattcagcggcctcaaaagtcccgcctcttccaagccccgcccaccgcagtccatctttaggccccgccccaattcggctcagcccgccccagcgtagaggcaccacctttcctcgctgcagtcatccaatagccaagatacacggctaggtgatttgcgagcgggagttaggtgtcctcttggcgcctgaccagagtcgggaaattcagctcctcttgagtagtcccttccccgagttgccccccgaggtatgcggggtcactcgctgctcgatgttccctccgaagggtcggacaaggctccggagccctgtagctgccctccctaggagccccgggtcttcactggccgaggtgcccaccccgcagcattctgggagtggtagttttcttccttcaggttcattcctggctggccagtgcccaagactggcgagactacgattcccagacgcccaagcgagtcgccggtcacgtggccgcaaggacgctgggccggtgggcgggggccggcaggtgctccgcagccgtctgtgccacccagagccggcgggccgctaggtccccggagaccctgctatggtgcgtgcgggcgccgtgggggctcatctccccgcgtccggcttggatatcttcggggacctgaagaagatgaacaagcgccaggtgacggaggagggtggtgagcgcgccgtggccgggaccgcctgtgctagcggggagtcggggcttcccagtcagggctccggctcccagtgaatgcggccgggcggccacccgaagctcccgcgctgggctctcaggccctgggttctacgcctacgtgtgggcatgggtgtgcacttccttgccctgacaagagcacaattaggggagggtgcaggaaaggggagaatagaaaccccgtgccatggaatgtcaaatgtggttgagaatgccacagccacgcttgtgggagagatgactcggtgaacgacagctctctgagcgtatttgaagggccacccggtgaagagggaaccgatttctctgtggggcttcagaggcctgactgccggcaggtggaagaggcagaaaggcaggcgagagggaagaactttcctacaacgggagctgtccagcgatgcctcccaaagcagtttcttcccagcctgggcagttgtttttcccctgaccgtgggtcgggactaaataatgctccttgtgcctagagagctcacaagctgtgcgcaatcattgtggactcaaccagtgttcccagcgagattccagaagccttctctaacttctgagatggctgcactctgaatataggaggcagtgtagggtctttgggcagctggggtggttgaattccctctcctttgtgagaggacctcagaggaaaacgttcctcttgctctctttttagccacttattggccatcatcactgtctttggggccttatctcttcactataaggttaagagtgagtagggattggaaaggaagccctctcagtcaggaaaaatacgactatgtaggcttctaggtagagaatttgggggacctgtaggacctgaatatcacggtggatactaatgccactattgctactaataaattgtgctaagaaaaatgggaccttccaaccagggagttttgattgtctttgaaaatggtattaatcctcattattttgatggcatccagtttcatttgctccatcatgttgagatgtggggtggtgcccatgggaggtcacagcttactcctttaggcatacgtgtttttcccctctcactctcctcccccttccccaagtagaatttcagactagtgcagtagtgtgggaaagtttgataatttctatttcatcaaccgtgtttaggatgtggtagtgtctaggtgtgcaaagctgatgactcctgtttctggaagatgagttgtagtagagattatcaccagcttaaaaaagtaactgctaatgtcctgagcattgatgctgttcacaagaatatcctccaggaagcagagctttgtttaaaaatctagacttaatggctgggtttttaaagtgtctctaaaattggtactgattactgatggctataattgcagactgtcagaaaaggccctctgatgagtgtattgatccctaaaccagtttgccctttgaaagatcagtgtgtttttgctctcagcgataaggcctgccagtagctggctgtattgcctgttttgctagtcttctaattaaaattcagcaagctcaaatctactgcttcttggtactttttaaaaaagctttgtctttttttttttttctcttcttccctccaaaatagcatcttatgacactttgtcaggcctgcatgctccaccagtcttgaaagcaggaccttctttctctgctgcccctgcttactattaaagcaggacccacatgcaacacaagggctctttgtttctgcagtgaggaagagaggaagaaatacagctactggcagtgctgctgctgtcagccagaatatttgatctgaaatgtttgcttaaaactcttagacattggctgtttcatcattggttgacaatgactgagtatggacttagttctacactctgctgtgagcattaagtgctgagcatacaaagttggtaggcaaaggtgaacaacaacaaaagcacctgtgaaacatggtggtggttttttttttccagaccgcagtcagcttgtcagtagttcaatcaaaattacttttctggattccaggattttatgcctagaatctgattcgtaggtttcttaaagttaaggtgttaaaagtgtgatctgtggtttcttagtttgatttttatatttttgtgtatttggacatttccttagcaggtagatggcttgctcaaaggaagtttttttgaggaattgattttgctttcccttaatgaacttttcaagcatgggaaattatactggaaaatatattcttggtacaagttctttactggctaagtggcaagattttatcggggtggagccagatgacttgaaaacttgtctgaaaacggcaatcgttgtttaaaaccatggtttggggctttcctcatcagatctgtaattcataatgaaacagcggttatttatcaaatcctttaagtcaggcagagccggtggggaggtttttgaatgtaaattccagtgaacagcttctgctttagagtgacgtgacttgtaaggctgattttactttagaagcagtgttttgttgttgttgttggaatctcaatatttattgaatgaagacatgaatgttttatctcttctaacggctcacttctttgcattcttaagtatttgctttgtgatctttgattttttccgttatgctctttgagcttatggtgaaatggtgtaaaggctttgattgtttcatggcaactttctggtaaatattcttcatttgatgagggataaaagactacatattgggtacagtgtacactgctccggtgacagctgcactaaaatcttagaaatcaccactaaagaacttaatccatggaaccagaagaagcaatggtttaacatattatagcccaacactttgtcaatgtctgcttagcactccagtttcctttttcactctcctgggaatatagtgatagtttcataatttgctattgacacagtagccaagtcgcttttaaaaatggtgtgtaggctgagtgcagtggctcacgcttgtaatcctagcactttgggaggccgaggcgggcagatcatttgaggtcaggagttcaaaaccagcctggccaacatggtgaagccccgtctctactaaaaatataaaaattagccgggtgtggtggtgcacacctgttatcccagctactcggcaggctgaggcaggagaatcacttgagccaaggaggcggaggttgtagtgagcagagatcgcgccattgcactccagtttgggcaacagagtgagactccatytcaaaaaaaaaaaaaaaaaaaaaaagtgtgtaactttaatgttgaattatatttattttcctattttgatttattgcaccaaaatacattaacaattatcttaattcatttatgtcctcactttcagttgtatccttcattattgcctcaaattacctatttttacagttttaacattagcaagagacagttctgagctctgcttttcctacatcagtcagagtttgttttcagaatagagaatagtttaaagaagaaaagtcaatgactcataatttcactatcctaaaatagcctctcttagcgtcttggggcatctctttgtatttgttttatcgtttggtgagatcctactgcagcttacatttttcactcaacatactgtgtttggtcatgtcattaaagttcctttttattttcctcccccaacccaacccgctttctcctccactcccattaagttctttatgcattgttttaaatagtggagtaatctgccattttcttttttttttttttgagatggagtcttgctctgtcacccaggctggagtgcagtggtgcaatctcggctcattgcaacctccgcctcccgggttcaagcgattcttgtgcctcagcctcccgagtagctgggattacaggcacatgcaccaccatgcctggctaatttttgcatctttagtagagatcgggtttcaccatgttggccaggctggtcttgaactcctgagctcaggttatccgcccacctcggcctctcaaagtgctgggattacaggcatgagccacactgcacctggccccactttctactcagttatttccatattgttgctcatttatttccttttccacattattagaattaagactgtaataaatgtcttcgggccataattctcaacctgcctttagtttatactgaattcctagaagtaggattatgggccaagagtaacctcttaatactaatgccaaatagctttcagaatggtttatcaatttgtatccccatcacagtgtattcttgctagcactaagtattagtattaacaacaacaataaaaaaaccagacactttaaatttcttaggcaaaggctaggtgtggtggcttacgcctatagtcccagcactttgggaggattgcttgaggctagtatgttcaagaccagcctgagcaacataaaaagaccccatttctaccaaagaaaaaaatttagaactacccaggcatgccagcacatgcctgtagtccagccacttgggaggctgaggtgggaggatccattgagcccaggagtttgaggctgtggtgagctatggttgcaccactgcactctagcctaggccacagactgaaaccttgtatcttaaaaaaaaaaaaaaaaaaaaaaagttgctagaaacaaaaaaaaaggaaggggttgcaaggagggtagaggcaggattattggtttgaacattttttatgtttatttactacttgtattttcctttggaaaattatagttttaagcttttacctttttctgttggaattttagtgtttttcttattgctgatttgtttgcactcaccattaaagatgtttattttatcactatttattcaacaaattgaatacttaacttttgccaaacccatgttgaatcttgaggatacagctatgagcaaggctgaaatgatccctacttttgtggaatgtaaggtctaatgcaaaagacacattaggtaattatatgcttaattatgatgctgatgaacgatacaaagaaatacaggatgcagtgagaatatataataggaagacctaggctggccagagtggagattggcaaaccccattgcaccacctgtttttgtaaagttttattggcacacggccatgctctttcttttacatattgtctatggctgctttcccgctacattggcagggctgagtagtttcaatgagactatgtgacccgtaaacataaaatatttactgtctagccctttacacaaaaatttgctgatttctggtctagccagtcagggcagggttctgttggacactgacatttaaaggtggatgtaaaggtgagtgtttggtaaactaaggggttcagggagggagccttctgggtaaaggccctggggtggaaagaagcatgtgaggtggaagcatggacagataccaccagtgcagctggggtgaggcgagcttcacaggctgaagcggggctgcagggttatatcagacagggccttagaggccatattgtagtttagtcttcatcctcagagtagtgggatgcaatcaaagggctttaggcagggcatagacaaccaggtgaccagatgtgcatttgaaaaccagtacagtcaagcaccatataatgatgtttccatcaatggtggactgcatacatgatggtggtcccaaaaaattataccatatttttactgtgccttttctatgtttagttacataaatacttaccagtgtgttacagtcgcctgcagtattcagtacagtagcatgctgcacaggtttctagcctaggagcaataggctacatcgtatagcttaggggtatagtaagcgacaccatctgggtttgtataagtacactctatgatgttcaaacaacaataaaatcacctaacaacgcatttttcagaatgtgtctgtcatgaagtggcgcatgaccgcccagagtgtatcacagagaatggatcagaagaggtgtgcatgggcattaggagacctgtcatgaggcttcacagcagcctgatgggccccgttggtgatatgatgagagtggcagcagtgggaatagagagacctggacaaactccagacgtgtttggaaagccagaatgtatagaatgaatgggtagggggtggctccaaacagcagggtgataataatgtcatttactgagagaaggatccctaatactgaaagcttttggagaaggtaagtttaattttgacatgttgaggatggggtatctttaaagacatctaagtggaaacatcaggtaggcagttggaagtctctgaattgggagtagttagcctgatgggaccaatgccagcattcaggtagaggaggagattcaggtagaggaggagcaactggcaggaagacaagaaagtggtgagaagtggatggcatgccatcctggaaggcaggggctgagggttcgaagaaatgatcatgtgtgttgagagctgctggaaggtcaggtaaggtgagggccgacagttatcctttggatttagtgagcatgtgactgactatgtaggttgaggactgaatatagatggtgaagaaggggagcaacttggggtagacactgttttgagaagagctgtgaaggagaagagagtgtgaaagctggaggaggatgtgaggtggaggaagggtttgcgatgggagagtctttagctgatgggaggaggaggtatagagccgtgattcaactttcactgcacctcagaatcaccccacccctcccagtgatccagctggtctgggatggactttccagggcttccccgatgattctgaggtgcagccaaggttgagaaccaatggtatagagcagtggttctcagctgtgattcccactccagcagctttcgtgtcacctgggaatgtgtctgaagtgcagtcctcaggcatcgccagctgatcctagtgcacgctgatgcttgcgctgctgctgtaaagaactgtccggacactgagaagtcagaaccacgtagaaccacctggcaaagtctccatttggacttcccgagtgtctttcactccgacttttccaggccttgtgtattttaaactgtatttaaactgtgtttaaaactgtattttaagttgtactcaatgctcaaaaagagttcataccaccacattccatctcagttaatattaaatttggatagttgaggaaaatgatgttgcccagagccacgtgatccaggtcctcactccaaactcaattcaaaagtatgttctggaaagctggtagggagctaaggtgggatctaacctgtctaacatcactgcctccaaaacactaaaactatattaatagcaaggagagtttagaagttatcagttactccaggatacgcccgggaaaaggaaacaagatcagccaaatactagaagctggaaaacagatggaagaatgggaactggcacagccagagaaagccaggatgtgagcggcactgggggaggctgtggctcttcaggtttgtgaggcagagagagtcctcagagacccaggaattggtgtccccagaactgaaggtgaaggggaccgtagggctgaaatcagtttgattgggtagaaaagcagagaagcagtgagacccctcgctctccttgtcttccacccagaggcctcaccctcctcagcagaggtctgggagttcattccctggagaggggaacagaaatctctggaggaaaagctgccaggcctggtgggggttatggctcccaccctataagtgactgtgcacactgcatgctgagggtataaaaacagaagtgaggggtgaaggacctcagatgtacacagaacacggtcctcaggtgtacacagaagtgagcacagatgccaggagaataggcacctgtggcccggtggaagggggtcattgaagcagagacccacgtggggatagagccattttggttctagggtgtgttgctgagagtgagtggtcccagtggagggaagatctttggagatgtggatgggggcccaggaattgagacagcacagtgttgatggaccacccacctggctctgcagatcaccccaacaactgcaggattgtgaagaggaagattgaggcaggtaccaaagtaaggagcctccctggagggcggtgctggcaatgccgtgaggggctttgattttgagtggtgctagccacagcagcgttagtccctcttgcgcctggaaggaaggcggatgtttgggctgacaggtcagctccagcctgacaaggtgttggcacatgggcaggtgttgttttctcctttagtcaccaggagttggcaggtgcagcaggcagctgtcagcaaggaagagcctgtgcttcagcccatgccatgctgcagggagcgaggcaagcccagtgggtctaaacgcagtggtctgaggtagatcgggtgggctttcacctccttctcagagctgatgtaactagtgcttatgcatcaactcgtgtgaccctcccacctgtgctccttttttttttttgagacggagtctcgctgtgtcgcccaggctggagtgcagtcgtgcagtcacggctcactgcaagctctgcctcccgggttcacgccattctcctgcctccggctcccaagtagctgggactacaggcgcccaccgccacgcccggctaattttcttttgtattttttagtagagacggggtttcaccggtagccagaatggtcttgatctcctaaccttgtgatccacccgcctcggcctcccaaagtgctgggattacaggcgtgagccactgtgcccagccccacctgtgctcttaaccaaatatttgttatttaccttttaaaacatttatgaaaaatttaaacctccaggtgtttagagtttctgttcactggttttaaaatgtcatttttagaacaggatggcctcattgccaagcactataggactccaaagcttccatttgaggctaaaggtagttctaggtgaatccacagtgtgtggatctgggttagacctgtgctccccatgctgcgctgtgtctgggactggtctgcatcgggaggctctggtggcaggccttgagtagtggaactctctagggtataaggtgctgggaaatcccaaagaggtgattagggcctccttgaggctttaacaagacaaacctcacagattgctctttttttcctcccttctctctcacttaaggagagatgatatttgcaagtctctttccagggacagaagttgaaatactgcagaattttgtaccttgtgttagtttcctgtcctaaaatcatgtctttgaaaaagtttgataactgcatctccagcttcacaggttggtggatcttctgctattggttttcatcgtggtttcctctttttcattccagctctattaccaggttttaaacttcgccatgatcgtgtcttctgcactcatgatatggaaaggcttgatcgtgctcacaggcagtgagagccccatcgtggtggtgctgaggtaggtcccccaggctggcctccagcctccaacctccatcacaaggctgccttgggcctgaggagcggggcagccttaagtgaaaacctgcgtgacagctaaaattcaagattttaattggataaattattagtctttattgatatctattttgaaaatgtttcgttttttttctggcttttgaaaaatctcatctttcttagtagacattttagagctttaaccatgttgatgctcgtgtacctaatccatttcaaatgacaatttaataatatgtggtattcctgcattatttctatacaaattgatttttaaacataactaaaaatgttacttcattttctttgtaccaaacaggcagagagagcctgtatccccagtgcgtagcattgtgtctagtatttttttcaagcttcttcagtaatactcgtgtattgatggctactatcttcttgagactatgatgcttataaaagtacagcatgtttattttagaaaagttaacattagagttaacttcacacagccataaagccatccaaggggaaaaacttaacatcaatttgaaatcaaatggccgtgtttgggaactgataggtgcttcaagacgctgtcggtccagtgtgtcttaggtcatcaaatctgttgttttcaaggtggcatggtaggctgtggcagtaactcgggcggagtcacagcctaccagtgcaggagttgaggctagaacacagggctcttagctcccaaaccagtgccctttccctccaccaggcgttgccaccacctcgtggggccatagccatgatccatgcctcaccaggccgccctcatgtggttggccaaggggcacacttctagagatcgcgttttcatgaatttagaagcctgaggacagcctagctcacagcagagctgtgggacctccgacccactcgtgttcacactgtgctttggggacgcccctggggttggggtgggtagattaggagtggggagaagggaagcacactcatggattcaggaagccttagccttgcttcacatgcaacagcaccaccttcatgtcttttatgtggttatacttcctggtaagatttcatgtgaaggaaggattttaaggcttttttttttttaaagaagaagaaatttaaaacctcaaatttagatggaccctctcccttaacagataagaaacctgaggcccaatgaggccaagcctcaagcatctcccagtaacttttggcagagccaacattagatctgagatttcctggccctcctcaaatctcacagacacacttgcacacagaaggtagtgtgaaattgctgcacttagggacttttttttttttaaagcatcctttgtaatgttaaagcaatttggtttgtcaacataaaccaatgacatccctaagggatgtgtggtttttgggggaatctggcccatgaggaaagcaagtagacattgatattagtgaaacattgaaaagaactcctctcctgataggacatgataatgacccttgatgtccaacttcaggacacctgtggcctctgcagtctgtgcagggatcttttcctagctgcagttcccttaaccgttacttttctatcaacatcttcccactgtatcttcaggaattttgttgaaggagtaaggatgaagccacagatgaaattatcttaagcattttagctttttttttttttttaacactgaaacaattatgttttatttcagagaagacaaaatagaatttcatattgtggggaggaaaaactcaattgttttgactgtgatgttttctcttaagtcagttgtatttctagcccttttcccccatcattcagattggctgattttgaatgcttcatccatgtccatacttagtggcactggtttcacttaaacgtaaacctatcagaaggtacttagtgacaggctgcatttctccctgccaccttctgcacctgctgagatgttcaaggtgggccaggctggaggggaaggagggccagcttcccgaactcctgttgggaggcatggttttctttgtttccactagagcaccacggagcttcagtggttcattctcctcaggttcttcctgctcagcagccattactcatccttggttgcacagcccccgtcaagctgtatttctaggtcttattttctcacgtattaaaacaaagcatgagcaaatacatataatgaatttttaaaatttcagcttccagcatatcgcaatttactttgaatccgccaaagattttggcacaggtttaaatcggtatcatgtggaattatttattgacttccacaataacccagtcaatgtttgttagaattgggcttttgtagaatatggtggaaaagatgctggtgcaggaggcaaaagacttgggttccggttttgtcccagccctcagtttggcatcagggcgggtcctgctccccaagtgcatccatgtgttcctcatttcttaagtaagtattgcagtatcctaagtgctggaggcctgctctaaagtgaagggattgccctagatgattaactagctgtcagcctgcagttctggaggaaaacactactatatttgtagatgcaggactttttttaaagctaaaaattggtagcttttacttcagagttgacaattatcctggtttcttttctacctgatacaaactgcagagggtcctgtcagtgctcatgacatgttaatctcagtagaagtcatttcctttcgcacatgttaccaccttgagcagttaagaaggaagccacattggctcgttttatagctcctgagacctacttgactattgagtttcacctctgacatgtctattctgatcgccttttggacacagggtaatgctgatactgactttgtgcttctttccagtggcagtatggagccggcctttcacagaggagacctcctgttcctcacaaatttccgggaagacccaatcagagctggtgaaatagttgtttttaaagttgaaggacgagacattccaatagttcacagagtaatcaaagttcatgaaaagtaaagaggctttatttccttttggttttgttatgtaaatttttggtagattcatggctaattagaaactagtaaaagcactggattatgttctgagttctgccattgactcactgggtgactttggaccaaatgcttaactctttctgtaggatgggagttgtagtagttaaacccatagtaactcacaaagtgattatgagaattaaatgaactaatgtttactaaagcaattcataaacttaaattgctgcacaaatataaggtatgatgtattatgacatgttagttatttgaaggagctcaaagaaaatcaagtcacattgcaacagaggatggttttgatatgaaaattattttctgaaatgcaaaaaaagctagctgtttttctatgttacttgggccaaagtggcattttcagcagtaatattagtcctggatggataaaaattcattttccaactcatctcatgatttggccgttgcatattctgcattacttttccaccgccccatcccctactccccaaacagccttgctgttaataccagctgtgacttacttatgaagacccttttctggaaccggaaacatttacttcttgctcaaatatataaagttgccatgagagagtacttcacatgattagtaaaaatgttacatttcatatacttggttattcatttacctttatgcagcttagtgtggatttttatctgtgtgagtcatagaattaaatttaggtatgcataggtatgtttttaaataatggagcatttctcactgtgtatgtgtgtgtgtgtgtttgagtttgagagagagcggtaactacttgtacatatctggtattagattcccattccattcactgcttctttttttgagatggagtctcacgctgtcacctacgctggagtgccatggtgcgatctctgctcactgcaacttccgcctcccgggttcaagcgattcttctgccccagcctctcgagtagctgggactacaagcatgcaccatcatgcctggctaatttttttttttttttttgaggctctgtctcctaggctggagtgcaatggcatgatctcagctcactgcagcctccacctcctgggttcaagcaattctcctccctcagcctctcaagtagctggaattacaggcatgtgccaccacacccggctaatttttgtatttttagtagagatggggtttcaccatgttggccaggctgatctcgaactcctgacctcaggtgatccatccgccttggcctcccaaagtgctaggattacaggtgtgagcaactgtgcccggcccatttactgcttcttcacaggtgtaccccacagatattgatacttattcacttcacattactctaaacatgagaacaatccagtttcaacctgtggtgatacactggtcctgtactaacggttacttgatgcctacctgttagattcctgaggaagaagcatcctcagtcatgatgtgacagtactcgcactgacttacaattaatttctaaagatgatcaattgttccaagttgaggaagtgttgattatttgctctaatttgcatgaattatgagagactgtcaggatttttatcccgatttcctttataaccgtggctgcaaatcagcttgctctttttgatatggtttcaaatctttgggggcttttggcattttatctcattataatagtgcattcttttttcatctgtcttactgaaagaagaccctctttacagctccataatactacaatattatgtttctagagtcaaggctatctgagtaccagtttagaatgcttaaaatgagtcccacatgtctctttaacacactggtgttatgccatttgtgattcttgtttccttgcaaatttgactttatactaccgtggtcagtggtgaaggaaataatgcagtaacaaattctgcatttggcaaggaaaaggaaatctgaggacagcctagagcacacttggatttaaattactttgtgctcaaatctgtgtgatctaggatcaagtttatgtctagagtgaagaggaatagcatccatgttaacaaattggtctatgaggctgggcgcggtggcttatgcctgtaatcccagcactttgggaggccaaggcgggtggatcacttgaggtcaggagttctagaccagcctggccaacgtggtgaaaccccatctctactaaaaatacaaaaattacctcggtgtggtggctgacacctgtaatcccagctactcagagacggaggcaggataatcgcttgaacctgggaggcagaggttgcagtgagctgagatcgcaccaaggcactccagcttgggtgacagagcaagactccatctcaaacaaacaaacaaataaataaacaaaaaaccaaattgttccatgaggcctaagaatgaaaacagttcaagtccaacacaggttgttaaaccagcttcatgacctgacttctgacctattctgacttgaggtgaatgaagtgagtctggaaaagctccttgtcagcagcgtttttgtgtgttatgaatctggacttgaaagaattgcacagaggtgattcacatgattttgcccactgatgaatgacactaatacacttgtttacaggttaaaaaatgtcaggtcctagtttattcgtcattcccagaagccatgtggtaagaaggaattcttcattgtgtgctgtgctggaagcaaattgttgcccttgtgcttggtcatgctttttgttgtcaaggatacttgagtgttttggaatttaagtctacaaaactgtcattagatttgtgcttcagttgaatggttgtcttaagcagtcatcttagactaaaggaaggtcaggttatctttgactgtttttctaaatgctcctgtctgacagtaaagtcttgagtaaactaatatttttgttaatgatgctgtgctgaaaataatttttgagaagacattattttgctttccagagataatggagacatcaaatttctgactaaaggagataataatgaagttgatgatagaggcttgtacaaagaaggccagaactggctggaaaagaaggacgtggtgggaagagcaagagggtgaggattcacctttaagttatatagaaggttatgaaaaacacttagaaatgaagaaattaaatcaataggctaatgagtcgttaattacaaatatgacatatcaggagagttttaagcagttctagtttatcctgtgaagactaaatacaacttagaaattcctaaagacctaaaatctaaaactgaacccaattatattatctatatgatgggttcaaatctgtttcaaaataaatccagccaggcgcagtggctcacacctgtaatcccagcacctttgggaggctgaggcaggaggatcacttgagcccaggagttccagaccagcctgagtaacatagggataccccatctctattaataaaaattttaaaaaatttgttctaaaaaaagaagaaatataaatcctcactgagagattagttatttgtggattttaaataaccattacaagaaagtctcccagagataaccactgtttaacatttcagggaatgctgtaggtactctctgggctggtacagatgtgtgttatgcatatatataattttacttagaatttgattatttttcacccaacaggaagttggaaatagcttttcgtgtcaaatctacatctgtatctttttaagtggctacaagctgttttattgcgaataattatttatttaaccaatccccttttggtggacacttagattatttcctgtttttcgcaactaaaaacatttctgtgatacatcttttagtattcatctttgtatagttgtccagcaatgagttctgcttctgattgacataacagagaatgtatcctcattaaaaaccaaacaagggaattcttcccctctcttggcaaccctttttatgtttaacagccattagaaatgtttttttatcttacctaaatctcactagctttttaaggctggagagactggctcccattttgtcaggtttagcgttattagtcagattgtggcttacagcttcttcctcctcctttaaccatttttctttgttgcattttcacttgaacatctccggggggaccaggagggcttccagttagtccatcctgtctttccagacactctggtgaaaggctttggataagagagaggatggaactactgatttataaaagactggagggtacctatgggtgtgttaccttgtttcccatgagcagagatgattgagacctgggtccatctgattacatattgctgttgattttgtgagcataatcgttggctggtttatgcactgaacctccttgctctgggatcataatcatatttgagtataagttatggtattcacatttgtatttgctacccaatacatttatttgttatatctgacaagcactgggaaatgaaaataattatttgcattacaaactcattattcatgtactttgaaagctttatctaacagcagtttttatatgggctatctgaatcttatcttctaaataaaaactagatttgtgaaagttgcctattctttttgtacaagcggcttaactattttaattgtagcaagtgaagacaaccagcatcactatctcaacccaagtgcctacttagaaaacttgtcctggctgccagtgctgatgctccttactaataaagctgtttgagacagggctgaatacatccttacagccctggtcagtggcattccctcgtacaattcatttcttaagactgatctatagtgttttcagatgttgccatcatcatgttataagcagcttttatatctcttgctttttatcccacaatttaggtttttaccatatgttggtatggtcaccataataatgaatgactatccaaaattcaaggtaggaatttatgtgtgtctatatttatttacttcgttaaatattggagcttttacttctgcaactgtaaacaggcagtcttcttaaaacatgttgccattaataggcctgcagaatatctgtagttaactacaaattaatgtagtcatttaaagcagcaacacttaaattatttaaaatagctactttccccttgtatgttcagtgttctaaaatggcatttatctaattgttgctttttattatggaaattttcatacacacacaaaagtagtaccataaaccagtaatgcttacctctcaacttcaacaaaaatggtatctctctctctctctaaatatatacacatatatgtatatatatacacacacatatatgtatacatatgtgtatatatatatattttttggacggaatctggctctgttgctcaggctggagtgcagtggcacaatttcggctcaccacaacctccgcctcccaggttcaggtgattctcctgcctcagcctccctagtggctgggattacaggtgcccgccaccacacccagctcatttctgtatttttagtagagacggggttttgccatgttgcacagcctggtctcgaactcctgacctcaggtgatctgcccgccttggcttcccaaagtgctgggattacaggcgtgtatccatattttttaaaaaaatcacttgacaaacaatgggaaacctgcgtaggagtaagcactgcatttgctgtgtttgttcattttctgatctttagtccatcagtatatttttgggtttttgaccataatgtagcattgaacagctcatttagagaacaagccatggggggaagaggtaatcttttgattctgtcctcagcgcagtatttaacggacttcatctgaatacatttacagaccaaatttctttgtagacctcacagtgattttccattgtgttttctttccagtatgctcttttggctgtaatgggtgcatatgtgttactaaaacgtgaatcctaaaatgagaagcagttcctgggaccagattgaaatgaattctgttgaaaaagagaaaaactaatatatttgagatgttccattttctgtataaaagggaacagtgtggagatgtttttgtcttgtccaaataaaagattcaccagtaaagatggttttcttttgtggactctgatttgaatctgctcaatctctctgccaattgtgggagactctacactgagtctgagggtctgcaccacttcaagaaccaggcaggctatttagggcctggcctgctagtggggcaaggcatggtccacatgtatagttgtaatgtctgagtttcaaaagtaaaattcttaatataatgacatttctggggggaaacaaaggggcccttaaaagaacacagtttcttattaaagtgtaatctgagaaactaagaaagtcaaaaccttttagaaggaagggatgtaatctgctttgttttgtggtatgatatatcttgagatagtttgttaaattatttgaaaagtgtttaattattaaaaatggtgcatactcctctgaaaagttgcaaaaactccagaagggtaaaagttgaaaattgcaaaaactacaaaaggtctctttcttcagtcttccctttctacttcccagggatacccaccattaaattagatatttgcactatatatagtcctgcagagaaagtagaccctctttcaagtatttatcaagcacttttacccagccactgtctgatgtgctggaggtacaaagtcccagccctgacggagctcacactggaataggaggaacagataacacacgagcctgtgatttcaggtactggtcattgctgtgaagaaagataaagcatgttaagcagatagagggtgacagaggacactgcttttcagatggaagtcagaggagacccctccaaggaggtgacattaagcagagttcaaagaaatgagagggagtggagcacgtaaatcccgggaagcgcattatagccaagtgcagaggccccgaaaagggagcgctgttggcgggctagagggttctcacactttaaggagtacacagccacctgtcttcttcactgctgatgtggactcaggaggtttggggtgagcctgactacgcacttctaacatgctcccagaggatgctcatgctgctggtgcccactttgcacagtgaaatgttagaggagtcaaaaggaggccagtgatgttttaaaatgcactcttcagttttacaaaaatgttctcttttcaccaaatacaatgatgttgacatcctttcaatcaggacttacaaatctacctcattcttttacgtttgttcaattctgatctaagaatttagtggccctaaaagtcacttaaccaccgatgtggcctccagtgagttacttaacttccctcagcctcagatggaggataagaactgcacttaccaaatggggctgtcatgagcaataagccgcatggtccttgacatgtccacagtatccgctcggtagacgttccctattgttgctcatgttttccctttcagtgtaaacctgtgtcacgcctgtatggttaattttcctgagtgagcgcctggcttggtaaggaccagcaggcgtgatccgctgggaacagcttgccctttaatcctttctctctactaaaataggctattgcaacaataatggacctcatcctgttgaaatcagcaaagtgaaagaaaaaaagatttacagaatactttctaaaaacattattctcttgtgccctttaatacattgttttcttaagaaaaaatggatttttttccccttacctaaaactggtattttaaaatgttgggtcaaaatcatattattttatcatcttcttgggcttctgtagttaaatttttaaaaaactcttatcatggctaagctttttggtaattctttgaacatgcctaacattctgaaatgagctttgcaaagacacctaagaaccctgacggggctcagccagtgccattgaattgtggattttagtgacaaagatgtcttttgacctccctgatgctgttggtccttataaaatgggagcgatggcaattaatgttggattgaagttcttttatctggggctctcagttgtagcctcagtgtctggaatgtatcaacacgaaccaaggatgtgtctgagcagacaaaatcagcactagaacatccaagctgcttgcagtttattcatcaggtagaacctcttattgggagcttctcagtgttcatgtgacacatttctcatgtggttacacaactgcttttccactttgcaacagcttagaagcatcagagtagagggtttctggtagacaatggccagacaggtaatacccactgaggaggaagaatacaaactataaaaaacagatgcaaggatttcaggatgctgcctggtgtatccacaaaggcgacactgtgttataagaagacacttaggaagaagttaaatggcgtttgccatactgcatttgagatcaatttaggttttcatccagactggcaagtttctactacggggtagggtgagcttcagttttttcaagaggtgagtggtggaacctctggttgatttcctaagccacaggcctgagtcctgctcttctacccctttaccccttgacaattaatatgttaacattatgcaaatgctagaaaaatagagctcctgcagacatgcacaaacactccaacaaccagactgtggacactaatccgcctgtctattgagattttggacctgccactgtccctgcaagtctgggcaaatgaagcattgttggcaagaggaagaagcctaacctttctaagttagcaaggtaagagaatctctaatttagaggaagcaaacttgggcatctgttctttaaaaaaacctccctaggttactaatgtgtggtcagtattgagaaccaccgagaaacagacgtctgcacacattagttgagaataaatgtgattaggatgcttgactgttcacatcttccttctcggcttcatgaagttattttcagattgcataaggaaaaaacagaaacacactgcatctatgtgtcatcctctcaccaccatttcccccactaagatgatgctaacctctgaatggtcacttgagttctaggtgagccttcatcttacaaagtagcctttggcccagggcactgggcgatcaacttagtctcatcctgagattctgggctgagatccatcctttaccacttgtgttcatcaggttctcttcatttcttttcttttttttttgagtcagagtctcgctttgttgcccaggctggagtgcagtggcgcgatcttggctcactgcaagctccaccgcccgggttcatgcccattctcctgcctcagcctcccgagtagctgggactacaggcacttgccaccatgcccagctaattttttatatttttagtagagatgagttttcaccgtgttagccaggatggtctcaatcccccgatctcgtgatccgcccaccttgacctcccaaagtgctgggattacaggcgtgagccactgcacccggccaggttctcttcatttcaaatgaggagtatggggtggggtaggatagaaggaggagttgggagtcacacaatgatttaagccctgcctcaacttaccaaacagggaatctttaacaaattcagactcagtttccctatctccagaattagcatcagggcaggtcaagagtttattggatgcctggatttaatcaaacagagctttactatttcttcttcaaggtcacttgagtttgagcacttagaattaattaaagcctcccaatcctcttgaacactcttctctgttgtctgtggtcataaaattctactcagattttctctgaattttaaatctgcccgcctagattgttgcagacatatcctatggcagggacattttttccccagggaccttgcttttagctgcatgaagcttcaggatggtgcagggggacagaaacctcttttacactgagtcttgtttctgcgccagttctgtgccggcggggagcgaacgctacctacacacgtgctgtggccaggccttcttctgtaggattccctctggcctccctctgttcttcattccatcacccaaacactgtctgtcatctgcctcttctcaggtttaatgatttccctactagtgtttagcttctgccatactgcaggatattttctttaataggccttattttttagagcagttttaggttcatagcaaaattgaatggcaagtatagaggtttcccatatacctcctacccctacataggcacagcctctactactacttaccaccccactagagtgattcatttgttacaatcaatgaacctacactgatgcatcattatcacccaaagtccatagttaacattgagatccactcgtcgtgctatacattctatggattgggacaaatgtgtaatgacatctatcctccatcatagcaccatacggaatagagtcatggccataaaaaattccctatgcttcacctattcagccctccctaccttcaaccaccgattatttttactgtctccagagttttcccttttccagtatgtcatatagttggaatcatggtatgtagccttttcagttaggctttttttttttccacttagtaatgtacatttaagttttctctatgtattttttctttttttgtttgaggcagagtcttgctctgtcacccaggctggagtgcagtggcacaacctcagtggtgcgggtttttgtatggacatcagttttcagactcacttgggtaaataccaagaaacaatccacgattggtggatcatatggtgactgtgtctagtttcgtaagaaacggccacactgtcttcccaagcaggtgtaccattttgcattcccaccagcgatgaatcagcttttgttgctctacatcctctccataatttggtgttctcagtgttttggattttggccattctaataggtatgtcatggtagctcattgttttaatttgcatttccctaatgacatatgatgttgaacatcttttcatatttatttgccatctgtataccttctttggtgaggtgtctgttcaggtcttttgcccttttttttgagacaaagtctcactcaggctggagtgcagtggtaccaagtagctgggattacaggtgccttccaccacgcccggctaatttttgtatttttagtagagacagggtttcaccatgttggccaggctggcctcaaacccctgacctcaagtgatccgcctgcctcggcctcccctgggataataggcctaagccaccatgcctggccccatttttaaatagggttattttcttactgttgagttttaagagttccttgtatatttggaataatagtcctttttcagatgtgtcttttgcatgtatattctcccagtctgttgctggtctcattctcttaacattgtcttttgcagagcagaggtttttaaattttaatggagtcttgcttaccaattatctctttagtggatcatacctttagggttatatctaaaaagtcatcaccatgtccaaggttacctagattttctcctgtgttatcttctaggagtttatagttttgtgttttacacttaggactgtgatgtattttgagttaatttttataggtggaagatcagtgtctagattgtttttgcatgtggacgtctagttcttccaacaccatttgttaaaaagactatcttttctccactgtattgcttttgctcctttgtcaaagatcagttggttatatttatatggatttctgagctgtctattctgttctattgatcaatttgtccattcttttaccaatactacctcgtcttgattactgtagctttatagtaagtcctcaagtcgggtagtgtcagtcttccagcttgcattttttccttaaatattgtattggctattctaggtcttttgcctctctctataaacttcagaattcgtttgtctatacccacatcatagcatttttattaagtgtttatgtctggagaaaacatgcaacttccattgccatattcctttgtaagtctcatttctcaaactcatctatgaggttgaattcctctcttttcaaaaatctcaacttaatttttatctgctttccctgatttgtgcaatggtatagaaacgcctgagtttcttcctctccctgagaattattgggagcttcctctgttatttttctgtttcactggacatgcctgatatcctttccagcatctggttaatttcttgtgtctgggtacacattccccctccctcttggttatcagtttcaacctctcttgattcgatcagtggatttaaaggcagatggattgattttgacttctcactaaagaaggaacagagcctaacagaatcagcctgccatttagagctcctcctacctggtggcacaaggaacagtcaactggaacttgatagtggattaaagacccaagggcagtcctgtgattcattctcaaatttcacaaatcatccttaagatggtacattttagtccctcatacctcatggtgtcacttcatacatggttcataggccagatgccttttcaattaacatgggaaacaaacatgaaaaaggacactgaaataccatttttcctacttttatcccaaaaatgttatgttttctactctgatttttagtggctaagtgaataaataaaatgctgtgaaatattttttaaactcaacaatggcccttacaaaagcttcctgacacgtgtgtagaaagtcatagtttacaaagggctggcttcttatttgctccctggccatcaggagcaaggcaggctgctgcactcaaaggcgttgaaagcaatctcgactataagacactaagtggaaaaacacttcccatggaaaatgccctcttctgtgtttttaaattttcttttcttttcctgtttgagttggagtctctttctgttgccaaacctggagtgcagtggtgcaatcttggctcactgcaacctctgcctcctgggttcaagcagttcctgcctcagcctcccgagtagctgagactacaggcacccaccaccacacccagctaatttttgtatttttagtagagaaggggttttgccatgttggccaggatggtcttgaacttctgagctcaggtgatccacccacctcggcctcccaaagtgttgggattacaggcgtgagccaccgtgccctactttaaattttcttttcttttcttttctttttccgagaccaagttttactctgttgcccaggcagagtgtagtggcatgatcttggctcactgcaacctccacctcctggattcaagccattcttgtgtctcagcctcctgagtggctgggactacaggcatgcaccaccacacccggctaatttttgtatttttaagagatggggtttcaccacgttggccaggctggtcttgaactcctgacctcaggtgatcctgcctgccttggcctcccaaagtgctgagattacaggcatgagccactgcacctggcctaaatttgattttcaaagaacctcttcagtctgttgcttccaagatgacctctctgaccacatgcttctcatgagaagagaagaagcttctcttacacatttctagacttcctcccagactgaataagatcctcaaggtggaaaatttagatgagaggatccttataaagcccaaagaagtgatggaacttctagggagttgtgaatgcctgatgtttaatatgtaatgccttctcgctttccaaatgcattttgatacaggaatctgttaggttcagttagcagaaccacccagaacactcctcaaggtattagactagagaatgacctggggttatctacaataatttcctgtttctcagaagcaaagaagacagaagtttggggagcaccaacattgaaagggtaagtggagaagtccacaaaggagcatgacgagaagtggctgaactgcaggaggaatccaggacagaggggtggtatggactcctccatcagaggggtgatatggactcgtcaacatcctccatatcacccagggtgggagagatctaggtatgtggccatgagatcatggaaaaaagaaaaagcatctcactggtgaccagggggagagttggtttaatggaggggcaggagtcagatttgggtgcggtgaagagtgaatgatgtcagaggctgatcaacattaacattttgttgagcattatatgcaaggtgctaaagccaccagccttggttttgatcctccatatactcatggcagcaattttctgttttattttgatagcccagacacctgatgcatttttcttactaaacaatcatagtcacaaactgtcagtgtacttggagtattgacattaatccgaagcttgcattgttgtatgatggcattcagggtctggggagccgtccaaagggctggatcttcccactttgttgttctcaaagagttctgctttggtgacaactatcataactcccccaggaacatatatccagtcactggatgaagtgttctctttcatgttacatttcacaggtgtgtttttgctactgagttaccccagagagcacatagcaagggctctcaaactttaatgaccataaataacgctaaaaaaatgcagattcacctttgatgtacatagatgcaaaaatccttgacaaaatactaacaaacaattcgataatacattaacaatcctaggctccattcccaaagattctgacaaggcagaaggtccagagctctcaagaaaaaaaaaaaatcattgccatgaaagaagtggccttcacacacgtttgttttgttgttgttgttgtaagttagggaccagcagaggctaaatgtgattgtctctaaagtcagggtcattttataattatgaaggtatcaattcagcaagaggatgtgacaattgtaaatatatatgcacccaacactggagcatccagatatatgaaacaaatatcactggagccaaaaagagagacagaccccaatacaataatagttagggacttcacactccactttcagcattggaaagatcatctatatagaaaatcaacaaagaaagatcgaacttgatctacactacagaccaactgaacctaaaagacatgtacagaacatttttatccaacagctgcagaatacacatttttctcctcagcacacggaactttctcgaggctagaccatatgttaggtcccaaaacaagtctcaaataattttaaaaaattaaaattatatcaagtatcttttctgaccacaatggaataaaagtagaaatccataactagaggaactttgaaaaccacacaaatacatggaaattaaacatgctcctgaatggctactggtcatgaaaaaggaaattttaaaatttcctgaaacaaatgaaaatggaaacacaccatacccaaacctgtgatacagcaaaagcaatataaagaggaacatttatagcaataaacacctacatcaaaagtacagaaagacttcaaataaataacctaactagaaaagcaagagcaaaccaaaggcaaaattactagaaaaatttatgatcagagctgaaatttaaaaattgagactaaagaaaactacaaaacatcaatgaaagaaagtttttttttttaaaaaaataggtaaacaaggttgctgtttgaactcttgtgaaggtggcttgcactgccgtgaggttcccggccaagcaggacaggtttatttgtatctatcctgcttttttaaataataagaagaccatcgcagagggaaggcgaatccccataagtaaggctgttgaaaatcctacagctacagagattcaagatgtatgttcagaagttggacttaacgtatttcttgagaaaaattaaatgtactctagagaatggaatcgtgatgtccaatacagaggcagctcaaacaggtccagctcaaacaggaccagctcaaacggctccagctcaaacaggaagatggcggcctctgccttgtacagttcccatcatgtaagtcagtaatgttgtatgcagcagaaataatacctaaactaaaacgaaggacacaaaaaacaggaggaggtgaccaaagtcttcaacaaggagagggaagtaaaaaagggaaagggaagaaaaagaagtaacctagtgtcagcatcaagtttgtggtactactgtcagagacatgaatggaggcttcgaatttgtattggaggaaaacagaagctttttgtttgcgtcatttaactgagctgtgaacccttgtgcctctcctctttattatcgaagttgacagtgaaacaaatttacatcagaagtttgcatctcgctttcatgaagtataaaagaagtttttagtctttcagtgcagttatttggaagaacaaatatttttaaatggacaatggacggtacaataagttacttgaaataagttacttgtttcagataaatttcaattagatttgaaataaacattttgtcttttaagttaatgaaataaaatttgaaactgaaaaaaacaataggtaaacaaaattggcaaacctttagccatattaagaaaaaaagagagaaggcccaaatagacaaaaggagatattacaactgttaccacaggaattgaaaggatcatcacagactattatgagcaactatatgccaatgaattggaaaaagtagaagaaatggataaaagctctcagcaaactgcatatagaaagaatatacctcaacacaacacggaccatatttgacaaacccacagctaatataatactgaacagggaaaactgaaaacattccttaagatctagaacaaggaaaggatgtccagtttcaccacttctattcaacatagtactagaagtcttagccagagcaattaaataagagagaaataaaggacatccatattagaaaagcagatatcaagttatccttgtttcagatgacatgatattatatttagaaaaacctaaagattccaccaaaaaaactattagaactgtaaattcaataaaattgcaggatacaaaattaacttacaaaaatcagtagcatttctatatgccaacagtgaactgtctgtagaagaaaccaagaaagcaattccatttaccatagctacacataaaataaaagagccagacccatagtttgtacctgtaatcctagccactcaggaggctgaggcaaaaggatcgcttgagcccaggagttcaaggttgcagctacatgtgatcaccccactgcactccagcctgggtgacagagtgagatccccatctctaaaaaaaaaaaaaataatgataataaaataaaatatctagtaataaacttaaagaagtgaaagatctctacaatgaaaattataaaacatcgatgaaagaaattgaagcagataccaaaaaatggaaagattccatgttcatggattgtaagaaacaatattgaaaatgtccatagtacccaagcaatttatggactcaacgcagtccctatcaaaataccaatgacattcttcacataaaggaaaaaacaatcctaacatttatatggaactgtagaagaccccaagtagtgaaaggaatcctgatttaaaaaaagaacaaagcagctgggcgcggtggctaacacctgtaatcccagcaatttgggaggccgagacgggcggatcacaaggtcaggagatcgagatcatcctggctaacatgatgaaaccccatctctactaaaaatacaaaaaattagccaggcatggtggcgggcacctgtagtcccagctactcgaggggctgaggcaggagaatggcgtgaacccaggaggccgagcttgcagtaagccgagatctctcctctgcactacagcctgggcgacagagcgagactccctctcaaaaaaaaaaacaaaaaaaaacaaaaagaacaaagctggggtatcatgttacctacataatacaaagctgtactaactaaaacagcagagtgctggcataaagacagacatatagacccgtggaacagaatagagaacccagaaataaatccacatatttacagccaattaatttttgacaaaggtgccaggaacgtacattggggaaaggacaggctcttcaatcaatggtgctgggcaaactggatgtccatatgcagaagaataaaacttgacccctatttctcaatatatacaaaaataaaatctaaacagattaaaagttaaatctaagacctgaaactatgaaactcctaggagaaaacattggagtaattctccaggacgttggtctgggcaaagatttcatgagtaaaacctcataagcacaggcaacgaatgcagaaatgggcaaatgaggtcacataaagctaaaaagcttccacacagcaaaggaaacaatgaacaaagagacaagctaagaatgggagaaaatatttgcaagttattcaattgaaaagggaacaataaccagaatatataaggaactcaactcaatcacaaaaaataatattatatataaatgggcaaaagatatggacagacatttctcaaaagacaacttacaaatggccaataggtatatttaaaaaatggtcaacattactaatcatcagggaaatgaaaatcaaaaccgcaatgaagtgtcacctcacttcaggtaaaacggcttttagccaaaagacaaaaaatgtcagatgctggtgaagatgtgaagaaaaaggaatgctcatatactgttggtgagaatgtaaattatcacagccactgtgaaaaacagtatggaggtccctcaaaaaactaaaagtagaactattaaatgattcagcaattccactgctgagtatgtagccaaaataaaataactcagtatgtcaaagagatatctgtgccctgtgtttattgcagcactattcacaatagccaagatatggaatcaacttaagtgtctacaatagataaattgaaacaatgatacatatacaaaatggaatattactcagccataaaaagaattaaatcctgtcatttgcaacaacgtggatagactgggaggacatgaggttgaatgaaataaaccaggtacagaaaacaaatattacatattctcactcatgtgtgggagataaaaaaattgatcttgtggaggtaaaaagtagaatgatggtcacaagaggctgggaaaggtagtggggagtggggagataaagagggctttgttaatgggtacaaaaatacagtcatatagaaggaataagagctattgtttgatactacaatagggtgaatatagttaaaaataacattgtatatttcaaaataactagaggattggaattggaatgcttctaacaaaaagaaaaggtaaatatttgaggtgatggatatcccaattaccctgttcattacacatcatatgcttatatcaaaatatcacatgtgctcactaaatatgtatgactattatgtatccataaaattttttttaaaataaaaataaatggtcagatttaggatacactttgaagggtttttggcctgagaaacttcaaggataatgttgtcatttatccagatggtgaagattgtgagtggaaattagatatttggtttgggacacagtaagtctgtgatgctattaaacactcaagttgagatgttgagccggcagttgtatgtacgtatgttcagggatgagtttgaggctggagatataaacttagcagttgttaggttaatgatactatttaaaagccataaaactggatgagattatcaaaggaatgaatgtagatatttctttatgcctgaaaaacttcaactatttttatagtgcaggcctgcttacagtgaattctttcagcttctatttgctgaaaaagtcttcatttgctttgattttgaagaatatttttgctggataaagaaacctagattgacaggtatgggtttttttcagtttttaaaaaatgaacttccattatattatggcttacataatttcgaacataaagtctgctgttatccttatctttgttccactgaacataatgcatcttttttcccctggctacttaaaaatttttctgtttattacttgtattcatcagtttgcatgtgatgatctctgacatgggtttatttacttcattggagttcactgggtttcttgaacctgtgggttttagtcaagtttggaccattttgggccattattttttccattttttcctgtctagttctctgtcctctctgggactccagtcacacatatgtcgaacatcccacaggtaacagatgctttaattttttgtctttttttcctgtgcttcattttgagtaatttatacactatgttttcaagactactgatcttttcctctgcagtgtgtaatctactggtaatctcatccaatgtgttttttacttcagtttttttttttttacctctagatatatttttaaacgtgtattttgtttccgtcatcattatgacaatgttttcctttaccttcttgagtataagaaacagattcataaaagctcttttaatgtccttgacatccattatgtctgtcattttggggcctgtgatattgaattttttcttctcattttcgattataattttctgatgctttggatacctgggaattttttatttggtaccagacatttcaaatttgtttctgggcactagactttgttgtattcttttgaatatttttttttcttttgagacttgctcttaagctctgttaaggtggttttagtctatcttttggcccagggctaatgtaagcccactgctaagatgatacccttctgaggattctaaatgatgacccacgtttacaaggtcattccactctggctggagggagtacaagctattccagtcctgcctgcacttcattaattgttttgtgtgctccttttaggtggttctttccctgctctttttctcatgtatatgcaggttagttctcagtcaaaaatttaagaggacccctctgcagatttccagagctctctctgtgcagctctcttctctctagtactctgtcccacacattctagccatcttgacctctctgaactgtgagccctatcttctctagtcttcaagattattgggctctttctgggtttctcctccatatgctgtggtctggaaactgtctctaggcaataagcttgtgcaataatagggctcatcttgttccttttctgagattacaggcttgcactgcctgttgtctagtgtgtaaagatattgtttcattattttatccagttttctagttgcttaaagtgagaggataaatcttgctcctattcactttgctttgttcagaagtagaaattattttttaaaatcctagttttatcaccacctaatattttttaacttgttgtattttatgtgatatatctatccagtctaagttgcaaataacagaaactaattctcatccaaccagaaaaacaattttctggaagggtttttagtaacccaccaaattgctatggaagcaagagatccagtctcagaaaatggaggaagagagggaggttaaattttcaaaaccttattaaaaaaaaaaaaaaggtgaggctactaacagtcctatgaatatactgtgtctaccactttagatcacatgattctggtacttttatcagtaaccatgagctctggacagtgggtgcagtcagaggcatggcatccacagtgtctctggagatgagatgtgcgtgccttggccatcttctttctctgcttcttcagagacaaaaagtccagatgggttacatttgattgactgagacttggtgacatgcttatgccctgatgaaaggaaggctgagaaataaaatagctcagattttcagtttttatagtgggaggaagtctctacctcccactatatggtataactcatatggtagagttagaggaagacgtagaaacaggttccaataatgaggcatatggcacgtacataaacacgtgacctgttcttccagataatgagagtgtaatcaaaacatcatatttgtgactattttatgaagggtcatggatatgcacaaaaggaggatactgctttccattctattgtcttgtgacctctgtgcagtctaattgtacctgtgtacccaatttccttttcagtggctttcttcctctagctagagaaactattagctgcaaaggtcagagaacacgaccgagtctttctttgtgtccctgaggatagcccagaactttgttgatgggcttcaagttgctaacccaggaaatggaggatacattcatactatgcttgaatctgtctggcttgtttttggtggaaaagacaaagtccagaggacaaggatggactccaggtagtttgccttactttgctggacattctgagggacccgcacccttcagtatggggctcagaataactctagggtagtaatgcctacaggccctttgcacattggtccagggacctgggaacaaacttgtgaaatagagaggctcccagggcacagagtcacattacctccctctgctctcttctaggcttccccacaattcaggaacatcaaagaaatgccctcaactgccagactgcgggacaacttaggctgtcctctcatgccctctgtgactataaaagtaggtctggtagaagagcagtcactgggaccacctccttaggatgacagcccaagtcccttctctcatgaccagcatcctctgtagtgagttcttagcagcttcccactcaggcctgctcttgagcgcaaaataaaatgctttatttcaagcatgcaaattcttaggcagcagagatgtaaccaccccagcctgggcccacgtaagatcatggctcccctctcctctccgtgtacaaggcttcctttgtttaaagctcatagatccatcttttgaaactgtgctttcattgatgagaaaagataccagctcaattccatgccagaggaattctattcttaaaaatgttttatgggccgggtgcggtggctcacgcctgtaatcccagcaccttggaaggccgaggcgggcggaacatgaggtcaagagatcgagaccatcctggccaacatggtgaaaccccgttgtctctactaaaaatacaaaaattagctgggcgtgctgacatgcacctgtagtcccagctgctcagaaggctgaggctggagaattgcttgaacctgggaggtggaggttgcagtgagccgagatcacaccattgcactccagcctggcaacagagtgagactctgtctcaaaaaaaaaaaaaaaaaaaaagttttatcttcttgacactttaaattattaatctccaaagtctactatctggtagtagatagtagtttgaaacacagttttcctgggagccctctgcagatctttgaaagcagcatctacagaatcttaaattatttcactatggagggaagacaaaccacctacatctgtgtgactacggcacccagcttcattcctccagtagaaacttggagatttctagatcctgggttcctgtgttgggacccagatcctgctctcagatattctttgttgttcttgttccttctgtcccacagcatgtctgaggtccttcctctgcttcctaagaaagccaggcagccctggttcctaagaaaacaagttccttctgtggtgttgaattaagtagcaagagggcctgaaagataaaatcctctagctcagcctgcctctgccccttctctttccagaagcatttcctaaaacatttaagccacattgacacaggtggcctcagttcttagttcatttaaataaattttttatcatttttaatttaactttattttattttttatttttattttttttagcaacagagtctcactctgtttcccaggatggagtgcagtggcatgatcatacttcattatagcctccaactccctgggtcaagcaatccttccacctcagccttctaagtagctgggactacaggcgtgcactaccaggcctggctaattttacaattttcttttgtggagacagggtctccctatcttgcttaggctgtctcagtcctgataattaagtgatatgggcacagggtgtcaagtctcaatgcacagctgtgacaagcctgggccgatcagcctggaggtggaaagaagcgggaggggcagggaggctttccctggtgttcgcacccacaaggtgctgtctagagtctgggaggaggtgggcaggggggtggtgtcagccagaggcttcaaacactgggacactgctccacatctgtactgtgtgtaactgtccatttattcttgaccaggtattcacttgccctttacgttctcggcattctgctagggctgtggggattgatccaggctctgccctaaaaaaagccaaaaaaaaaaaaaaaatccttgggcaccctctccacccacctctagatgtcttttggtcctcacaggtcctgtggggcttccccaggttgcctcttctgggtctcataccttgaaggcatagctcctaaccaaataggcaaaaacatagtcacgaataggggcttaacgtctgtctccaatctccatgggaggtaacacagatggggtcagtgcagataccttgatagctaaggtagggaaatttggggagcaggggctgtaaattctctaagtccattaagtcacacatttacgtttatcgaacacagggatttgtctaattaactgagtttagacagcatcttgcacagtggcccatgctgacaagcttggcttcccacacccattggaaattgatgttatatgaaaatgccttggctcccatccatgctgtggctgcaccctcacgcacacacataccctacgtatatgcacatatgtggcttttgatgcatgggttagcttaaaatctcagtccaaattggtcaaataaaaaaatcaaaataacaaatttgtgtcattcaggcaactgctaggaacttacaaaatgagaaatcactgcaaggactatgacagtaaggtgtaaaatggagattaaggggtttaagaggaaatttgaaaaacaagtagccgaagataaagaggtaagtaacaaattgtctgggagtggagctccagacagttcctgtaattctccctggctatagattgagcaacctgggcccagcactggcagagtatacaccacagcaggtataccagggagctgggatgggctttcccgtcagaagtgcctctcaccagcagccacggtagatggctgctaggacctcgagtggtgcacactcctttgcacttggagtcatcctgcctctcccccatctcttgtcgtttccagcttttgccaggtggggagttaggcgcaagaaaggaaaagaggccggaagtgggaaggaagcagctagagtagacccaggactttctaacagctatcattttctaagagtttcctatccttagtggttttcagccgtggcccgttagaattatctgggtgctttgggaggctgaggaggaagaatcacttgaggccaagaggttgaaaccaacatgggcaacaaagtgagaccccccccccccacccatctccacaaaaatatacaaaaattagctgagcttggtggagcatgcctgtagtcccagctattcaggaggctgaggtggcaggatcacttgagactgggagttccatgctgcagtgagctgtgatcacaccactgcactccggcctgtgcaacaaagagagaccctgtctcaataataataataataataataataataataataataataataatcagggtttctggccccaaccagtttatttgaaagacagtctttgcaggggggaccaggcattctatctcttcaagcttctgggtgactgtcatgggcagccagggttgaacgtcacaatgtaaaaacagctttcttacctctggtggaggagaagtggtctccattaagcaggtcagggattcctcttccaggggatattactaggacaagtgatccctgcatctctagccctgtcgactgcgagaatttctagatggtgttctacccacctcacctttgccatggagcaaagatcccctcagaggcagcccctccctgagagccacctgcttcactcacttcctccttgcagcattctcttcaaatccctctctctttatggcaaagcaatatctgagaatctgagaagcgcacctcagtgttatgtgtatgaagttgaggaaggtagtatcttagttcattgagctgctgtagcaataccatacaatcagtagattttaaacaacagaaactgatttctcagccaggcttagtggctcatgcctgtaatcccagcactttgaaaggccaagatgggaggatcacttgagctcaggagttcaagaccagcccgggcaacatagtaagacccaatctatacaaaaataaaaaaaaaaaatagccaggtctggtggtgcacacctgtagtcccagctacttgggaggctgaggtaagagggttgctcaaaccagagagttcaaggctgcattgagctgtgatcacaccactgcactccagcctgggtgacagagtaagaccgtgtcagaaaagaaaagagcgaaagaaaaagaaaagattgattactcacagttctagaggataggaggtccaagatgaaagcacctgcaggttcagtgtctggtgaggtgtcttcctgattcctagatggccatcatctccctgtgtcctcacagggtagaaggggctggggaagctctctggggttccttttacaagggcacaaatcccatccatgaaggctcagtcctcatgacttaatcacctcccaaaggccccacctcctaataccatcacactggggcttagatttcaacatacgaatttggggagacacagacattcagcctttagcaggtaggaaggttagcactttggttcccacacatataaacgcccctaagtcagtgcttctcagaacttcactgtgcataggaatcacttggggatcttgttaaagcgcagattctgctttagaagttctgggatggagctgcgggtctgcatttctaacgagctcccaggcagtgctgctgccgttggtcagtggacccacgtggaatagccaggctccaggatgctatcaccttccagcctttcctctggaggttttggggtttctacttgaacctactgggtcagacggcctcataggaaagggtaccagaatgagaaaaacctgagatcctcactggtggtaggatgtgctgtattgatttggctcagaatacactgagacaagagcccaggtgaaaagtgtttcttctcctcgctgggtaacagagccatgaggctcatccgcagaaaatcaaccacgacctaaaggcaacatggaaagagagtgtctcctgtccatgcccttctgtgactgcccagtcaagaacaccctctgtacccatgctcacctgatcatactgggatcatctgctgtgatcagccctcccactgcgtgctggttcttaccttgtttccttggagctccagggtacaatctctgttagtctggagctgagagggtgcttactaattacatttattgggtgaacgtggatgaaacaatctgcttgaatcttgtaatctatgtttctattggcaccagccccaggacagggtgtgtcatttgacaggaggtactaagcaggactccatattgaaaacactccatgacagctaccactaaaggaattttcaaatttcattttttccccaaacactgcctttcttagctgctgagttttctgtgtctcatctgcatggagcctcttcccccggaaaagggattaggcagggcctgggcgaccctccaaggaaggcggaggctatttgcatctctaaccacaaggaaattactcctgacagcccaaagtaaagcagaaatattaagaaccatggagtgacgttcctgtaccagaagaaaaatggaagattataaaaagttttagaggccagagcacagcagtaaattgtagattatgaatatatatttaaagtctgcatgaaagtcagtggccttttttcctcagaatttgcaaaagtgtgttttcgatgggctgtttcagagttttttgattatgatagcttaacatatgacgtttctaatttccttatgttattgtccttcagaaacactggctctatctccattttaaaattccacacaaaaaaaaagacaggtaatttgcacatttaggaatgtattacccagtttttaaatggtccagacatttgagttttcctgatacctgcttctggctaatgtatgcaaaagaagaagagcgaagggagataaaattcaaatcgatatactttgtacccacttatgaaaagctctggtgaaaaatatgtggacctgaaagaatgcagaggtgactctctattgctactcaccctgaggccttggggttctcggtgatggattcagggcttcttctctggccactgttgggtgatattggtgatatacacacaggaggttaatttgttggagccaaaaactacgcatgagtacaacaataataaatattactttaagttaaaaaatgaatcccggccaggcacggtggctcatgcctgtaatcccagcactttgggaggccgaggtgggtggatcacctgaggtcaggagtttgagaccagcctgaccaacatggtgaatccctgtctctactaaaaatacaaaattagctgggtgtggtggcgcatgtctgtaatcccagctactcaggaggctgaggcaggagaatcgcttgaacctgggaggcagaggttgtggtgagccgagatcacgccattgcactccagcctgggcaacaaaagtgaaactctgtctcaaaaagtgaaaaaataaaatgaatccgtctggcacagtggctcacccctgtaatcctagcgctttgggaggccgaggcgggcagatcacttgaggtcaggagtttgaaaccagcctggccaacatgttaaaatcccatctctactaaaaatacaaaaatattagctgggcgtgatggcgggtgccttaatcccagctacttgggtggctgaggcaggagaattgcttgaacccaggaggcggaggttgcagtgagccaagattgcaccattgcactccagcctgggtgacagagtgagaatccatctccaaaaaaaaaaacaaatctatccataacacctcatttttactgtccagtaccaaggcgttttggtggttttcctgtgtgagcctgcaaattaattatgggtcagcatgcactagaacactacctggttcctgcaatatgcgaaagtaaaacctcccctgtgtgggaatttaagtcgatctttgcttgctgaaagggtagcagtgactttaataaacaccaactcttttttttttttttaagagatggggtctcgctctgttgtccaggctggaatgctcattgccagcctcaaattcgtgggctcaagtgatccccccactcagtacctgtgactacgggcatgtgccaccatgcctggctaattaaaaaaattttttttgtaaacacaaggtctggctttgttgcccaggctgtcttgaactcctggtttcacgtgatcctcctgcctcggcctcccaaagtattgggattgcgggggtgagccaccatgtctggcccaaacttttttagaccaatgaatatcttgccaaaacgtgtaaatattaaataacatgaattaatgaatgtaatcctttaatttcccagtcttacacaaagcctggtgtctttagctatgacatttaagtagctgaaatcaaatatataattaaattctgcaagaaaataaaacggaaactcagataccttggaataattacactgaagatgttagcaattctctgtcttgttattattggagttggcccttaggaatgctttcctctggctgggaataccagctgcaaacataaaatctcacttgggactactccttcccttaagggtaatttgtcccagctgtaatgtgggtagcattagagaagtcaggttaaattttgcacagaggagattaaaggctcaggatagtgatatataggatatatattttgatggagggttgggaagatgtggtataagtgcacttggagttgctgcaataccatcctgagtgcctggggagagtaccaaaatggggaggtgattggatgctggtggcaagaataacgctttgaagacattctgtctcataagcgccacctctgcaccaaacactagcagatgctgccctgcggggctcttggttataacaggcagagctagtctggggttcagttcctggggaactgcagggattaagaatgctatgagaggctgggtatagtggctcacacctgtaaccccagcactttgggaggccgaggaaggcagatcacttgaggtcaggagtttgagaccagcctggccaacatggcgaaaagctgtctttactaaaagtacaaaaattagccaggcatggtggtgtgcacctgtaatcccagctactcaggaggctgaggcagaagaatcacttgaaccgggaggtggaggttgcagtgagccgagatggtgctactgctctttagcctgggcgagagagtgagtgagagtctgtctcaaaaaatacaaaaataaaaaataaaaagaagaatgctatgagatagggaaatggaaccagggtcttggactgaatgcaaagcaggagtaagcttcccccatgtgaataaaaaggctggaaaaagctgtagcaagagttgattaaggttctgttttttttcatagctgcatgcccaaaaaggaaggtaggaggacattaacacatcctttctcacaggaccttcgctacgctgctacctgattctgtgtctggctttgcagtatctcaaggcttttataaaagctggttctggactgtttactatggggacgtggagagtcggtggggacagcagcaaagccaccagagaagcctcctagaaaagatgaaactacaacccaaaattcggaacttgaacaggaaaataaataccaggaagatcaatttaattaactgactcccttggaaattaaaatattaattaaaagtttaaaggattttaagtcattatgtttaagattgttaaaggcaaatgaaggaaaaccaactataaaaatcaacattaattaggcacaaatggatgaaaaacaggagtgtatgaaaaacaaggaatttgaaatctaggaaataaaagtatgctgatgataattaaagactcaagggataggatatactagactagatacaggtgaagagataactaatacattcaaggtaacactacgtaatgctcctgagtgcaggccagagaaacgaagagacacagaaagaaaaaacaagaaacaggtagacacagaagctagagtgagagactacaacatgcaccaataaagagtcaagaaagtacaaaagaggaaattccagagaagcattatttgaagatcttattccagaatactccagaactgaataaagtcatgaaccctcaccataaagatattctgtatgtactgagaaaagtaaataaaattaaatctttacctagacatatctgtgaaactgaagaacatcaatgatagaaaaatctttggagtcatcagggagaaatgacttgttacctacaaagtggcatttaggttaaaagacgacttcttggccagacactgtggctcacgcctgtaatcccagcactttgggaggccgaggcgggtggattacgaggtcgggagttcgagaccagcctggccaacatggtgaaaccctatctctaccaaaaatacaaaaattagctggacgtggtggcacgtgcctgcaattctagctactcgggaggctgaggcaggagaatggcttgaacctgagaggcggaggttgccgtgagccgagatcgtgccactgcactccagcctgagcaaaaagggtgcaactccaactaaaaaaaaaaaaaaagacttatccacaacagtctattctagaacttcgtgaagtgaaatttttacgggctggaaaaatatctgttagggctagggccagacatggtggctcacacctgtaatcccagcactttgggaggccaaggtgggtggatcaaaaggtcaggagttcaagaccagcctggccaatatggtgaaccccccccgcccgtctctactaaaaatacaaaaattagctgggcatggtggcgtgcacctgtagtcccagctactgtggaggctgaggcaggagaattgcttgaacccaggaggtggaggttgcagtgagctgagatagtgccattgcattccagcctgggtgacagagtgagattcctctcaaaaaaagaaaaaaaaaatctgttaatatggaattctacctagctttactatcgcacatgagtagggacacactgatgagctttgtagacagaggacgactaagggcattttaattaattattgagtactaaaagataaaaaataatgagcacagttttgtgcattttattttctttaaagatgaagctctggacaataacaagaagaaacaggcatgcatatgtcagttccccattgagtataagctccctaagagacaggagttttgctgttctctgctatcccttcaccttcaatccttagcacagcccctatcacataggaggtgtttggaaagtatttgttgaatgagtaaacgaatgaagtagggtagcagcagagatttaatgggcaagtatacccaggtatttgtgttgttctagaaagaactagagatactgataagcttgacccattgttagaaataaataaggttaatgctacaagaatgaaatatcaataagagcttctgaaacaggagaggaaaacaaagagaacataaaaatctttattagcccaacagaaagcagagaagaaagagaagtaaaaagttggtaaagagaaaccagatggtagaaataattcaaatgcaacagtaatcacagtagatataaattgaatcagcctacctattaaaggacagggaccatccaattagattaacacaaaagagcaatgatgataattataatgaaccaagtccagagaatttctaaaacaaagttaccagtgaaagattaaaaagaaaagttttggaaatgatattcaaggcacatatttgtcaaaggaaacttttacaatattaatatcaaataaatagaatttaatttaaaaaggttactaaggataaagaaagacactacatcatatacaaaacaatgcatgcagccaacataatcttgtatgtatctaacacacaaccctgaaatatatcaagtaaaaactaaaagaattacgagtaacaaaaccagagtggaaaattttaacaacctttatcagagattgctagatgggctaggctcagtggctcatggctgtaatcccagcattttgggaggccaaggcgggtggatcacctgagttcaggaatttgagaccagcctggtcaacacggtgaaaccccgactctactaaaaatacaaaaaaaaaaaaaaaaaaaaagttagccgggtgtggtggtgcatgcctgtgatcccaactactactactacttgggaggctgaggcaagagaatcgtttgaacccgggaggcagaggttgcagtgagctgagatcatgccactgcactccagcctgcaccacagagtgagactccatgtcaaaaaaagaaaaaaaattaaaacgtctatggaagatctgttcaaagtgatgcataattagagagatctgcatccaaaaaaacaaaaaaaaaaacaaaaagaaagaaaatatatactcttttaaagaacacctgaaacattaagaaaaggattacatatcaggactcaattttcaaacaagtttctattattactattgttaaaggaaattaactggaaaatcaagtaaagatgtccacatatttggaaactgaagcatgcactcctaaagaactcatggcttaaacatcattccatgatggacaggaaaagatcattagaactgatggcagtagcagactcacatatggtgagctacaattgcaatatacactgatgatacctagaggtgaatttatagccttatacttaatttttttaaattttactgtaagttctgggatacatgtgctgaacgtgcaggtttagtatatacgtatatatgtgccatggtggtttgctgcacctataaacctgccatctagtttttaagctccgcatgcgttaggtatttgtcctaatagcctcatacttacattaagaaaataaagatgaaaaacatatgaattcttaaatttaagaatctaggaaaaggacagaagagaagacccaaagaacattgaagaaacataataataaaattaagagagaaaattaataaaatagcaaacaaacagtagagaaggtcaaacaacatccaagtggttctttaaaaagacacataaaatagaaaatatttggcaagattgaacaaaattaactgtatgaccaaaacaaaactagtaagggatgaaaacaggtacagcagatttttgaaatcattagtaaatacctggataattttaggtaaaaaagtgaatatacagggaagaatgataatttcctagaaatatacaaattatcaaaattaacttaagaataaagagaaagtctaagtaaataacaacaaaaatcattttaaaaattaaataaccagacaaatacctctgcccccatagatgcagatcgttttataagtgcattttacatcatagtcaggaaccgataatttatatattctacaaactttttcagaaaatagaaaaagagaatgaattattaggtataatagtgagagaagtcacttccactcctatcccttgattcctgggcccaagagttctggatgtgggagagacagacctaatattagtctctgattcaaagtttatacatatcctttaagatagaacaccatactttccaggtgccatattccaattggtgctgtaacttagtcttcaagaaaacattcaggctttccatcaggccagtcatctctaagtggtagggtatgtagcaagagtagttggttccacaggcatgagcccattgctctgaaatgggttcctccatcagaggcaatgctgttccataatagtgaataaggcatctgtgagcatggtgtgacagaaacgcaacaggccgagaaggcacatccatattcagaacacttgtttgttcaagttagacaaatccctgccctccccatgataggagaggtccagtgtaccaatgaatggcacgatattgagtcaatgtagtctctgctgttagaagatgaagcactcatcaggagcattagccagatcaaccttggcagagggaagtccgtatcatgagcctatgcagagcctccatacctattaccacagccacttcgttcatggtcccactgagtaagcactggggcagctagggaaagaggcagactgatatcctcagagcccatcactttgcagattattttgcagaggctcctctgcagtagatgcctgtattagcctgttctcacactgctaataaagacatacttgagactgggtaatttataaaggaaagaggtttaaatgactcacagtttcacatggctggggagtcctcacaatcatggctgaaggcaaaggaggagcaaagtcatgtcttgcatggtggcagacgagagagcgtgtgcaggggaacggccctttataaaaccatcagatctcatgagacttattcactattatgagaacagcacaggaaagacctgaccccatgattcaattacctcccactgggtccctcccatgacacgtgggaattacgggagctacaattcaagataagatttgggtggggacacagccaaaccatatcaatgccctttggtcaacattcacgtgggacacaaatatcttcagaatttgtatccacatatctattctcccaatttccttgtcaccaatcgttcaatattatttcctagtgatgcagaatttttgctccttagttcagctcaatccaggttcttatctcacgaccaggaagaattaggcatgtggacacattgaaggatgaggagggcagaatttattaagtgaaaggaaagctccaagctaagagagaggtcctgcaagcaggtttccacctcaccagggccaccacacactagctgaagaggccaggctctgcccctgcataaggcgtgaattcctggtggctccaccccattaccccagtgcacatgtgggcatgcccaggcaagccatagatagtattgaaaaaggcaacattcaagaggctaaaggcattattcagaaagaatcaatcaggaaagggtgggcaaacaggggcaaaagtcctccctctgggtcatgggtttcatctgggaccagcagtccagtctttcagccttcaggcggttttggcttgaaggtgaggtttcatcggggacccttccctatctgcctaggcatttgtctgcctcttgcctctatcacaagtcccttactatccagccagactattagcaactccccatgaattagtatatgtctggccatctcttgttccaaatctactgggcaaccaaatgtaccgcaaaatggttttccactgggagggttttccttactgctatccttcacagttgtccctgagtgagcctgcagtgcctaagctgtctgctgttgggtggtaccagcccaccatacagacccatctgtaaatgggcttgagggttttttttttttctctttgcttaattcattatatgtcacttcccaggagacaacagatgtagattgatggagaggaggaaatacaacagtaagtgttgaaggaatcacaggtaccacctcatgccacttacttgtacttttcagacctgtttgcacttggtccctcctataccatttccactacatgactgtttgctgttgcacatgctaaccgttaaagctgatgaatcagacaatatgtagttcattacaggaagctcaggcctaaccatgattaagtattcagtctctatcaaagcaaagccaataacagggcaaaaccttgctactgagaatggtagctgcagaagagggcatagatttgcttctaaatcattgaggtctgcaccataattgtcctattggagcctgccaggtactttatattatatttccatttgccatggacacttctagcatcatcagatttgcaggatcataagactcaaatggtagggaagattgcattgcagccagaacatgctgcaatgactttattttttctggtctccactcaaaacaagcatctttgtgggagactctgtagattggtcaaagcagcacactcaaatgtggtatgtgttgcttctgaaacccgaaaaggataatcaagcattatgcctctttttttcatggtagatggtgcaaagtgcagcaacttatccttcatcttgaagggaatagcttgacatggctcaaaccattgagcccccagaatcatcactaaggtggtggtcccttgaaatgtgtggggtttatttcccaccctctaggttctatatgacttactagggtatctaaagtaactgtctacttcctgctcatcagattcaatcagaataatgtcgacatagtgtatgggtgtgatgttttgtggactgtagagatgaccacgctgtctatggactgtattagggccagagggcagtagagttgaaaaagccctcaggcaagactgtgagggtgaatttttggccctgtcaggtcaaagcaaattgcttctggagatcctcataattttgaatagagaaaaagatttcatctaggtcaatagctgcacaccacatctgttaattttctcaagtaaaattattaggatgcatctgggatggcaggtgcaattcgagctgccacctgattaagtttatggcagtacctagtcattctctaagatccattcagcttctacaggccaaacaggtaacctaactggggatgtgatggatataattacctctgcatctttcaagtctttgatggtgtaattttgtagttttctcagggatgtaatatcgtttctggtttactacctgtgtcaggaagggaagttccaagggcttccacttagcttttcctgacatattggttctcattccatatgtcagagggccaatatggggattctccctgtttccaagatgtcttttctaattttacattcaataactggagaagtaaccacagagtggtctgtagactaactaggccactgtaagttgaacttaagctaaggctccaaatatttcttgatttctgaaggctcccgctcttgtttgtgggacacagtggcattttctgtctctaagaattagaattaattcagagccagtttctagcaattcccaaaaaagtccaggtagttccctttacccaatgcactgttcttctaataaatggtcccaagtctctagggggggaaatttgaggaagatttataatatgtgcatcaaacatttgtatatgtattttatgtactttcatgtatgtttgtacatatgtacttcctcaaagagccccaagctagcttcaattaatggattgtgggtctgttaattgacttatgtctggaaattcagtgaataatcatgactctccactgtggtgactcaagtcagttttggggctaccagacttagagtcttcctgttacatacaccaagaagcactctagtaggctgttttcttcccatggacactatgatcaattaaccaccactgaacatctttgaaagtctaggaattcttattaccagtgcatctctgcatccctttatagtagatgcacccaccatgactttggtggttaaatgtagccacttatcccctttcttatcctgcttctcttaccccctttgaaatcatggagcctatctcaatggtggtctccaccgctgtcgtatctgctctacaaagaagagcaaccacgaagctcttcaaggattcaggttctcccttcacttatggatttctcaatgctttagttgagggagtgtcttctgggcctttttgtgcaaggtagatgggggtgattaggatgcaaattgcctatgataaatccagtccaacattcctaactacaatgtgacagacactcatcccaccaagagctcaggtctatatttcctcccttgaatctgagtgagcagttggaaccacactgaccaacagagtagagaggaagtaatgctatgtctctctctctttctctctctgcctgtctctctctctctctcctctctctgttggactgcctgctctgggataagccagttaccatgccacgaggacactcaaacaaccctgtggagaggtccatgtgaaaagaaactaaaacttaactgccgacagctaataccagctttccagccctgtgagtgagctgcctgggaaatggctcctgtagcccatgtgaagccttcaaatggctgcagccccagccagcatctgattacaactttacagagacctcaagccacagtggctcactcaagatgctcttgaattcccaacccacagaaatcaggagaaaaaactattattattattaaactattattttaagccattatgttttagggtgatttattacacagcaatagataactaatacatataccttacttatgaatacgtacatgtataataaaaatagagaaaaacatgcctggatgtttttatatcaggatagttattacttgtagacatagaaaggtggggtgggattggggaagggtccaaaataagcttcagaggcaacagcaatatatttttttaaagacctaaagcaaatatgacacaaagtaagatttgttaagtctgtatagtatgtgcatgatatataatcatatacaatattattctgtgcttttctgtatgtttaaaaaactaaattaaaacagtagtgggggtggggggactaaaaaggacttttgtatagatcacaattttgcctaaggttaagtctgccccaagttctcaatggccattgacaccacacttaatctgtctaggctttagcttttcagtggaaatctcaggagacctcaagctttctatttttgctatagagaatgtggcagaagaatgtccccaaattgcttggcaatcctcctagaagcagagctgtgggggttattttctagagccatgtatacactgaaggcgctgttcatagccctctacgggactgcttttgtaggttttatctttgtgagtgaaaacatatatgagggacttaaaggaacatcatattatggatcatagagggttttgttgttgttgttgttgttgtttgtttttgagacggagtcactgtgttgcccaggctggagtgcagtggtgcgatcttggctcactgcaacctctacaccctaggttcaagcaattctcctgactcagcctcccgggtacctgggattacaggcatgcgccactatgcccagctaatttttgcatttttagtagagatggggtttcgccatgttggccaggctggtctcgaaccgatgacctcaggtgatcccccacccccacctcagcctcccaaagtgctaggattacaggtgtgaaccaccgcgcccagccacagagctttaaagtggaactcctgttcatcctttctctcatggcagggatgtcttttacaatgtccctgacgggtggtgaatcaagccctgctttaacacctgatggtgacaggtgctcattccatggggcagtgtgttctgcagatgggtgtggaaggtgctcagctcctgctgagagaagccctggtggctctcactcactgcttttagcttctaaagcaacacattagaagtctactcacttctacatgacagcccttcaaatcaatgtttggaaacaacaatctggtccttcttcagacatccccgctcctggtaaaacatcctcagctctttcaaaaagaaaagactctggcaattcttgaacacctgttatacatggcctggtgcttacacagggttttatataatcttcaaattttctgtgattatctacagaacagatagagaaacggaggcccagggcacgtgagtgacttcacctaaggttagaaggctggaaaagcagcaaagccacataacgaagactgactgagcccacggaccttctgctactctgtggggcttttgaaacatggaggctcatgggacaccgaagccctccctgccttcttcacttcctccatgttctgccacacaactcctaagatgtgatgctgagaaatggacatgatatgatgctttttaacattactttaaaggcaaaaactgcaattactattgcaccaatttaatattttagtttatttgttcttctttccaaccctttgagatatgcagcaaaggcattagaggactgggcgcggtggttcacgcctgtaatttcagcactttgggaggccgaggagggtgggtcacccggggtcaggagttcaagaccagactggccaacatggtgaaaccccatctttactaaaaaaatacaaaaattagctgggtgtggtggtgcgtgcctgtaatcccagctacttgggaggctgaggcaggagaatcactcaaacctgggaggcagaagttgcagtgagccgagatcacgccactgcactccagctgggagacagagcaaggctctgtctcaaaaaaaaaaaaaaaaagaagtcacatacaacagactaggaaactgaggctcggtgtgatggattgcctaaagaaaccaaccgacccttcggtaaaggattgggatgtaaacccacatcttcacactccacatcagtcttttccattgcactaagaccacaataatccggaatctcatcagcatgaagaactggttccatgtgaatcaatctggatttaagtattaattaacacagcctaaaatgactttagcctctttggcaatcatatgacactattgccttatacagttagaaagtactctccctacccccaaatctctttttttatttgtttgttttacaaaaactgctgtgacatcatatcttctccttgtgccacggagttgcattgatccttatcaaactccctcttccttccctcgaaatgtgcccaatcccacagctccagctaggtcagggggtattttgaactatccctgtgtcacccaatatagtatcaactcccataagaactagaccactcatactttttatttttatttttttgagacagagttttactcctgtcacccaggttggagtacagtggtgtgatcttggctcactgcaacctctgcctcccaggttcaagtgatactcctgccttggcctcccatgtagctgggactacaggcgcccaccaccacacctggctaatttttgtatatatttttttttgtagagatggagttttgccatgttgtccaggctgttctcgaactcctgacctcaagtgatctgcctgcctcagcctcccaaagtgctgggattacaggcacgagccacttttgctatgcacgtgcttgttctcatcatggagctattgatcacactgctggaaagcacagcactgaggatggagccctagggcacagattccaagtacagtttcctgaggaaatatgatggcagagtatatgttcagatgccaccattgcatcttgactgtgacaaccatgggtgtgtagagagggagcagcgtgagtgtcaccgccactcccccaacccaccccgagatataccccctccatccagcagcgggaggctgatgaatttggaaggagagagacacatgtggagacatctcccacatcctcctgacataaaatcattattctatttcattacagaccatgctcaaggtcaccatgaaggtcattcagtgccactgcttttccccacctctgcctcaccggtagacttcaagttgcttggaaaaatcctatcccagcttcctcattttggagcttcctcttaactgaagtagaccaccccccaccaagccaacacacacacacacagacacacacacacacagcttgactctttctaattacttagtaccctctccttttcctgttaccattttctcccaaacagatggtgtttatagacagaaaagaaatgggagttattcagctgcaaggctggtaattgatacccagaaatctaccctccaaagacaccagcagaggggggctctcatggatgcagcaactaaaatggcttggagcagagaccgactcacctggcctgggccgtgtccaaggggcaggacaacaacttagtgtgctagaagccagctagtgaggtgtgtgttcctggctggctttttcctgcttccctttgaacttccagggctgtatgtgtgagctttatgttcatgcagccggcagcaaacagagacctgcttttccctgagctggttggcagccacactgccagcagctatttgctgagtttctgcttgattcctgtactctactctccacttgttgctgtgggagacccaagagaaatgcaaaggctcttagggtgatgagcaggctgtgctgtcagggcactctgccctttcagaaatgccctagccaaagggatttgaagataggacaggaggcagagagggaatgaaggggagagagtgtgtttgtatattaggaactataggaataatcgttaaatgtggaatatctcacacacacacacacacacacacacacatttggtacccaggaatcttggggacagatggaaaggaggtttgggtttaaggtgggagaagagttcaatttctgaaccagttgccaggggagttctaatggtggagtccgaaagtgggtagaaagtatggggtggcttaggggtcccgggcactgagaagggtcatgaaaagaatcacaggttcccccgtcatcccaggacgagggctttcctagtcatagacagcttctttgtggggcaggggtctgtctgcaagaggttctggcaatgcatgggattttgaggcatctcccaaaccttagccactaacagtttcagggacctctttatgccactaacaatttcagggatttctttccttttcccataaaaagataatctctttctgggccaatgcctaaaatgtgtgcagcaaagggaaatatttttaaaccataattatacccaaatcaaaaactttatgcataatacactcaaaaaaccataatgaaataaggcctaaagtgcaacaggttaaactgagggggaagataccaagtggaggtttggagtataggctttgaaattaggtggggcctgagatctgtcccagctcttctgttggcttcttaagaggtttccatcactctcagaccctcatcttcttaatctgtaaattggggactgagatctacaccttccttataggggtcttttaaggattaaaagagcgattgtcttttatgcagtcatgtcaataaacagcagctattatgagtccatccatgcaaatatgttttactttaggtgtgaaaggttcattgatcaacatataaatgataggatttctacttatgtaagagaacaagcaaagagaacatgaggacagtgagaggatcaaagggagagaaagaagaggaaagaaaagacaggagcaaaaacaacgaaggctgggctgaagacaagggacagcacaggtttatgatcttggccagaaccagcttttggttcccaggagcaggtggaagactttgattacactcagcaagggattatcatcctgccagttactgaagcagatagcttggctttaaactgtttctgtgcttatttggcttgggcaaagaaatcttcttgccaggtcaattgctaattaaatagcctccagattgagacttggtctctgcccttgagccatatacagtctggatgaggagattaagtaccagtgaacagaagatgatgaccacctgaacttcgaaggggccagaacaagcattggaagcagggcccagggctgggctggccaaggggaccacctggaggcatggtactttgggctgagccttgaatagtaggttgtgcacaaccagaaccagtggaaaggaaattcctggcaggcagaatagcaaaaggataaaagaggaagactagcttccctggaatgaaggacttgtggccaaaggtggcagggggctggtcagttccaaatgaggccacaggtagggaaggttctattgtgtgcagctcaaagactcaggttcccagggaggtatgtcgatttcctgacgatggggcagaatcgatggtagggaagggcgggaaggtcaaagtagggtatccaagcagagggaaccatctcagaaaatgcaaggcaagcagaacatgctgggggtgggggaatgtggcagggggccaaccatgtgacagccgcacctgagttagggaagatcctcaatttggggaagtggcgagttgggtgggaggtttcctgcttgctcatttcttgtttaagggacaacaaattctactacaaataaaaatacaacttaatctaatgttccatagaaagtacaaacttttgggaaatcaggcaacaggtctacacatgcagaaggaaaaagatttcaagccggtatgtttttaactcaattttctagatttgcctcagttgcatcaagcatgtgtagacagccatgtcctctagtgcctgattcaagttattttcagactttatcagcactgtccttggaagtcactgtagcctccatgttataagctgaatgatgataaataagtggcaattttcttctttcattcttgtcattcccatacatactactttaatggcaaagcaatgagattactggcataaatgccttcctgtccccaagctcatccctggatcattttgcctgaggttgaaaagcaaaacaaaccaaatcagtaaagcatcttctttcaaataaggggatattccttggtattcaaactatatttttcaattgttcaaaatcggtttatttggtttctgtagaatacaagaaagttaaaaggtgattttaggggctcaaatgaaagaacaacttcattgttaattcaacctgttttgttaggatatttatgcctcaaataaagaataaagaataaaaactcaacacaatgggagaattagaatctgaattgtgataaaattcatgcctgtatttatcaattatgaaagtgattgggataccctctagcctgagctgaagccaggcttatcaaacccactctgttcatgaggattaactattaactttaattcaaaaatatcagtacacacaggtactccagagagccttcccagctgcaatagacccaacacactaatttactaacagtcattaaccagtctgagaagtcagtacgtggtgacagaccaaatatttcatgcaaaagtgaaacaagtgagatgccaccaagtgcagtcacacagcactattttaaaggtgacctctgggaaatttagaaatgatcagcaaaattctaaatgtgcacatatttagacagagcaatttcatttttaggactatggcatgcagagatactcactaacatgtacaaagatcatgtataagaatgctcatggccaggcgctatggctcatgcctgtaatcccagcattttgagaggccaaggagggaagatcacttgagatcacttgagcccaggagttcgagaccagcctgggcaacatagtgagacctcatctctccagaaaataaacaaaattagctgggcgtggtggtgtgcacctgtggtcccatctactcaggaggctgaggagggaggaccacttgagtcctggaggttgaggctgcagtgagctgtgattgctccacaccactccagcctgggcaacagagcgagaccccatctcttaaaagaaaaaagaagaagaatgttcatcacaatcaaaacattgtaatacaaagaagtgggcaataatttagataaccatccacaggggacaggttaaataaatgataataccttcatacaaaggaatactattccttcaaaagagtaaggcaggtttatgtgtagtggtgggaaagcatccttagcatattgtttagtgaacagagcaagcttcagagtataatgtgatctcagctgggtgtggtggctcacatctgtaatcccagcaatttgggagaccgaggtgggcagatcacctgaggccaggagttcaagaccagtctggccaacatggtgaaaccccatctctactaaaaatacaaaaattagctgggtgttgtagcccgtgcatgcaatcccagctactcgggaggctgaggtgagagaattgcttgaacctggaaggcagaggttgcagtgagccaagattgtgccactgcactctagtctgggcaacagagtaagactctgtttcaaaaaaaaaaaaaaagaatagaatgtgatctgacttgaaagaggaaaaaataaaagcttccacacatgtcattgtggataagagcaggtcctctgtggtcagactgtgggggtttgagtcctggctctgctacttactagctggtcaccatggaaatgtgaaagaggccttggtatccacttctgtaaaatggaaataataagagtatctgcctcattggcatgtgataggctttcagaaaataccagacaaactgttagtaatgatcaactctagggtgtcggacatgaaggaatggggaactttaatttttaccatattccctttcagactatattttttataggaatgtttaaaccgtcttttgaaaagatgttgtctcaaaactagaagccatctattaacaggtaactactcttggcacaccctcagtgtgattgatgaggattaatgaagggtgaagatatttgtcagtccaactgggcccataagacgccttgagattctcctcccagtagagggaggccttggtccacaaggaagtcatgtccactcacaactgcaaacctctaggcacgaatgactccatccaacctccccacactaagaaacctgaccaaactctaggatggcttctatcagcccaagactgtgagcccagtccctcttaaagtgcctgcctgagaagtctcaaatactgcctaaagaatttgttccagctaaaacaactataggcccctgccctccttttgcttagagcagttactttagaaaacttacaattataaatcctttctctgccactttgagatgtaaatctccttccacccagaatctccttccacccagaggacctgggaaccatggctttgaaatgcaaacatctagggacatagctcccttgtctcccggtctctgtgggagggtaacagaccaaattcagtgggtgccttgctccaatttgcaaaactacctcctgccataaagatatgagatatttgtttctcctccagataagcactaattaacaaacacagatggctaatcacattgaccaccccgccgccccacttttacattcttcagtacttttcctttagcacaatccaacctacggtttaaaaagcctaggctgggtacagtggctgatgcctgtaatcccatcactttgggatcccagggcaggaggatcacttgaggccaggagttcaagaccagcctgggcaacacagtgagatcccatctctccaaaaactaaataaatagtctcccatctgttatttcagtggagttgagtttggttctatactaaagtccctctctcccctgctggagtagactgaataaaatcaatcttgccacctctaacagctgtcctgctgtttctctttgacaccactgatgaaggaggacttggtccctgggaaggccaggaccatggaggaggatttggcatctacccaagtggtatttacatttactaaacctctgcctccctgtaaataccaggagaagaagagggcagaggtgctcattatgcaaaagacaactgaaacgtgcaagagggacttttccttcatatgaatgataggaaatcttatttattgagtactttgtaatgtactgagaaatatgctaagctcttagtatacagcattttattgaatccttagaacaactttccaaggtaggtgtcattattttcttggaattcatacttcagaaagattaagaaacttgctccaggtcacacataagctcataagtagcaaacctaggagtcaaactccagagtccccgttctccagaagctttagtgtgacctggataaaaagccttgtagctgtgcaaatgaagtacagctgaaatttgttgtttatcttagaaagttttctttccatggaaagtaactacatcttagtatatggcactagtaatggcattactaaaacaataagaatgacacacagctctgtggtgaaacactcagctttatttttccccaagctgggtttcaggccactgaaatgggtgaccatagtacagatcacagaaccttgccttcttttcttcctagtgagatggccaggtgggagggggtccctggcaaaactccagctggcttgcacagtggggtggagcctccagaagctcatgccatttgcagtgggtaagagcctggcccctcctcttcctgcatagaacctgggattcaatctgtaaggtgggaagtgcagcagcagagaactctggccttgcagagagtccctgttcccacttactttccttttcaccaaataaaaccctgctttactcatgcatcaaattgtctgtgagcctacatttttgtggccatgggacaagaacaccatctttagctgagctaaggaaaagtcctgcaacatttttggcacccaacgtggggcttgagaagtggtgagtgagatgcaaaccaagaattcttttcccctctctctttggagccttttcatcctaggagttctgagcttatgggaaatcacattcccaactcctgtcgctcccgggggttaggagccttttcatggccttaccttcctttttcaggatggacctggtgagcagccggcttgccactgctccccgctccttgctggggctgggacccatggcccaagggtcccacacagccagctggctggttcccagccacgtgccatgcagccttcctcttccccagccaagggattttactccattggacagtaattaaacttttctccttgtggagaaaccagttacataagaataagaagttcttccccaggcatttttaaactgttttttttttccttcaccttctccaccccatcagcagttaccatttagtgaggttttttctttcagaagaagttttgctaggctaggaatgataagcgcccctgtttatattctccgtaaagttttggttgtgaaaaaggatcttgtggggactgggttttcttctgcctgtcagtgtgtgtattgtgtgtgatgtctgtaaaaagagctctattaatttggcctaaagaaaaacgagtgcttgaatcaagcatttttttttttaagggaagttaaaagctgtggtacctttcagttcacatgactttaatctttgagaaataaaaacagctctaaagactattggtaaaatgcaggtcaggtgcaaggtttgctaaatgttttgaggttacaaactgatttttgagtttgggaaactatttgacttgccggcttcacaattggtagggcctggggacatgtagaactaaccacacccttaattaagaaggcaactttggctgcactgagcacacaattaaagcaacttaccagattttaccccaaagttaaaaattgctaggagttaccattataatgtataattgaaactactgaaaataaatttacatgcaaggagtgtaagaacagtaaaatgtgttttttagtaaaaggttacaaaaagccatggaaatgtacatttttgcctatggttaaaggattgttttgagttaggaaaagctgaaggttcaaacaagtggtggaaagattgtggaaattaatcttgcaaaggggttctctatgtgaacatattgactaaattcaaaaaggttataaaaggtttttgcttctttaaatttctgagtcatcattttggcacaataaataacttatggtaatctggaattctatttcctaatatcaagggcttcaaatacatgtaacgggcttcccaaaatcaaacttcagtttcaaaattgtctttcctgacacctggcttttcagatgaatcagagggcccctgagacatccataaaagagaggtaaacaggattatttgacatgtttatgccaaaatgatgtgggattgccaaaatgatgtgcagtcttctttaggttatatcttggtaaactatgctaatatgcattccaaaattgtatgggatttctaaaattataatatctaagtatatgctaccaatcataattagggttgttatgttaagttattgtaaactacagagataaccaaacttctttgtcaattgtgtttctaactgtaactaccctggacattttgctattcacagacaattgttgtcctgttttaatccttttcaagagatggtctacaatatgctgtaggcctttaacatgtgctctcaaatataggcttctgataactttggggattgtaacattggaataaaggaaaatgtacaggactcataaagagctgaagtgttcatgaacatcaagcaaaacaaaagttaactaaatgaaccgaactcagaaagctgaagcaaccttttgactttcgcttggattattgctgatccttgttttgtttttcagagtcaaggaaacttaccttgaactatttatggtctttaataattgagtaaggtatatgcctatgaacaaaatttggagcatgtttgtttctctctgcctggttcctctaaaatttggaaactgtctctgattattcttatggcaatatatttgttcacatcggtgcaatgagaatccattttccttttgcaacagaacgaaattggagaaagtgtttattctaccaaggctttgactggaagggtatgcttccctttaaggagtcagtcttggcttgcagagacaataaaaacccagtggggaaactggcctcatacacttgccaacacagtacctatacagggtttctgacctgtagtcagtaaacaatgtcactttctaacaggtccagaagctccaagtttatcttgggaccttaggaggaaaggatcacttaacttgcaggttggactctgctttaaaaggtcttatctgagattccttggggaacagagttccatcaaagccaatcctaaaggcttatatagaaataattattcttgctgcactttatgcaaacagtcaggccaaatatgaaagtaaagtctatttttcaaaccgctcagtcctatgatgatacgttttttaaacaaaaatgaggactggagagagagaaattatatttcaaaacttataatacatttgtcattaaattccaaactcactagttgtttttaatattttgcctacattttacactaaccctgcttgttcctgtgaacctaccagcaatctccagctgcagctcagaaagaacaagagggatggataatgtaaaaatctggatcaatattctagttctggccaggcgtggtggctcacgcctgtagtcccagcactttgggaggccaaggcaggtagagcacttgaggtcaggagttgagaccagcctggctaacacggtgaaaccgcatctctaccaaaaatacaaaaaattacccaggttcggtggtatgtgcctgtagtcccagctactcctcaggaggctgaggcagcagaatcatttgaacctgggaggcagaggttgcagtgagccaaaattatgccactgcactccagcctgggcaacagagtgaggctccatctaaaattaaaaaaaaaattctagttctgagcaattatcctgtatatcctcctaggtgatgggattaaataggatgcccaccatttggaggtttcctatttgagaaagtaagaccaagggagctaaccaaagccaagcacaatgcacccaaatcctagcaggcataaccatagccactagttatctgggtgtgtcacaagacatctttttctctcccttattggaggaggactcagttccacagttataccttagcatttggcttatgataagaagtccatgcaacgtgcaacccccccgctaccgagacatatttttgtcccaaactcaattccaagcttcaggtcaaggccataggaaagaaaactggatttaagggatccagaggcagatgataacagaggttaaaaggcacagggcaggtaagcacggctgattcctgccaattaagacaagcccaagcttcctgtttcatggataaaggccatgttagtactatggcataaatgagttctagggaattcaaggctactgaaagcaggggagataaggtgtatgtgggtaagagtggatgactcccaccccctaggcctccctgcttcatgggtgcaagccgctttggcacacatgatggtgcctgccaacgtcaccaggactcgggaatgcaaggacagaagaggaaaggggatcgtcttccctctctccctcacataccccgagtatctgctaggaagagaagggaaccagggatacctgcttccctctttctcgatgggtagccattcgtcttcagtctgtaccccatttgaatgcatcctgaatccctgggactcctttaaaaggtgccttcttttttcctttcttctcctctgacctctctttgctgataggtaattgtgtctctgtactacaggacactcccttcagatgcatcctccaaactggaaagagttaatttcccaaaccttaaactggctggcttaagattgggctcagggagagggaacccagaatcccaacatgccagcaaaagggtcaagtgttttttaatcagtcaggcttttaacccctatcttcctgggcaaactggtaaaaggccttgggattttttagctgtccttacctcccccttgttttgttttgatacataatttctagtaactcattttatctattcttgccttcaggtcattaaactccaaatgttcatgcaactggagcctctgaggatggccccttctgccaggaacccttaaataggtctctgagatctgattaccatttccccaaaacagcacccctgtcaccttcctgccagcaggaagcagttaagattggtcctcatctttgggaggctgaggcgggtggattatgaggtcaggagttcgagaccagcctggccaacatgttgaaaccacatctctactaaaaatacaaaaaaaattagcccaggatggtggcgcacacctgtaatcccagctacttgggaagctgaggcaagagaatcgcttgaacccaggaggtggaggttgcagtgagctgagattacaccattgcactccagcctgggcaacaaagcaagaccccatctcagggggaaaaaaaaaagattggttttcgtccttatccttagtttaacagcagctagatgtatgtctttagatggggtaaggggtccctggcaaaactccagtgggtctgcgcactggggtggagcctcaggaagctcacacagtttgcagccgggaggagcctggcccttcctcttcctgtatggaagatcttcctaggattcaaactgtgaggcaggaaacacagcagcagggaactctggccttgcagagaatccctgttccccccaccttttttttcttttcagcaaataaaaccctgctttactcatgcttcaaattgtctgcgagcctatattttcgtggccgtgggataaggaccctgactttagctgagctaaggaaaagtcctgcaacaccagcacccattggtctctgaaattcctccccttgtatattatctcactgcccagctagaacatcagctccctatgggtagggaattttctgttttgttaatttctgcatctacagtgtctatggaagtgcttggtccatggttgaagcccagtaaatatatgttggagaaaggaggaaggagggggaaaagtgggggaaagaagaagggaggaaggagaaaagatggatggaaggaaggaaggaggaaatggagggagggagggagggaaggaggatgagagggagagggagaaaacataaatgggatttagaaatttagtacctctagttcaattctcatccctattcagactgaacagtgagcgagctgtggccagagaagtgaagtcaacagccagttgggggcagttctccatgtctcaatcaggttaattatttcctctttcttggtggtgatgataggggagggaagggggtggctttgagaagagctgaaatttgacagtttctcaatctcagcactgctgatattttgggccagaaagtccttggttatgggtgctgtgctgtgcggtacattgtaaggtgattagcaacaaccctggcctctgcccactccatgccagtagcactgtccccctccacttgagctgtgacaaccacagatgtctccaggcattgttaaatgtcctggcgggggtggaggccaggtatgtggacaaaattagccaaggttgagaaccactggagtatttaaaattcagtgcttcaagagaagtgggggacatttcaggctctgaggtatgaaagccacggcacaaaccgtggaggcagcagaaatcttgggatctggcatgatcccaaactcagagacagaggaatattcatcaacatgatgactcaggaaatgaatgttttcatggtctgccagcccttccaggtaagaagttaagaaatttaataagaaaattgatctctacgcacacgaggaaagagaatctaatgagcaacaagccaggcagattcaaaagcctccagttattctccctaacacagacgcagccatttttgaacacaattatgaacttgaaaccccacaggggaattcaggagaaatcattgaaacatttatttgatgtgaaacctctgacccaagcaattcataatcaattaaagtggtagggcctggaagatttgacggtagcatagttctgggatttattgacaaatggtcggtacaagtaataattggtggcatctgaaattagatctgaacgtcaataaaaatcaagaaggattccacagagctcagtaccggaaactatattatccaatatgcagtgctcattaacaacctggaggagaaagtcaatttgagttagattacattttcagataatgcaaaatgagtgagaaatggcaaataccaaagataaattaaagttaaaattaccaaagggtctgaatatttgagaaccttggtcagaactcagtaagatgaaatttaacatgaaaaaggaaaatattacacggtcaggcttggttacacctgaaggtccgaggaatcagatagcacacaggggaggctggggtgtggtggataagctaaagggaaacttggcgttcctcccacacaccttggaaggtcgacttaagaatttagcagattgtgtctttaaggagattttgcagctggagaagcaagtcagtgttatagacctgccatcctagtcagagttatagagttttgctgcaggaaaatggaaattcaggtgcagtttgtatcctaatatggctacaaggtgattcagtgctttgcacgtcatcgttytatcatsgtcatcatcatcaccaccacttaccaagttcctattgatatgctagactgttctaaggactttatttagctttgaaaaatcctcacaacaaccaggtattattagtcacgttgtacagatgagaaaactcacagagaggttaagtattttgcccaagatcacacagtaaatggcagagaaggggtagggattatcaacccatgttctttgagaaacaaactgcagtagagggaatctgaaaaaaaaaaaaaaaaaaaaaaaaaaaaaaaaaaaaaacctagcagattcctatcagatttgaggagtggtgaactttgtaggtgagatcagccctagagaaagaaagataacatttactttcaatatgctcctcccgtatatcatctaggaatttgtttggctataacaaaaaccttaaacagtggcttatacaaataggggcttatctgtcacatgtaacatgaacacagtggtggacagatactagcaatgattttccatttcaacaatgccaaggctgaagtctccgcgtatttcttggcctttctctcaagattgcaggatggctgctagaggtcggtggaatgtctacagtcaaggcaggaagaaggtagaagggctgtgccatctatatctgttcccttgatcacaaaagcaaaaactttcccagaacccactgcaggctgactttcacctaagtctcattggccaaaactaggtcacatggcccctgctgttcagggggagactgagaaagcaggacacaggactgccaagattgaattgaaccatggtccattgcctgaacctgggcctggggctctctgcaaggaagaaaggaaaagtgggtattgggtaagctactaatggtatctaccactacctttttctctcttctcttcaccaagcgacctgattcctgcagtgtcttgatttgagcagctgacatattctagccaaagtgtgagccaggagggggataagatgtgcctattcccattgttcattttcggtagagtgtatgaaaaggaactgaaatcaaacatttgtcagagcaggttctggaaactcctttgccagggcgagcacccatggaggagtttgagcgttcactagaataagggtccaccaggcatttctgtgcagtacataaagtcagaattagaggcacccccaaatatggagaaataacttgatggcttctccaaacacagagcactggcttttgtatcaggaaaagattctagcctacaaacaaacaaaaagcgaaaacagaaaaactggaaacacccacatatccatcgactggtgaatgagcaaacaaattgagggatagctgcacaacagaacactcgcagaaaggaacagatatctgatacatgccactgctggtctgaatctcaaaagcattgtggtaaataaaagacaccagatacaaaagactcatacactagaggaccatctatatgaaattctaaaaaagacaaaacagatctagagtaagagaaagcttatcagtgatttactaaacttggggggaactattggagatggcaggaatgttcaatatctggattgtggtgtttgtgtacatttgtcaaaactcgacaaagtacacccttaaaatgggtacattttaatatgtaaattatacctcaacaaagtttatttatattttttgtctgtctacatctccatttttatgttttttctgtttgcttcttttgtccctagccaaattccttctagaaaattccaattttgtttaagcagcactccaggggaagtggtgttttcccaacacctagtggaaatgcagaatgctataggggctatggcagcattgacagtaattgccccaattcaatagtaggaagagacagtgtgatggtgaattttatgtgtcaacatggctaggccgcagcatgcagatatttggttgaacattattctagatgtttctttgaaggtgttttctagatgatcaacatttatgttagtaaactttgagtaaagcagattactctccataatttgggtgggcctcatcctatcagttgaaggctttcagagaaaaagactgacctgtccaagcaagaaggaattctgccagcagactgcctttggacttgacctgtaattcttccctcgtctcctatgtgtgcctagcttgcaaattttgggcttgtcaaccttccataatcacttgagcaaattccttacaataaatcaatctctctctctctctctctccctctctctctatctctctctttctctttctctctccccgcgccacccccccccccccattgatttatatatatacacatgctgcacacacatctggtaggttctgtttctctggggaaccctgactaatgcaaacaggtaacaccatggaattagagtagtgaagctctagggcctccatgtacaagttgccactccagggttagccatgaagggtgatacttagaaaggagagtctgcaacgtactgcaggggttctaatgccagccggctgcttggccatggacaagtggttacactttccaagactcttccatcccaagaaagagacaataaaaatacctacttgttcaagaaagaacaaggatttaatgagatattaatacaaaaagtttaccatttttgatatttactactagagggtgactcacccaaggtcacacaaaatctcccaacttttgggacaatactcctctcactgcctctggatacctataaagtgtccctcctttgtcttcaatgacatctgaagtggaccacactactctgaaccttgacggccaacattagtttcaacttgggccaggtgcagtggctcacatttgtaattgcaccttcccttgggaggcgaagccaggaggatcacttgagcccaggggttatagaccagcctgggcaacatagcaagcccctgtctctacaaaaaaagaaatcaaaaattgaaaaataaacttgaattaaaataccgatttcggtgggaaggattgtcatggtattataatatttggtaccatgataagtagtcttaggaggctttctgaaaactcatctgagttggtcttagtctttctgtcaccatggtaggcaggctgtgaataacccttcatatgcatgacactgtttcaccatcaatgcctatcccttcctgggccttcccagggggccgtgcacggaggctttgcctattcttggccctcccagacacccttgtttctgccataatgtaatctgcgggtctgaaaacctgggggctgcagtgctgggcgctatcaagaaagagaacaagagagatggatggatgtatcttgatttgataagtcaaatcagattaaactaatggcatttcagagatttttctgaataattttttccttaggaacttgttactgaagttggttgcaacttttcttggctgaagttgagagactatggctgggagaagccaactacctgggggtgggataggagtgggggtgggagggtgggagtcatgattcggggataatcactttacctttgtgaagtcagctctttatgtagagatatgaagttgtttaatatttatagtcttttttttttttttgagatgaagtctcagtcacccaggctggagaacagtggtgctatcttggttcactgcagtctctgcctcccggttcaagcgattctcccgcctcagcctcccgagtagctgggattacagacgtgtgccactacacttggctaatttttgtatttttagtagagacggggtttagccatgttggctaggctggtctagaattcctgacctcaagtgatctgcccgcctcagcctcccaatgtgctgggattacaggtgtgagccactgtacccggccaatatttatagtctttaaaaattttgtcctgacaaagataggaagaaaggtaggatgaagggcatggcccctgcagatggatccttagaagaacaagagctgctcagccccagaacgctgccagccccaccccttgcgccatcacctactctctctggtccctctcctgccttagtcctcacctctgtgttgtctgaggagtgggtataacacttggagcctcccagccttccaggccgggttgacccagagtgcacagtggctttcattgtcccaggcctggatcccttggccaagagggctaggactatacctgtggaaagttatggaaaatagtaccccttcctcaccaagtccctcgactgatgctcagtttcctctggaggtgatccaaggaagtgactcctttgtggccatgctcagcacccctgtctcttactttctcaattttaaaggggaaataatcacgctgaaggatgctccaatggattagccagggtggggaagggaggaatgattgtcccaggcaaggagctgttgatggcacaggaaaatgtagcacagagaagacttagggtgggcatgatggtgtctcaaggagtcctcaaggaccagagggcagtgcagaataggaccatgtgacaggggaagagctagggagacatatttaggttcaatataaggaagagtttgctaaattcagttttctctgaagacgagaataagtgagttctccagcactggagatgttcaagaacaccaggagcactcggcaaggatgcaattaaggagaatgggcagttagattagacgaatgggtcttggctgggggcaactccactcctacccccagaaagggacaatggcaatgtctggagatattctggttgtcacaactgagaggtcctactggcctctaatggatggggacaagggacactgctcaacatcctgccatgcatgggacggcaccaccacaaataattatctggcccaaaatatgaatagcattgaggttgagaaaccctaaattagataagctataaagcctgagtggagggtaatcgccccctcccatctgtctggcaacccagaagaccatggaagggcatcagcgacatgctgggaagagctggatttcaagcaggaccgtgcagtaagattttcaagtagatgaatctcagaaatatattttcagtttcaaacattgtgggttatattttgggatgctggccatttctgctgtagccaaaactatgagcctgttattctccacacagcaaattttctgttcccaccatttgtagctacttctgtgtacaagttggaaggcaaagatctaaagacagggtgggctagggggtggagaagaatagaaaacaagcaaacagaggaaactacagtgaagtttccctcaaaggcctctaagaatgatccctgatatctcttctaaaattatcttttaatccaccttttatgcctgctgggtactgcaatttgtcgaactccagaaaagccctggaattacaatgaaattcgttgttaccagatgtgtgaatcaatcagatggctatgaggtcaactcttggctctgtcaattaccatctgggcctaggcaagttatttaacctttctgagcctcagtttcctcatttataaaatggagtaaataacaccgacctcatgggatagctgtgtggagcacatgaacaaatgcacataacaatcacacgcagtccctggcacataataagtactcactaagcagcagctattacttgtatgatcttctcaggagacttaaatagcacaacactgggttaggcattgaacaagaaaatgatgctatcttgaaaatcacaatctaatacagaaattagcctgccctaattacagttccccattattattaatttaaagaataagtagctgctggacaatagatacacatgatctcatgtaactgtcctaccaccctagggagggaagcattaccagctcaatttacagatgatgaaactgacatgcccatgctaagtgaggtgccaatcatagctcctaaatggcagaggaggaattggaacccaggccagcctgactcctaaactcctcaccactgcttccttgttctccatcattccccatcttgctctgcttccttcactccagcctggacctgggaatcttggagcatctccctgcagcaagacctgccctcaaagccttcactggctccacatataaatggccagtcacaacttaaggtatttcccctcacagagctattttcatttggcaaaaatagccactaaacttaagcagagactctcagcctggaatcccctaagagcaatggtagagatgcatgagctgttttgcacatttcaaaaagccatgaagaaactaaaatgcaatgtttcattgatttatattggaattacatcgactctctgaggtgatgcttgttatttcaacctgattagaagctctgattgatagacagttccttatgtctttgatgaataaaaaaatgggaaatctaaatatatatggcctgttgcacagttaaaagctcatcaaagcctgaactcagccatgcatggtagctcacgcctgtaactccagcactttgcagggccaaggtgggaggatagcttgagcccaggagttcaagaccagcctggacaacatggtgaaaccccatttccacaaaaaatacaaaacctagccagccatggtggcatgcacctgtagtgtcagctactcagaaggctgaggtgggagaatcacttgagtccgggaagtcaaggctgcagtgagccatgattgtaccactgcactccagtctgggcaacagagggagagcttgtctcaaaacaaaaacaaacccccaaatcacaaaatacccctgagctccatgggataaaataattttacaagtgcactcggtgatgaactatccatggtcactgagctaaaaggtcacagcataaatcatggaatatcaggcactaggttggttctggtagagtttctcagctatccgtcaaactccatggactctttcttccacagtgatgcaatcagagccaggcataactgattattaagactgcaacccccaatctctcttgcagttagctatgaccatgtggttgactttttactaatgaaacacgagcagaagagataaatgcttcattttggctggtgtattaagagagcgggcgtgcctcctccatcttcccctttttggcacctgcaacccaagctatgcagacagataggaaagtgctcatcacatgtgatccatagaccagctgctcctcccaaactatttgtttcccatccacaatgagataaagatcttgtactaggacacaagtcaataacatctctacacacattgtttagtacagctgactttttttttttttcatagcaagatgctctcgatgaaggaagccgtacattgacttgcattctaatgcaagctccttctctccctgcaggccagccctttgagtagtgctgctgtagggaatggtagagaccccaggtggtgtgaacccaggtttctgattatcaatgtggaacagagctgcctgccaacctggaacacctgccctggacagaaaagagaaatagacttctcttttgaatgggtcattgcattgcaaggtctctttctcatagagtttagctttcccctaactatgtcagtggggttaatcatatttacccagctgtctgtagtgaggattttaagaggtgtatgagaggacacccagccaggatctactggggcttattcatatcaactgaatcaaacatgcaaaggttccattctctaactggaaacagtccactgtcttttctggttagaagtttggactcagcctccttttcctggaggacaatgtatcgattcaaatctcttgagtcccatctttgtgcctaagactgggccaggcactgtggaggcagtatcgagccagatgacatgggtgctgtccttacagggtgctacagcaagtcatgtggcccagccgtagtctgcaggcaggaaacctgtaggctggggtggccttggagcaagagctaaggtgaatggaggggcctaggtatctcctggcgtgtaatggacacaagaaacagtgttgcctgaattagcagaagtgttgtgctttctaaacaattatttctacacttgaatgtctttacagtggcttccccttagtttcatggggatgggaggaggtggaggatttcatttgaaagattctaaaataatcttggttaaactaaagagaaagagcatttttctacaacttaatttggagagataagggtttaatgcgcctccaaagatccacggttgcagaaggcatttcttagacctgggcatttcttaggtttgttgttcattcgccaaatacttatcaagcaccactatgatccaggtgctctgcagacacacagaggaacaataccaagtccctgtgttgaagcaagctcactgtgtgggaggcagcacgcctagggatgatcagttgcctgccaatggaacacttgcctactgacagagcctgggaacggaatgcagagaggctgggaacccgggagggatggagcccaggccagtctgtggacctttttcttttgattttcacttagctcactcactgaggatagtattattgtatttggttggctaccaaactattaatgatcttaaaattgactttttttctcttagacccagacacatgcatgaaaatactcttcagatccaagagtactcagtcatgcaatgtgagtgtgtaatcacttaagaatatattgaacaccaagcacagtggctcatgcctgtaatcccagcactttgggaggccacggctcacttgaggtcagaagttcaagaccagcctggccaacatggtgaaaactcatctctactaaaaatacaaaattagccagacgtggtggtgcatgcctgtgatgtcagctactccacaggcggagacaggagaatcacttgagccgggaaggcagaggttgcagtgagcccagattacgccattgcactccagtctgggtgacagagcaagactctgtctcaaaaaaaaaaaaaaaaaaaaaagaagaagaagaatgtattgaatcagcagatactcagacacaagtgtatgttttcaactttatcaatatcaatatatcaatatcaacaccatgttgacatggaacactaaagacccaacagggaggcaattaacaagcatttgaggaggaatagacctcacctattccaaccacacggccaactctggcagccaaaacgtgggcaacagcatcctaccagcttctatttattgttgcattgctatggtgctgatcccctttgtatccatggtatttagaacctcggggattgggctggtgaccattctttagatctgagaacagaaggagcagaggaacgttgagcaactctagaggggtgtgtatgtggcagtttagggacagtttgagctttcaggtagaggcagcctagggaaactggcataaagcagtttctttctctattccatggaagttgcatgcttgtgaaaagggccagctatcttctgtcttgccatacaagtgggcagagctgcctgggaataccaggtgggttaaggatactgcccttaaccttaaggtggagggcagcagagggggagagagagacagagagagagagagattggggaggaggggagagagagagggatgggaaggggaggagaagagagaaggggagtggaggggaggggagggtatgggagtggagaggaggggaagggaggggagaggaggggagaggaggggaagggaggggagaggaggggagaggaggggagaggaggggaggagatctgcaagaaagaggcaaggtccagaaaaagagagagagatctgcaaggaggcaaggttccaaaatctatgggctgggacagcaaagatgtggcctacgaagagaaaggtctggagaatcagaaggccttcaaatggtggttccaaatccctccagcaaagcccatccatctttagagctcacccgtctccagctacaccccccacccctcccggcccagatcaggcagcggggtcgccctctccaggactctcaaggcagctaaggctggaggcgccggcgagcctggagagggaggagttcactaaattgtgttggatggaaggcgtcgaggaccggaggaattaatccgatgtggggaaggcggacggggctacgaggaaaaaagagggggcaatgtacactcagccttttcatcactcggcggggagatggatggttttccggaccgggcgtcccagcgccccggttagctatagggagacgtcagagcgctctggtccgcgatagaagagccccccagcccccccgcccgggcttccatataaagtaggggccctagtggaggccgcagcagtagcaccagcggctgcggcggcggagctcctccgaggtccgggtcaccagtctctgctcttcccagcctctccggcgcgctccaagggcttcccgtcgggaccatgcgcggccgtgagctcccgctggtcctgctggcgctggtcctctgcctggcgccccgggggcgagcggtcccgctgcctgcgggcggagggaccgtgctgaccaagatgtacccgcgcggcaaccactgggcggtgggtgagtgtcctggccgcgggagccgcgcgcttgtcctcctctggatcagccagccggaggggacctgtctccccatttctttgcgtttccctggcccagctttgggagctgggtttgttgtgacctttctatcggcaaacaccttccccgttctcctaaaactccaccccacctttccccattctagggagcccatgagtccctagtcagccgcaggctggtccgctgatcctttcccgctcgcttccagcctgtcttccccagggcacccgagctcccaacagccaaccccggtgcagatcaccttccctctgcgcccatcctacatctccttttgtccgcctagtctcaacctgtctggcacggtactctcctagaataatcttggggagcgttgtcccttgaaagcatctcagaaccctggtccagctcggtggcctcaacagcgactggcatgggctgaaatctaagctgcgcctatgctccccgcaaagccacaggtgtggggacctagggtgcagcgctcccgccccgggtttcacatctgttcagtgcgcagtgccctgaatcccgcctgtctgtgactctctggagtttcctcagtccttctcttcgctttgcagcgatattcttttccctgcccttttgccctccctctttccagccagcaggctctgagcttggggaatctcgcctgctctccaagctcatcccgatctctctgcccctctgagctccgctctttctccgcccttcttgacccacgacttcgccctttcccctcgctcctttcccattccctctgcaacaggtcctgctctctaggcaccggcttggaggctccctcgccatggcccctagaacccaggcggagaggacggccgcgctgcgggtgcggagggcgcctgcgggtggggtcaggattccgccctgcgcgcactcgctgctttcgctcagctgggaggcaggaagcgcctggcagcctcggctcacccagcatcaccccagggctctcggcgtcgccgagcatagcttccagcaaacgcagagcgtccaacttcctcactcccccacctacccgccccacaaaagccaactacaacaaccccaaccagcttcttgggaagctggttaatccctgaagagatttaagagtgtgtatgtgtgtgtgtctctgtgtgtgtgtgtctctgtgtgtgtgtgtgtgtgtgtatttccttagccatctacttagaacgggcgctggggaacggtgtgttgaacaagtacttgctaattcatatatcggctgattcacaaatcttgatagaagataaataatttgggggaaggagtgggactggaactgttgcttcctcagctcgtctgtgtcgtgtgtgcttttgtgagggaagtcgagatctttgggctgcaatagagtggtttccactgttgctaaaataatcatttgccaagtcttgacagttccagagatgagaggatgtgtgatcgctgagggacaggaggaacccagcagtctggtgtggagaggagaggttggaatgggtgaagctgaaaaaccctccatttcaagaatgaaggatgcttagcaggtgttgaagaatccaaacttagaattgatgcttcttaaagagggcttctgggagcttagatcaagtggccattatctggcccagccaccagccaatggggctggaaagatggaatgaaagttctggattcccaatctctttgtactcatctatattattgcactaataaagcttattattaggtaacgcttgcaggcccaaaggaggacaatagagttaactggggagtggcatcgtgttatttctggtgcaagtcaagccaatcttgatttgctgtagttccgcagaacatctgtctccaggtatttagggtgtctgccgtttaattgcccttcatagtggtacttgagcattcctaacccaaaagaataccaaccagtggtgaccccaaataccattttcatatttattctcaaatgcacttttttctctccctttgataactgtgcagagttgaggaggagcaagggaaagagggaggtgaagtagaaactcacattttagcctaaaattaccttgcggttgagaaaacgtttgctttgagtaacatgccctctgttggaatatgagcattgacaaggatgaatgatgttacacttcaaatttagctttcagttatctcaagaaaatgcttatcctcttcaatcaccaaagacatgtagtttagttttaattatataaaaccaaagctacatgctgctgtccatgaggatgctgtcagcacacatttacaggcttggtaagtaaattgcttcttctagctgagagaagcatggtgcagcaatggaaaaaaggttaacagcttgaaaacttaacaaatttttatctggcttgatgttcgtggaaatgttttgtttgtgtgatgaaaatatatgacaacacttatactggctactattccctgtgcacccatgaaatgctcctaactgtggttctaacttggacgtgagacatatcccagaaggttgaatttggaaataccagtattccactgcagaatggcttgttatggccccagaaactgtggaatagaatttaagtgtgggtccaaaaatactacttcttagtagtactcaacactttcatctatgtcttattcatttctgtttcaaaccttccctttagtagtatctttaaatgattaataaaaagaacaaaagctctttttttctctgatcaaggttttattttttcaagtgcctgtcttttgtctatggtgaggtttccattattatgatatgggcacttgacagatgatgttgggagaagaggtggaagtgggcgtatcatccatgttgccatggagatgacgatttggttgacagtcactagctcaaaagcaaaactggacccagggaatgtgtacttccctgggatgttacagatagcgtgctctccttagcaaccagtctatggaactagagataaagaactgatccccacacattccccatatatgcaagtactgaaagttagtacaatcacagaatggagaataactttctcctcccattttagaaaagtccacaaaattattcaggcatgacaaaaatgaggttcttatgtgtgatatctgcatcacttctctgttttactggcaataactctttctcatttccagcattctaactagatgatagtcagttagaagggcaaggtgatctaggtcatcactgggagtatcaggattctaatcctgccttccaaccatcatgatttaatttcctccatataaataaagtcaaatgcatcactacttcctgggaagttgcacaacataatcaccgttatggctgaatgcaaggttattgagtggctatctgagcaccatgtgaccaagctgatacgtgaggagccagtcattcaggattccaggtcttcacttgggacagtatccccagttaggatcctgaaattgtgtgaagtctcatgtcataagcaatttggcaaatgctcacactgcaatgcagtaaacctgattttaatgctccttaatactcatagaattaatttttctcaattacataatgcatcatgatatattggcatataatccctatttttataacattagaaagccttttgtagaccttatccttatttccagatcccagaatgattttagctaccttatattcttagcaagttagaagacattgccaagcagtgtaataatgtagtctagattgtgaactgattttaatcctaaaatagttgcttacatctatgtgacctctggcaagtctcattttcaccaaaccaattagcatatggatcaaatgaaatccagcacatttaaacatcccataaactgcaaatcgcaatacacataaaagcaataaagttaaagtgagggcttctctgttggtggatagaacttctgggaaggggcctctttccattttaagactgaagatctttcaaattttatgtttgccttaaatacttctaatgccagtcagtgttggaaccacaaagacctttttccttgcacactttagatcaaaagcaccatagttttgttgacgttagaaatttcaaagtgctacaaagtccaactacagagagaggaaaaatcaactgtaagaaatagagaacatgagaatattcaagcaagggtctaaagtgttaagaatgcagaccttgaattctgtacccacttctgactccaagttatcctctcttgcatacataaattttcatgtttttgatggtttggcctccttaacagcagctttttaaaaaaattatttacaaggctagtacacattcctggagccactgatagactttcagacacccaagagaaaattctgcatttatgcggctgtaaagtgttactcagggcttgttttcaacttgtttttcactacactcttaacaaacagtaaatctgggtagttttctcagttcagtctcaactaaaactctgagaaagtttaaatgaaaaattcctttggtattttttttattacgataaaaggaaagaaatatttttaaaaaaccacacaaagaaaagcatggagacttttattttcagcagcaattcaaaattggctggggaagatgtttaaactccatctttcagctggaaatagaatttggtgcacacagaattgatgatagaattttagatatggaagcctccttagatttaatctagtctaccctgttcattttatagttgagaaaattgaagactaggggtgctaaacgacttggcagaggtgacctaactagttaggagaggtgctggaaccaaacccagggttcctgggttgcagttctgaatgctgtctagctcattgcacattttgaacagagagcaaaatctatctgtcgtttatgaactaactcttaataaaacatgatttattctgcatttaggaggaagcagcacaaacacaattagctttaaatttcttttaaatttctcattcattccctttggttaaatttgtggcattctgagtgtttttgtttttgtttttacagggcacttaatggggaaaaagagcacaggggagtcttcttctgtttctgagagagggagcctgaagcagcagctgagagagtacatcaggtgggaagaagctgcaaggaatttgctgggtctcatagaagcaaaggagaacagaaaccaccagccacctcaacccaaggccctgggcaatcagcagccttcgtgggattcagaggatagcagcaacttcaaagatgtaggttcaaaaggcaaaggtaaaagaaacatacatgcaagatggggtgggaggtatctggggagaggtggaaagagggcaagttcaaaggaggaagaatagaattgcttatgatataaaccttcacagtcactacattaggctaacacatgctaagcacattgacagacaatttctacattctcttctttttgacatatagtcaaaaggatattgattccaaactccaatttaggagtttttttcagcaattttgtctatttgccattacgcattgatgggattttttttttaacacacaggccctacaagaatgttttgatagtgagtctgcaaactatttgagtaaatccttgtggatctacagattttattttatttctggtgaacactagtggaagttcctgtttttagaagacagcattcttgtttgctacctttgacacaaagtagcacttcttcatatttgttccaggagtacctagttcaggtttcatcctaatattttaaaactcagtgaacatgtctgagatcaacaaatccatcctgtatatgattttatagaggataggggaaaataattatactaaactggcaatgcttaaagacagtgagcaagataagagagaataaaatttacaggaagaaagcaaggcaactgaaaatgaggtgattatcactaacttttaagtttccatgaaatgtataataaaatacaaaataataattacaataacaacggtggctagttttactgaatatttacgataatccaagtattgggctaagcagtttacctccattttctcggcttatgctcacagaagtcttagacggaagattctattattctctccattttagaggtaaggaaactagtcccatagcttttcactgataaaatcagggtaagggcctgtgttcagtcggcctcagacagtctgtaccatgccagacatcttccagaaatggtcctcattgatcttaatataaaggatccaggctgaaggccttgctacttgctgcttctgacaataaataatattgctttccactcacagtactggagagcttccttcttcactctttcatggtgaagactgatggcccctttaggggctcagagctgcctttgccaagcctcggctggctttctggagggaagctttctatttcactgccctttgggtctattctggtctttctctttctttttttttcttttttctttcttccttcctttcttacaagttctggctatgtggtttcttttcttcctttctttctttctttctttctttctttctttctttctttctttctttctttctttctttcttcctttctttcttttctttcctttctctcttgctctctctctctctttttttttttgacaaggactggctatgttgcccatgcttgtctcaaactcctgggctcaagtgatttccctcagccttggcctcccaaatgtgggtttctatgctaaatggaaactgaagttcacttgttgcactaagcacctagagggaaagtctttgtagcttttattcagaaaaaaaacaaaaaccaaaaacaatcctagattaaataaaccaatacagaaataaataccaactttgtacaaaaccccaagcgattgtctggtccatacctgtgtcataggtgttatgtcatcagcccccttctttactgattgatcccatactctgagggttctgtgaacttgcaggtgacttctcagattctagctgccatgcctttttcatggtcaggtgctttgccagagttcctgtaggtggatatccaacagcagtacccttctcatttgtctgaacagtaataaaaattgccaccacaaaacccttgaaaataatttttgcaaacattgaactggacttgccctcatagctcgttcatgaaatactcccctctactaacacacaatcatgttactattctatagtgcctcatttttgaaacaaacagcagtgtccagtttgttattttatttcctcaacctggctctgcatatctttggaatcttttggcaaattcaactccttccttaaggatcaaaaattttccaccacattcagaagaatattctgtaagcttcaaaggcaacagcaaaaagaatagctccacaaaggtgtctgagtagcagtataataggatgggttgagtgggcagctgccgagagtgactgcttaaagggggcagtccttatcccaagtgaactgaaaaaggtcatcaaaaagatgataaaaaaaatcaggctttgcttttctattatttttatgcattgtttttctttttacaggtttagaaagcccatctcatttaattccacctccagttgaataattagttatcgcacacattggtactattcttttggctatatttcctagtaacacaaaaacaagttccacagttagtgtttgcagagaccaaaatattttattgcttctcttgcactggaaattccacctcaatgaaagtatgctgttatgaaaattgaaaacaccttacaatgatcttattcaaaaagaaggggtgccaagagagtagttctattagaacccatatatctcccatatcttagagttatgggagtgttagagggaaacttaataacttagctaagcattgccagaattagcagcaggagttttcagaggctgaaggactgttcttaaaattaaaaactatctacatatgctctcctctctcattttagtaataaaacatcaagtactgttgccaactctcttggagctgtggttagaaactccaagcatttcctatgttttgatgacaaagatatttacttaattcataaaggatgtgtgtaatgtgcactgaaactagattgctcgaccatggaaacagctccagaactttcagagcaattatgcccagcaatgttcaaggttaaccttaatccttttaactgtgcccttctcacaaatcttttaattctattctgcaattaatggaacttttcccccatggtttctgcaacatgaaactctgttctgtttctgcaacatgaaactcatccccatggatgaagctccagggcctcatccatgatcctggatgtggttgttcactgtcctgggtttcaatggaggttttagttggcctttggtctacctttataatttggacttagtcccttattctttgcagcttaggtctctccttttatttagtggacatgaagagggcaaggaagtgagctacaaaggctgttatggaaagaaagtaaatgtgttcgttcttcacttttaagggactgctctcactgtctcatcaaatcagtacagagaataggaaggtcttttttctgaatatttgaaatgctccaaaggaagtgccaaatatagaaaaagcaacataaaatcaagaatcactcataaccttctgattaccctggcactttctatgaaggagtagagtaaagttggcccccacctggaatatagctcctccctacccccaacaatggaccctgcccattgcctcccagttccttgatcttcctaggttccacaactctctttttccttttagttttattccctccagccaaacctctcttattcaatattttgagccaatgggggagttatgtagatttttttccctacacattagctggccccttttatgaccaatgactcataaggcaagatgtgtggtggcatcttcggacaggcagcaggctttaatagggcagcctgggttggtggaggcaagcaaagctaattggcatgcgtgggaatcaaaccccaggccctgggctcattagcccatggtcaaaacaactgagccagaggaggtaataatttgcccaagaatatcagtagttcctttattagaagaaaatggctgatatggaagttggggaatctgaattgccagagaatcttgggaagagtaataagctcttagtctcaacaaaaagtgttttttcatctcagcgcgtaaagggtgctatatgggaacaaagaagtattttaaaattataactactcattctttctttagccttagttaatttgagcagaagccacaacaagcaaaccacaataaatttagaattggcagaaatccacattaactcctcttcccaagtttccacactactaccatttacagttgtaggtttgtaatgtataattatgtaatgcagaaactagctttgacttgtgtaacgatgcactgtcaaagtaagcaaagtaagaattgaaattccacattcccagaatttaacactcagctgctcctctagtaataagttcctggggataatacattaaccaacattggttgaaacatacctgagtaatcatatcaggatgcatgttaagctgataaaacaataagatcccaaaatgcagtagctcaaaaaaaagtagaagttaatttatctcctgggggacagctctggttctcaaattttacaggctcagaatcacctgcagggcttgtgaaagtacagattgctgcgctccgcccccagagtttctgatttagtaggtgttaggctgaaccaagaatttgcctttctaacaagctcccaagtgatgctgatgacttgtaggaatggatttacttctaggattagacttcagctcactctgtttgctgaactctttctaatatttcttaagttggtagactctctgctccaggttctcaacgtgaaggaaggaacccccagctgaaccagcaatgataatgatggcctctctcaaaagagaaaaacaaaacccctaagagactgcgttctgcaagcatcagttctacggatcatcaacaagatttccttgtgcaaaatatttgactattctgtatctttcatccttgactaaattcgtgattttcaagcagcatcttctggtttaaacttgtttgctgtgaacaattgtcgaaaagagtcttccaattaatgcttttttatatctaggctacctgttggttagattcaaggccccgagctgttaccattcacaataaaagcttaaacacattgtccaaagggcaggctgttctcttatttcaatcccaaatgagaggatagtgtggcagagatgaacaaacagcttgaggacgtactcgtgtgctcactgatcaagtcaggctgaagctctcccctctgaatccttgtagtgacttagagcctttccagaggctccctcactttctcattcccatcaggtgagccaggttgaagatggaggctagccctattcatcacttaagaattccctaatcttcagcccctaccatgaccaggtattttgctgatattactgagggacgcctcctaatagtcctttaagctgagaattatcatttccatttaacagatgaggaaacagaggattaaagagatcaagtgccttgcccaagtcacatagtaaatggaactgggatctagacatccacagtcaccagatttcctgcattactcattttaaacgtccctttcagtatatttatgcctagcaagtagcactgttttttcaaaatttcatcgccagtctgggaggagtcgtccccagtgccagatttagttagttccacagctaaagaataagatgaattc

SEQ ID NO: 46 - DNA, 158410 bp, Homo sapiens
aagctttgtgtttatttgttttatttttattttaaaaaccttggacatcataatatgcagactttagaatgagacagatttaggtatgactccaagaactgccaatgctgagggtaagttacttaacttttccgggcttaagtctccttatcaataaaatggaaataatattaacacctcctacattaatgccaataaacactaaacaagacaatgaatgtaatgcacttaatacactgcctggcctagtgctcaacacataatgctgcttattctaaaatttatactttactgcaagccatgtagctgcatgaatcagttctctatttgctgcacatgaaaccataacaaaatgttgtggcttaaaacaacttatttttctcatagttctataagttggctgagctctgctggtggttcttctgttccacatgggagcatttggaatcggtgtgtggctgcattaaattaggagtctggtgcttcagctggggtgactggagtggctggtggcatctgtcttgccatgaggtctctcatcacgagcagtctagctcaaccttctttatggtaggttgggtagctgaatcccaagtggatagatgtgaaagtttcctaggacagaatcatttccatcaccttcccctggtaaagcagccacagaccagcccagactcaagacagggaaaccaactccaactcttgatgggagaaacaatatgcatgtacagaaatgggaggactcatatcactcactactggacacagtccaccccaggcacaagttgcttttcaggtttatgactctcagcttctactctgcttaacctcttgggttggtttgtaataatgtagtgacctctgaacagaaactctggagccagtctgcccttttcaaatcctgcctctgccactgactagctatgggaccttaggtgagtttcttatttccttcatgcctcaggttccttataaaggaaatggggataatgttggtactgaagtggaacttgtgtgaggattaattgaaataggagtgtgtgtgtattcatgcctatatgcatatgcatgcctgtatacatgcgttcatgtatttacatttgaatgtgcaggtatgtatactcatatatgcatacatatgtgtctgcgtatacacctacatatgtatatatttctatatacaatatatattcattgcgtgtatacataaaattgcatgcatagctcgcacagatgtttccttgtttatacatatgtttgcagcctgtacacgagtcccaggctgctttaacctgggccctgccccagtgtatttgagaaaattttatcactgtgcttgagaactggtcttcagctgggtgttgaactgggacctcccgaggccaatgcctagtgccttctccaccacacgaatggttgccaagactgcccttgggacgcatcagaagtatatcagtgggtcttggtaaaatgcagaatcctgggccccaccccaggcctgctgactccaagagattgacctagaatctggttatttcacgagttgctccggggtgattctgatagaaacgtcataggcgcttctgatcgtggcgggtccctggcagcccatgcttgccccagcagtatcttctttactctctggttaattcattttcctttccctccccagaaaaattgaatgcattctcttcatgcacaaccatgatctcagaggagtgcagaacacagggccagtttcacatttggagttttagtttagtttagcttcccgcatcattgagaaagacagggtattctcacctcaccacttccaggctgagctgacgtcaagtttagctgtgagataaccagaccaccctgagcttccctcccattcacagtgagctgatttaccccaggtccagcttctgggtgatatgacctcattgctttgtaacttccccgaggccttcccactaagaaaattacaactgctctttattgagcattaatactgtatacaaacgttgcttttcttattacttaccatgtagaaaaggtattattaccccgaagctaagggataatagcttacaaaagggcacagaacaaggattcaaacccttatgacctaaccggaaaaacccctttctctttctactatactggcagggagatatgttaagatttgttttcatggccccaggtcctaaattcttcctaaatacttctctttaatatatgtgaacaaaaacctgcagggatattttatccaatttcaaatgtacagattgtctttggggttacaaacaagcaccagaaagtcaggagccaccctggcactggctgacgtgggaggtacagaatgaggtgtccgtccctccaaggcacggtgacctagaatcccactgctcactgcctgtctctgttcagcctttcagttcataaacatgctttcctccctgcattttgacatccatcatcgtttaaattccaggtcgtcatccttgtagaacgaggttcggatctcggcattaaatctcccccacggtgtgtgcggggccttgccatttgcagaacacttcctgagccttggcttatcctgacagctgcgagaggttaccctgtttgtgagtgaggaaaagaaaggctcacatggtggtatcattggcctagctttcaatccaaacactagtcttaccatggataccagaaggtcttccgtcaaattgatcaaaagctgattgtgtgagggtgtaagccaaccctgagatcaaattagggtaagaggctggacccttcatcaggagctggggctcctctctgcaaatactgtagaacatcagcgtcactgaatgaatggagttggttacctgaccagctttcctactcaacatggagctctgtctgtctcatctctctcgattcttcagtgcataacccagttcctagcttgtgatggatccttcctaaggatgtattgggtaaattaatgaatagtgattcgacctaaccaattaaatccctgggagttttaaactcttgtccaacatcagttttatttcacgtcttattataaaacagtacatacctcttccagaaaaagtgaaaaacccttatatcacttagatgtaactaattaaacaaactgatgcatgtgtgtgtgtgtgtgtgtgtgtgtgtgtgtgtatagttgtatggtggtatatatattagtttgtaaatagctcttctactaaatacatgataaatatactttgacatcatcatgtgtacttctactacatcaccatttgactgcttggacaccagacttcaccgttgttcagacctaagtggcaaaaccctttgtatttttctaagtgtctaggcagacatttaggaaatgaattcaactttggcactattataaacagtgttggtatgaatattcctaaagctaaatctttgtgaatatgttttcctactttatgaggacatattcccataaactagaatggctgaaacaagggctggttaggctattgaggttgcggagtttcctttcaaaaagtggggaccagtgtctccctccacccccagcatgacagacgaccatgtcctcgagccctccacagcagggcttcagggtggatttacctttccagcctcatctgtttggcacttggtattgcaccagacgcatggctgttctcaggccatcatcccttctttagagggtctccttcactgcttactgtgtagtgagtgcccttttattcctccttccagcccttgctttgtgcaacacacatctcagatgaattaaatcatgatttgtcttgtttggaggggagcccaagtgagtcagttccctgttgtgtcccggtggccagcacatattttatcatggatagaagcaatggctcacgtcagaaagacctggatttacaatgactctgcttcttttctcgcctgagtcctggctttttcatgtgagaaccccctttgtacaattatgataaggtttgaatgagatatggcagggaaaggctcaatacgcagctcaacacaggtgaatgctcagccattgttgcccaggctcaatggctgggcagggcagttgactatgtgttggacactgtttacgtgtccaccaggggtggtcaaactatgcctcatgggccaaatctgtgcccaccactgtatttgtacaatcctagtgtgaaaaatggttttcacattttttagtggtagtgaagcaaatcgagagaagaagaatattttgtgatatatgaaaattacatgaaatgagaatggaaatttcaatgtccataaataacattttattaaacatagcagaccctttttcttaacatatctcctatggctgcattatgttacaatggcagagatgacgaggggcagtaaggccaggtggcctcacaatgcccaggatattgagtatctggcactttataggaagagtttgctgacccctgggttacatgtgtaagctcatccaatcccgcatagtgttggcagttatcataccatccccattttacacatggggaagtgagatgcaaagaggttcagaaactacctgaagccacatgcagcatggaagtggtagagttggggtcttgttcctagaactgggactcttcatcgttcagccatagggtaagtcattggtctttgcaggtgagggattgtgaggcaggaaaaaagaaagtcatgcactaatgtatggtagaataagaatttagaggctgggcgtggtggctcatgcctgtaatcctagcactttgggaggccaaggcgggtggatcacaaggtcaggagatcgagaccatcctggctaacatggtgaaaccccgtctctactaaaaatacaaaaaattagctgggtgtggcagcgtgcacctgtagtcctagctgctggggaggctgaggcaggagaatggcgtgaacccaggaggcggagcttgcagtgagcccagataatgccactgcactccagcctgggcgacagagtgagactccgtcaaaaagaaagaatttagaaccaggttcgttggcctcaaagttcttggtctcgctctcatgatgagctccttccaccactctagtctcctaggatcacctgctaaacgcagggccagacacacagaggcattcaagatatccctataaatgcagccacttcatagcaatgtcaggactaaatgtggttttgtacttcctactaaacatgagcttaataaatgtttgtggaataaacagatgaatctgatgaatagttcctggactctcggagtttaaactctgggaacagggcagggactcctgaggaaagcagacaactcctcaaccttctcatgggagggaaggagaccttctttcctgaacaccaattatgcttcccaggtggcatggggtccttaggccacaatgccaaacacttttgcagttaaacttccgatgaaggaaaactggtctgtcttctctgcccattacaattgtctttactctttttgattctgaatgttcttttttctttaaacagctttgttaagatataatttacataccgtacaatttaccaattttagaatattttcctcatctcaaaagaaagtctgttccctttagatatcacctcccaatctcccttctatccccagtcctaggcaactacttttttttttttttttttttttgagacggagtctctctctgtcacccaggctgtagtgcagtggcgtgatctcggctcactgcaacctccacctcccaggttcaagtgattctcctgcctcagcctcccaagtagctgggactacaggcatgtgtcatcacgtccagctcagttttgtatttttagtagagacggggtttcgccatgttggcgaggctggtctcaaactcctgacctcaagtgatctgcccctttcggcctccaaaatgctgggattacagacgtgagccaccatgcctggccatggattcgcctattgtagacgtttcacgtaaatggaaccacagaatatatggtcttttgtgaggaacttcttcacttggcataatgttttcaaggttcatctaagttacaacatatacttcattcttttttatgcccaaagtatattccattgtgtgaatatatgccccattttatttattcattcattagttgatggacactgggttgtttctttgggggtggggctgttatgattaattctgctctgaaggttcgtacaagacttcgtatggaggtatgttttcatttgtcttgggcatgtgtatacctaggagtggaattgctgggtcatatggtaactctatgtataaccttttgagcaactgctaaagtcttttccaaagtgtctaccctgttttacattcccactagaagctgctcgttcttgggctcattattcgtgtttatctttaaacacagaacgtgactccattcatatgacggtgctagaagtcagtacagtggttttctctgggacgatggcagaggaaactatgaagggcccaggaacactttctgggaaagggaaatgttctgtgtcttgctggtttggtgcatttgaatacttgcatttgtcaaaactcatcaaactgtttatttacaaattgagcattgcacggcatgtgacttatgcccgattttttaaaaaaatgtacaaatgaaaaaacatagaaagagaggaaaaagcaaaatatctgtattttaattatcacatgacctgactggctgcttatcttacccaccttcccatggacacagggccagtgcctggcaggcaaggccacgtgcaagaaaagctcttaattgatgtgattaactacatctcaatagggagcctggttaacaacaggggagtgaaaaggaggctatttttcactctcccaactggtgaatgcctggaaggggtgatgggggcacttggagggctgccccctgcggtgcagggggagacaggacagctgctttttcctttggcattaagataattttaaaaaattattttctctcaattgctacaaaacctactcttcattttcatctatgaggaggaagaaaccaagttaatttttgtttagtgtgtttctgaaggccacattatctaccagaacacaacatttcctaggatactctttaacccttcctaaatgcacctgttcagaggagcaggcaacaacaggaaacaaacaaataaaaaagaagtgaaggatttcctctttcccccttagaaggtggaaagaaatgtatggattgacataaattcacagaaggtgagaactgggcaagcaaacacattatccatgttcttaaaaaggcaaaattatataaattttgataaaatttctaaaatagtatcatgtcatttgtaggctagaaaaaatatgtatttgctagtaaaaatatagacctataaaaacaccattacttgggggaggatgtggttatttgtgtattttttttcttattgctaatctgtgatttatttttttccaataaccactagttgcttgtgaattaaattgttgagaaattacttgggttgttatttctgatttgagagatcagtttcctcagtctccccctttctagaacaggcttccttctcccatccctcctgtgtttaaagctagggaactttcaggcagcactgcacagggcactgaatgtgaactttgtggttagctgggtcagggtttgatcttgcagtatctggggcaagtcacagatcttttctgtgtcctggtttcctcactggaagaaagggacagataatgctctccccagtggattgatgtgagacatactaggaaatccctagcacagtacttggccttttgaattagtttaccctttctttccaacctacccctttatcctggtctttcctggcaccatgaaaaccagcactcagcagtacagtttgatgacttcttattgctaggtttcatctgtaatcgttgcagatgcttaaatacacacgcaggccaggcacagtggctcaagcctataatcccagcactttgggattctgaggtgggaggatcactttaggtcagaagttcaagatcatcttggccaacatgttaaaaccccatctcaccaaaactacaaaaattagccaggtgcggtggaggacgcctacagtcctagctactctggaggctgagacacaggaattgcttgaactcgggaagtggggattgcagtgagctgagattgcaccactacactccagcctgggcaacagagtgagactctgtctcaaaaaataaataaataaattttgagatttatgtgtgtgccagacacacacacacacacatatgtacacaagcaatttttgtgtgtgtggctcaagccaggcagagaaagacaaatactaaatgatctcactcatatgtgaaatctaaaaaagttgatctcaaagaagtagaaaggagcctggtggttatcagagtctggggagggggttggggagatattggccaaaggatatacaatttcagttaggtaggaggaataagttcaagaagtcgattttgactatagttaataatgtgttgtattcatgaacaaggctaagagagtggatgtaaagtgttcttaccacaaaaaggataactacatgaggtaatgcacatgttaattagctagatttagtaattccataatgtatccactgtgtccttcaaaacatcgtgttgtaaatagtaaatacatacaattttatctgtgaattaaaaaaaaagattaaagaaaacccccatccccacggatgagttaagactgatcactgacggagctagtatgtattactaaccaaagctagaactcattgccgcaagcatctgggtgacagcgctattgatagtccttcctgcagtacccgtccctggcagaaacaccttcagtcttcaggctgggtgcccaatgatatgctagaaatattaactcctcctgtaaatcaccagaggggatgcagtctcagactgagtttgagtattgttttccgggcctggaggaggggctcagcagagagcgattcatggttttacaaaatgtatttactctggtggaacgtgtgggctcacgtgggcagaagcacatttgcacacatgcaaaatgtaagccatgcaccgtcatcttttcacccttgtttggtcaccttttaaccctccttcctcctccctaattgcctcccccagcccatttcctcagcctctttttatggcagtggttttcaaacctcagtttgcaaatgatcatctgggaaatgtgctataatggagattcctgggttcccccaacagattttctaattcagtggttctagggtggggccctgcctgcaaatgacatttttaccgaacatctgagagagtcccatttgaccagttaagtgctataaacagaatgtctgggacttactgatatttcaaagacccacaaacaaacttgagaacaaacatgtaaaattcttagctgaaaaatatgaaaacaaaactgcaaaatagaaatagttatactgtatgttttatagaactttatgtcaacttgtcaagttcgcctcaacttttacagttacataggaattattttttaatgaaggatatgagtgcaattaatgcatttgatacaatgtgtgtgaggcctacaaaagccttataaaagctgtcaccccatggaccctgctctgagaaatatgcccttagatgatttcttgcttgtagcattttagatctggaaggccccttagaaatgtgcttcttcaatacccagattttactatcagagaaacagaggcctacagggggaaggaattgcccaagtttacacagcaagttcctgaagaggccagactagagtgaagcatttacaatgtacgtgcatgtgcatgcgtgtgcaagggctggttacatccctctcagaagtctcttcttttttattttttatttttttttgagacacaatttcactctgtctcccaggctggagtgcagtggtgtgatctcagctcactgcaatctgtgcttcctgggttcaagggattctcatgcctcagcctccagagtagctgggattacaggcacacgccaccacgcctggttaatttttgtatcattgacagggttttgccatgttggccaggctggtcttgaactcctgactgcaagtgatccacccacctcaatcttccaaaatgctggggttgcaggtgtgagccaccacgcccagccagaagtctcttcttcatttctctttcactctggctgtttttttccctttggtccctatgttctcaggccagtctgaaacttggccctgaaccctgagggtaagggagaaaggttagtggggggatctcagggttgaaatcaataggcatagtatctgtcaagaccagtcttcagcttcaagtcttcagctctcaagtccctgtagggggaaagagagaggaaatgcaccaaggggggaagaagtgctgagtcatgtcacttcaagcagacacaaaaaactggctaacttcttagcagcccactgagttccgacaatgtgctggacattgtgcacactaaattaagctgacggagtccctgccctgtggaacctttcgttcattcacctactcatttcacaaatatttgctgagagtcctactgtgtgccccacactgccaacaaggcagatagggagcttagaacctagtctgtgacacaggcaacaacagatgacagatccataaacaattaaggcatttcagttaagatatttcagatagtgacaattactatgaagaaaatagaagaagataatgagaaggaaagtggctgggtgcagagcatgccattttaaaataagttcttgctagttgaatggatgaatagtaaattccatgtgacctgaaaggggatatacttaggccatttattgtttctgactctgccttccacagggtaagactgaactttcttacccattgtgagcaattctggccaaggagtagtgagcagaattgacatgtcatttctggccttcatgttggaattctagtgagaaaccctccagaggtcattctctcttctggcctgctgctgatcagtgctatgtgtagaggctgccacgttggcctggtctggatgatgctgagattgagcatgatctcaggttgacctgtgatgaacatgcagctgaaaaaagaaatgaatctttgttgctttaagccactaaaatttggaaagacatgttagtgcagcataacagcgtcacttctgactaatactaatacaacctgcaaggcaaaataagtttgaactgtcactctggatccattggtaggggttttcttggccctgaatgggaaacaactctgaggtcccaactgggcctggtaggaaagtgggctctaatgacttggtgttgaccaccacgcctgtaggtgggaggtggcagctctggtaccacatgcctgtcttcctactttaactttcataaaaggttcttaccaggatctttttctagtctgtcctgagcatctatcctcacaaatgactctcatcagctgcactgctttatgtggtcttcactcgtctctttcctagtgcagattcttctcattgggttttaaggttctcaaaattctgaccctaacacaccctccctcaggggacttcttgctggccactgagcatccaatacccctcccctgctctaggccttcatcactgaatgctatcctttcaccccaccccctgcaaacctacctgtcctgtgggtatcctttaaatctggctctcagaggactttcctttgcagccacagtgaccctgctctcctgaacccagaccacacagtgcccacactcaattaatctttgacaatcttgttttatcttatacttcattgctgcatggttatctaacaatcctcatgttgaagtctcgactccctaactcggttatacactcaaggaatggcctgggttttgcaatttctcactgcaacgtcttggtgataacaggcacttgagaaataagtttttaaagagttgattggattggtgatgtggggctagagagtagaaggggaaaactgacgtggagtcatctaatgggcattgtccagcccattctgcctgtcctgtctccaaggccagtccttccttccacggctggcacagtccccgtgtgatgtccccttcctgaaatggttagacttctaatcaaaaggtctatattggagcagctcagtacaagccattgcagtgggaaactcagaaaaggaacacacaggatgtcttggcaggatgagactaggcagcaattcgactttaggggaaaggggaggcttcctgggggaaaggatgtttaggctcttcccagaaggaggtgtggggattaacccaacagaggagccagaggaatgctctgtggagatcccaacccaggcctgggctggagaactggagttaggggtgagctggagcaacctgtgaccagcgaccagggagggggctggaggagtgatgtggggcctccctgcttgcaggaaggagtttgaccttatccttagccctgagggatgccccagaggggttttaaggatggaagagactgatcatgctgtcttcatgtccttatttcattttctgcctttcctcttctgactctgctcttatttttctattcttggactaacatactttgtgtttttttttttttggttatcttatttgaaaatcaatataaccacatctataaaaacaattttaaagaatgcccaaatcccagagccatcatctcacccaattacaactcttgccttcatgtctgcttggcctcttgccccctgttcctgctgtgcatgcatacattttacagggatgtgtcctcagtggacgtgagattttttttttctgttttgcagttttttacacaaacattttcatttgttgttcctgtttttccttctttcccaggaggctttaggctcccattctcctctccctggctttctctctgtcccatccaccgctctacccttcaggcctgcctatatgaaagaggtctctttctatgcagaaaactcactttaacaagatgtgggtgctcttacacagacctcatatgaggaaaatagcacatcagtgaacttggggtccctgggagtcacagtgatgttcaccagaaaatcagacaacggtaatgtacctcccccatcaggttgccaaaaattagaataggttttgtgttttttgttgttgtttgtttgagacggagtcttgctctgtcaccaggctggagtgcagtggtgcgatctcggctcactgcaatctccgacttcctggttcaagtgattctcctgcctcagcccctgagaagctgggattacaggtacatgccaccacacccagctaatttttgtatttttagtagaaacggtttcaccatgttagccaggatggtcttgatctcctgacctcgtgatccacctgtctcggcctctcaaagtgttgggattacaggcgtgagccactgcacccggccagttttggggtttattttaagaatgtgtcagagcctggcatatgcctccattgccggtggcagcataatttgttcttttggagtaacaatttgtcaagaggcatcaaagccttactttgaccttgtatccctatttgggaagtttatttagaagacagtttccagaaaatgagaaagctgtgtgacaaaagggggttcttgcagcctattgcacttcagggcaaattagaaacaaagtggactccagggtccttctgtttcacggaatctttcccagacatctgaagggtcatcatggagaagaggcggcaccttaaggacagcagtgacaatctctgatgtggcaattacataaggtattgcgtccttcctgagattacacaaaacctgtatagagagaggctagctgttcattggaaaaatgaaggttttgcctacttggaataataagagcatgacagcttctttttttctcttctttcatctcatctcttctctttttttatagcttgtcttattcagttaaacttcagtcattaccatagaataaagtaaaaggcaatatatattgaatgtgtaaggcccatgttccactaggaatgacgtcacgaaaggacagcctgaccctcgctgctgtatcaggcatgggcacagcgcacactgctgcactcaggggtcagagcaggaggtgctcctgggtttcatgatcttgctttttgtccctcatggtcatgtgtcatttcatctgcaccataatcgtgctgggtgggtaacgtaaatccccattttatagaggagagagctgagtccttagggctcctggcagttgccatccaggaagcccctgctacgttccaagcttagaatctccccacactatctccttggatgctcacataacagctctgcagagccactcttcaaacctgctcttcatgatggggaaactgaggcactgtgatttgccaaagagccgtagccagtaaggatcaaggcagcattcacgcctgggttctctgactgtaaatctggctgtgtttttttctttcgaattttattatgaatgccttctttgttcattgtcattattatcatcatcattgatctctaccaggccccctacccccagccacttgcctcctctgttgcaagaggagatgaggagacaaatgtggaatttttattcccattcccttccctcctccataggcagccactccagtgtgcttgctgcaggccctgcatgagggcctgcatgaggatcctccctgtcttgttctgattgggtatctgtttttaatttagacaaatgggattctgctatagatctcaatttggttcttttgcttactcaacactctttttcagagccagtcttggtgctctgtgttcacctggttcatctgaggagctgcatctaccctgcccatgccatagatcctgccctgtttgcttctcctgttgctgctagtggacatgaggtaaccacagcctagttctgtgataagctcttcacacctgtacccatatggactgtgggagagtttctctgatatggactgtgatgcgggtgagtcatagtgcacactcacacttaatttcacaagtactgccagattgtgttccagaatgactgtaccagtttacacttccacaggcagtgctcaagatttctgtttccctctgtcctcgccagcacctggtattggcagatgcatcaaaaaggatgcatttgacagctcaaccacctcagagcacttgattagcatccctgtgatggccctttctgctgcagacatcactttgtcataacagcattttgagcaggaagaagcatcaggcaggaaaaaaggggcccttttactgtgactccctatcttctgttagggaagaaaattttccccagaaatccccagtagacttcccctatgtctcagtggccaaactgggccaggtaagctcccagccagtccctgacagagataacaagattgtcatggctgtttcaagccagggccaattcttccccctgccatggactttttttgagcacattgctatctcccttgtccctgaatagaactgggaatattttaataaagaagaagagaccagtggctgatcagtaacttggcagccaacagagtcttctacatcagagttctgcatttgccaactttttgcatgcatgctgcctcttctatataagggatcttcccccacatctgtttgatttgcagagaatgtcagaagcggcgagtcactcatacatgtccattgctttggggattagatccatccagctcattttggaaacggcaattctttttgccaggcagacatgagacccatttccacaccagctgctccagctgaggttcccatgcaggttctgcgtgacagaaatcaatagaaagattcgaagggcagagcaccaaagttcctgccctgcaccatgatgtcaaagcagaatgcctgctgaggacaggtgcagatgaatacctgtcagagagtatcacttctgcaagcagcaacttccccttcttgtcagccacgtggatgccatagtaaccttgtgtttctggctagctcaagaaattaatttataggatgtgtgcagcaggtcatgcctgtaatcccagaacttttggaggctgaggcgggaggatcacttgaggccaggagattaataccaccctaggcaactaaggagacccccatctctataaaaatttttaaaaaaaaaaagcagttttggtggcacatgcctgtggtcccagctagttaggaggctgaggtgggaggatcgcttgagcccaggaggtcaaggctacagtgagctctgatcatgccattgctctccagcctgagagacagatttgagactctgtctctaaaataaataaataaataaataaataaataaataaaaataaaagaaatggaaaccgtatagttataatttgttgagcacttatctttgccaggtggcctgggaagcattttatttctacgatctcatagatatctcttggcagccctctgagagcattgatatattattgctacatcacaggctcctacagaatcctgattctgacaattatcagccatgtggccttaggaaagtcacttcattttttgtaccttagctttctcatttctacatgaagaatgataatagtatattgcacctgctcacagagttaataaacataaagtgcctagaatggcacttgatacttattagctactattgttgccattttttaaaatgaagaaattgagaggttcagaggggtcaatttgccaaaagttagttattaagtagcagggccatgatttgaatccaaaagcttctggctccgaaactgggcttttatccaagggaacatcaccattgcgcccctcatcagtagaatcaattttcaggtgaagactcggtgacaaagaccacaaagacatagtgtaattcttctaacacatgactggatcatttctggaaggtggctggggacatggatactgggccacagaacaagcatgcatgggatggaaaagacacagcgctcaattcctaatttgaccactcaatcttgcagagcctccacctccttatttttaaaatcaggttttcattatagttcctcccagcaaggattttaaaagtgccttataagctgaccatctccaggttccttattccaaaattaggattttatatgtcactttatattatgtgtctcatctcagtttccacttacactgacaaaaagtctaagagtcatttccccccaactccattttagtcaccgcgaggctcaggaaaacagaatttcagaatcttctggaagagatgtttcctttcttaaccaagctaaatggactggaggcaggcaccgctggtgtttttagaaggctggttaaccacagtgcctagcggtttggggaaaaataaatcaggtagctttctgtggcacgagacattcccttaccacatttgtccacttgagcacttttattttattttattttatttttatttttattatttttatttttttgacagagtctcactgttgcccaggttggagtacagtggtgcaatctcaactcactgcaacctccacctcctgggttccagcaattctcctgcctcagcctcctaagtagctgggattacagttgtgcgccaccatgcctagctaatttttgtatttttagtagagatggggtttcaccatgttggccaggctggtctcgaactcctgacctcgagtgatctgcccttctcggcctcccaaagtgctggattacaggcgtgaaccaccgcacccggcccacctgagcatttttagatgtagacctggtgatgggtctgaggggcagcatgttctgtctgaatggggatctcaagctcagtgatgtggctttaagcaaaaaggatggcttcaaggtctagatttccttgggagcacgttttaacctaaacctgcataactagtaactcgaagatcttttaattttattgttttttaatttaactgaccccgttctccctccttttctccctccatcccttcattcctccctcccttccttttgacacaggtcacccgatatagaatcacacacctgggagatggcaccagccagtgaggctcaaatttgaaccacacacaaatctccaggggtacttggtaaatgcagacttttgaccaatttttcggcgtggggctgagcatctactctagcaatgagctcccaggcagtactgatgccgctggtccatgcatcaacccacttcaacttgtgaggaatggtctgctaccctccctagccctcctcatgcgccaacccatttcaacttgtgaggaagggtctggtcccctccctagccctcctcacacaggcagttgcagatactgtctagaataccagattgattgtgcacacatttgaccttcctgaccatcctgggagctgtgagaataacaacaatttttttttctttttttttttttttaagatgagaaaactgctagtcagagatgctaaaaataactaggcacagctgataagtagcaaagatgaaagtccaagtgcagaggcagttccaagtctctgtagtcttctccaagagctgatggatgaatgtggccctcctgggatggaaggtgtccttgtgctagtcatgaacccaacagaaagcaagtgccattttctcttctcttcccctctttatctctgagatcttaacttggctgcttcttttcagaagacagtgatgcactgtattcaagtgatagccccagcagtaacattgatgcagagaaaatggaatactttttacaagagaccagaagacacatgaagctagaaaaaggagcccagaaaactgccacattttgcccatatagaaaagcatatcccgaccgggcacagtggctcacgcctgtaatcccaggactttggaagcccaagatgggtggatcacaaggtcaggagttcgagaccagcctggccaatatggtgataccctatctctactaaaaatgaaaaaataaaaataaaaaaaaaaattagtggggtgtggtggtgcatgcctgtaatcccagctactcaggaggctgagacaggagaattgcttgaagccgggaggcggaggttgcagtgagccgagatcatgccacagcactccagcctgagtgacagagtgagactgtctaaaaaaaaaaaaaaaaaggggggggctccttcccactcatttctcccataacatgtaatgctttttatagtgatttggtcactgctgagctatcttcatttaatgtggttttgacagaatagttggtcaggaaaatttattttcaattaaaataacttgttgaactgtctcggttttgaaaggattccgttaggatggctaattatatagcggttgctacaaggagatatttgcactcaatttcagctcttaggtaattcaaatcaaatgcttgagattttcctccctggagctgtgtgcaaccatcttcctctcacactgcaggcttcccatgagttatttttagaaacccaaatttaagcagcaattttggcagagccatttctagtctagtggagtaaaccatatgtactgataaatgcagccaaagagttagtttctttaaaaagtaacaaaaccatctctctccgttcatgggggttatatgtttacaaactgcaaactatccgttgtactattatattcatttgtgaactctagctgaagtgagagatcatggatattactttaaaattacaaagatgtgtccttttgcaaactgttgtcataatactctttttttttcaagatggcaggccttggcagaattgactggagactctgttttggcctttggatttcccgtgaaacatggagatccctttctttattttcctactctgctctgatttcttcattcaccagagcacttgtaatatatctcatcatgcttataagcaggaaacctcctccttctgtgttagaacatattcttgtggtcaggggctggatttttttaccttcttcatgcctggcacataatagatgctcaaatagtgcatgaatagatcgatgaatcattaaaattatatttctattttctcctttttttaaaaaaaaatcttttattacgtaaatattaaatgattgcattcatttcggaaaaattaaaaattttccacaaaaggccaaagtccttttagctcacccatcttcaatccttgtctcctcattagttctgtgtaggtcatgtttgttatcttttagagcacattcctgcagaccattctaattcatttaagtgtatacgcatgcacatatacacactgagtactattgtgtacacctctggtagagtattttgcagtttaccccttttcactcagcaatatattgaggagtgctatccatggtagccactctattctttttaactgctacattgttctattgtttcatgtggatgtacccaccttttatttggaccaaatacacaaattatttatctgctttcccattcattatacttacagatcgcttctcttgtataagttgacaaacccagccaggttcactgctatcttttggtagctacaacacattttatcaaaatcagccacttgccttagaaattatatcaaaccagtagacagattatgtaaaattcgaagtgttgtcagagggaccagagtttcctttgtcctcacagtctagagaagtaccctgtgctctgggaaccccacagggttggatagtgagtgatgctgaccaccactcactctgtgttgtgacacagtgatctggtgtctgctctgcccacagccagctgggtttccttgagcagatcatttcttctcccgggacgttacttctcttatctgcacaatggacccagtgagcagcctgaagctctttagactgaataactgggcctacacactgccaccaggattgacataaagaatgtcctgttagctcacccttcactatatgttggggtggggaagggcaattcctgataaagttccaagctccagcccagagctctgagctgagacaatgtctcaaagagcccatgagtggcaaggaatgtattgtcttcagattttcctcctctttcctactattttaccatccaattaaaatgaatatatatttttttcttttgcttaggtttgtctttgttctaagcaaggcagtatgatgatgggaaaaaaggttgtggacccctgaattctacttccaaagttgtttaattctagctgtgtgttcttaggcgagtcgcttaccttctctgggcttccgtctattgacatcacaattcccagtgagccaggtatccactaaaatgacactgaaaagttgaaaaccacactcgcttatgagtgattcatttggcatttgtgagccttgtcacctgcaaataggtcatctcatgaactgatgaggcatcctcagagaccacgagagcccatgaaatcttcttgtttcacaggagaatttgcagctgtcctggcccctggtgacacatgctaagcccttcaggggcttctgagagaggcccagagaaggtgctgagctgccatgattcacaggtgaagttttctcacctaggccctgaggctttgtggtggatccacggcaaagggtattcccctgctttgaggctcaggaccacagaggtcacaggatctgattcagatgccagcgggtttccctagggggcccaatgaggctttccatgtagggcaagagttatggctccctgctgggtgtttcacatgggtcagcagactcaatgtggttctgaaggtgaaaggtcagtgtaaatgggtgtgaagccacgtgggaggcatagcccatctaagtgtctggggttttggttcccctagtcccagaactttgttttttgcccctactgtgagtttctgttcctgaacaccccttagttaagtgttccctggttgagcaggtttctaccaaaggagaccaaagctcagtgcttttccgctgctgagctcgctggggtaggtgactaaccctctcctagcatctgcttcctaacctgcttgggcttcagggggtgaaatgagattctgcaataggtgctcaatccacatttcttttatttcccttttcctgttttatatggaaaaaaaactcataattttataagcactgaatctataactgagcttccaaaaacccaccctgggcattttttcacattaaccaagataaaccaaaaaggcagtaccacgaatagagaaaatgtcattaggaaggtgtacatgataaattcgttttttaaaacaggaatggtgatcgtttccatttatcaagcctctctgcaaatttttcagcagctgccttcctcattttaataaaatgcttgcagatctggtttgcatttttgtagataaatgtagaacaagtcacattgacactccctacatctgatcatcctcccagccatcaataccattttcattcacagcctggaatctttaagaaatgagtcaacctgacctatgattcacagatacttgatctgaaatgcttggtggtgtggggttggtggatggggtagaaacaaaaataaatttcctgacaccaaaagtcagttcaagtgaactagaatgggcagagaggggtcgtggggatggttcctgcccttcaggagctgcacttccaagtctgacttagggtgatcacacatccaggcttgctggtggagcttcagtttatgcctgtggtcccagcctcttaaacagttagcgtgcctgtccacgattagaaatgtcacacgttggaagatgtagggttctgaggagagtagagtggcagttcttaaaggccagagataacatttaatcatgtgtatctccagtgcctagcctcttgtaagaaattaatacataaatgcttgctgggtaggcgagtgagtgagtaagtggtttcttaaactcccctccttgttctctaaattatttctcatttttctttgcatgtttgaagcacctggtgactctactgggttctcaataagtatattttgaataagccagaggttcagagatcagtttcttacttgcttgtaagcaaccccatgctctctagctctgcgactttgagtgggttagcccagattacttagaacttagtactaagaacagtggcttccacgtagtcagttcctaagaaatggtaatggaggaggtggaggtggtgttattgttattagccatctagctttactgccagtttttgtcttttctccccctaactgtaggaatcgtagactatatatatataagacctcatatatatttttagaagataagtcaaatataagaaattgaaaaaatgaataaaatagttatcctaatcttgtgcccttggtaacatactatcaattatcattatcaatgtgctataccccatttatgtccgtttataccagtgttgacagggtctcactttgttgcctaggctgccatgcagtggcgcaaacatggctcactgcagcctcgacgtcctgggctcaagcaattctcccacctcagcaccccccgagtagctgggactataggcaccagccaccacacttggctagttagggtttttttgttttgttttgtttttgggttttttccttttcttttctttttttttttttttttacatagttgttatcttaaggtgatttccaatttttttttccatttacatttttccacaagcattgtccactttattctgtaaccttttcaactaccattttgaaatttgcttttatccatgtggttgtttgtgatgaactacaggttgctgactttcttccccttctgtaaataaagttttcttcctagtatgtcctgtatctcaagaggatctcatcagtggaatcattagatcaaaggatatgactgttgctcagctctctgtgtgtatgtaaattaataggctgtttatttgagcagttgtaggcttacaaaaatattgagtcaaaagtatagaattcccatatattctcctcttctcccgtcatatcccctattattcgcatcttgaattaatatggtacattttttacaatttatgaactaatattgatacattaagagttactggagtccatagtttacattgggcttcactctttgtgttgtatagttctgtgggttttgacaaatgcatagtgttgtgtacctaccattataatatcatacaaaatagtttcactgccctaaaattcccctgtgcttcccctatctctcctcattactccctctctcacactaacccctggcaacccactaatctccatagttttgtttttttcagaatcacacagttggaatcacataggatatagccttttctttttttctttctttttttgagatggagtctcactctgtcgcccaggctggagtgtagtggtgtgatctcggctcactgccagctccgcctcctgggttcaagcaattcttctgcctcagcctcccgagtagttgggactataggcacccgccaccatgcctggctaattttttgtatttttagtagagacagggtttcaccatggtagccaggatggtttcaatctcgtgacctcgtaatccgcccgcctcggcctcccaaggatgtagccttttcagactgattctttcacttagtaatatgcatttaaggtccctccatgtcttttcatagcttaacacctcattcgtttttagtgctgaataatatttctttgtctggatgtaccacagtttatttaccctgtcacctactgaaaggcatcttggttgcttccaggtttttggcaattatgcataaagctgctataaacatttgtgtgtaggtttttgtgtggatgtaagttttcagcttatttgggtaaatatcaaggtgttctgttgctagatcttatggtaagaatatgttttgctttatagaaaactgccaaattgtcttccaaagtggctatatcattttgcattcccaccaacaatgagagtccctgttgctccaaatcctctaccagaatttggtattcatgttttggatttcagcattctaataggtgtgtagtggtatctaattgttgttttaatttgcacttccctgatgacatatgtttatttgccatgtgtataccttcttcgatgagatgcctgctcagttcttttgctcatgttttaactgggttgctcatttccctattcttgagatttaagagttctttgtatactttgtataaaattcctttaagtgacatgtcttgtgcaaatattttctcccagtcaatgccttgtcttttcattctctttgtagtgtctttgcagatcagaagtttttaattttaatggagtccaggtcatcaattagttttttcatagattgtggctttggtgttgtatctaaaaagttattgccatactcgaggtcatctaggattctctcctttgttatcttctgagagttttatcgttttaaatttacttttaggtctatgatgcattttgaggtaatttttgtgaagggtttaagatctatatttagattctttttttgcaaatgaatgtctggttgtttcagcaccatttgttgaaaaaaattatctttcctcgattgcaatgtctttgctcctttgtcaaaggtcagttgactatatatatgtgggtctgtttccaggctgtctgttctgttccattgatctgcttgtttattattttgccaataccacgccatcttgatgaccatagctttataggaagtgttggagttgagtagtgtcagtcctccagcttgtgtgttcttttcctgcagtattgtgtcagctattctgggtcttctgcctcgctataaaagaatcagcttgtagatatccacaaaataacttgctgggattttgacataccacagattgtttatctattcacttattgaaggacatcttagttgcttccaatttttggcaactacaaataaaggtgctacagacattcgtacataggtttttgtgggaagaggaaatctactcatttgggtagacaccaaggagcgcaattattggatcacatggtgagactatgtttagctcattaggaaactgccatagctatatgttttttgcatttgttcagagatttttcgttacaatgtcactaacatgattaatcctcagaataaacctttgggttgggggttattagccttgccttctggctaatgttattaaatgttattgctgaaagaaaccctgaaggttcctaagcctctaagctttctgagtgtgagatccacatcccctatcactgctcttctatggcttccatggcaccgtgagtataatagttgctgaattagtgtccactacacactgaataccaataatggaaaaaccacttcactgtacagatgaaaacacaaaggtcccaaaacgagaaatgagatacttctggccaaacggcattttaactagtaacagaaccaaggctaaaactaaactattgtagatccgtagacctgtattttgagccaccagtccttgactcgctacattcaagcaagacaagctggaagattcttaaatctgtaattagtattgtattgaacaccccccctcactttcaggcctacccactactgactgccattaccagatagcccaaagacgcccaaaatggtgttctaatctgagtacaaggccactatagctacaaagtctcatagggtaatgagtgataatagcagtgacaacaataataaaaatagccaagaattattgattgcttagtattgtcagggtctttgcatatattatttcattttacactcatagctgccccttggttcaacatcattactagccacaatttagagataaatagattgagctttagggaggttaagtaacttgttcggggtgctacagctttcagtggtaaagccacatgtgtgtccatccattctcgactccacttagcaatgtactactttacagttaaaataatgagatttagagttagatggacctgcattcgtattctggagctgccatattgtcagtcatgtgatcttaaccttgtgacttctagctgcaatgttcccatcatggggtagcaacatccatggcagacgctgtctcttgttacctcaaaaccattgcctcccactgtacagaacatcaatatgttcaaagggttggcaggaggcaccaagtctcagggaagtcagactcttatcccaacctggtgactggtttaaactagatatggtaatggcaggcaagttacccagtcttgttaggaacagtatgctgaggagggagtctcttctcaaatgaaaaggcaaagccccttacaaaggaagcttattactcctttcctttcttcctccctagatcttggacatgatacctggatgtgcagcagccatctggtaattatgaggtgacaagtcaatagactgagatggtggagcagcaaagatagaaaaggtctggattttttatagcattgttgaactgttccatcagcctaagacagttgactatctccagacttcttgttatgtacaacatgtcctgttgtttaagtcactctaacttggattgtttcttattttcagctgaaattatttctaatagatatacagatttccaacaaagcacagtgtagagcagcttaacatggtacctatgtgccaaagttccagagcaagagttcctgggttctaatcttggctctgtggcgtgactttagacaagtcacttagcttctctgtgactcgcttttctcatgtataaaatgctcagtaactgtgtattgactgttgaataaaggataatagtgatactgaattcatatgattgttaggatcatcgaatggctaaacattttataaaatgattagaacatcgcttggcgcattgtaattggctgcagatgtgcttgtcaaagtaaaattaaaagaaaagtagtcactattataggcctgggtttgcatcttgatcccatcattgggccacttgtggtatttaagcagaaccttcaccctttcactactgaggctcatagagcatgaaactccccctaaaatctgtctcaaagcagccacaatggtggtttctttttgacaaaaaaaggctccttagagaacgttggcttgcaaaggagaggctgtgactaccaagtcgtgtcaacaactgaatggctgaaatacccaaacttgcccatgcaaatgggcttgggtctctcctggcagccgcctttgaaggctctagacttatctgtgaactccttttttgagagggtctttccaactagtggtttattctttgactctcctcataccttttttgccagagagtgagagtgagaagggagggctaatgcctgagctcctgccctttctatgcagtgagggtcaagatcctcagctagtgtttgagggaactggtgtaacctgggtctctcattttctaccatccaagttgccacctctgtcggggtcccactctaatttgggcagccactaagcaatattttgaaatataccttgttcatgagtttaaaggatcaactggtaggtgtgtccattagcaaatcctatggaacaaatatctgctctttttaccccctacttaccttctccaccaaggacagttcagacaaagttgtcaccacctttagcctgatttactgcaggagcctcctaatctatcttcctgtttctactctatcctttatcccccccttggcagccaggggatcctttaaaaatgtgaaccaaagcatgagactaaaccactcaaaatcttcccatggatctcatctcagattaaaatcctaagtgccttctctgtccttagtgaaccccaggtgcacccttcctctgccactttcccccttgtttattctactttccacactggcctccttgctgtgggccagacatatctgagaccagtgtggcttcagggcttttgcacatacgattttccttttctggaacactctctcttccttgcacatctgcctggctctctgctcagatgtcaactctcagagaggccttttctgaccactccctctaaaagagtttcccccgcccctcatttcccatcattatctgtagtactgatgacttgcagatgttattacaaatttggttattttttgcatcctccagcaaaatgtaagccaagtgaagaatgaggtatcgttttgttcatcaaggaatccacagaaaccagaacattctgtagcaggtgatcactaaatatttgttaaactacaaagagccattttaggttagaaataaggtatagctgacagaattctaagcctgatgtttcttatgagcctgctcaattggccctgaaaccacttcccagaaagctctagatatgttctgaataatgggagcaatgctggaccagtgtttgaggttccaaagtgaatacatgaaagtgaaaatgaagctacatgtgactggatgaaccctcttgcattggtttaaaaatcctattcatcatgattagttcacgctctctttttcttgctttgctcccaggcaccagacaagtcattccaaatatggggtcttggtaccagtcagaacgaggttcccatctgtggtggtttaaaaacaaaatgaccttgttccttgatattctttccattgaaagatgggatatatgacttttccttgagtctgtgcaggcttgtgactgctttatgcagctcctgcctggttttctgagcataattattccagggaaagcactgggactgtcaagccgaagaggtccctggtgggtgctcttgtttgtagcctcagctgagctcccagcatcagccagcaatcctgagagccgccatcttggatgcacatgtaggccctctgcaccttcaaaagtccgcggcccggctgacatctgactacaagggcatggaaaactccaagtgagaagcacccagccaagcccatcccaaattcttgaccaaaaaaatcatgcaacatgaaacaattattgttttacaacactaagttttgcagtaaatatgtaatccacaatagtaatgagaaccccaccttaactcttcctcctatgtactaggcaatcatgagaaaaaccttttttttttaacactctgggcatcaggtttctcatctgtaagttaagagtgataacatatattgatgtggttgttgtttcaagcaaaagcaagttttgtccaaaacctagcacgcttctccacacaaacaatattttctcaaacttaagatgctttcattttacgactcacccttaattcatgtgtactaagaaagaaacaaatgcttccaattaaactactgcattactgtatgccactggttgtaggacacatacctgttttggagatattgaaatttgaaaagatgtatgtcttagcatctttgatttaaagactgattaacataagcacctagctaagcccaggcaaaaaacgagatccccaagattagagtttgtgaagtgtaagaggagacattaaagcaaatgtacctttgtatgaatgtctccaatctgccattctgttttatacgataaaacacaaagattagtacagacatccttgtggtccagacaaaaagtgccttccttgtcagccgtcgaatggttagaattcaaatgacatcatgtcacagttattgagccaaaatgtattttgcaaaagggatgaagtcagatccctaaatctggctgtgagtcgataagttgttttcagcagtaactcatccctagtaatagtaatagtccaagccccatttctctttggttcttgagaatttcctttttttaggacacgaactagtagttccttgagtattccagccaatgggcagaggggggtctaggcagtgggcaaaaggatgacacagggagacccagggccacatctagggggacagaagcataagcatcagcttcctagcaggcttgacgttaagtgttcacatggagctctgcagttagtacggctgccccaagtgctactatgctaatcctcatgtgaaaggcaaacctacttcaggacaagaggggttaagtctcttccccaaagtcacacagcttgattatgtcaacttagaccatcagacaccagagcctgtacttatacccacagcactgtactaacaagaatgtttgcaaagacacagaaatagtcataaaaggctccaacaaacccaaagctcacaccacaacagctgtcttgtcagctttacctaaacagagaatttcttttcatccataccatcttactttgttcagtatgggttttccgataaggatgttcttacctccttctctttctggtaaaaaccaaaacatccttcaagacccagctcaaatggaacagcttaactccttgttcctacagggtgggccctggctgcgtttggctccagcatattgtcccttgggctgcatggctggctctcctggaattgttgggagtggtttctgttgattactcctattggactggaagtttcttgaggttctggagttagactgagtttgactctatgatttacagctatgtccttggacaaatgtcttagctttcctgagctttaattttcttatctacttcccagaattgtcataatgcagcgtctttgcttaggttgcacgatcagtgcccaatattgtttactgttatgtgattggcaatagtggagcatctttgtgcattatctcagtcttcaatagccctctgaggtaggttctttcactaccacccctttttcacagatgaggaaactgaggtgaaacttcttgcccatggttccacagctcagatgtgacaaaactgggctgtaatcgtacctttttaaactcccttccctcgatggaatcccagtgagagcctccatgaactgattgccaaggatgttttgtcatgtatcagtctctttagatgtcttttaattcagatcttaattttccactcatttgtgcctaggtgacattatcctagtttgccggaaaatgatgctgcaaccagctttgtctctgtaaactgtggttgtttacacatttcaggcatctggcaataatgtgtccctcccccaggctgttatgcgtggcagattattaacaccacaactgccgttttagttaatgaatcaaaaacatggatcactcccattattggccttgaaaagctcaagcaaactcttaagcataactaagggcccacatcgttttccaacccaaagaatgccagggctatgcctcctatttactttgaatgattggctcaccaaagtttttgctggttttctgtgttgttgcaatcatggaaaccctctaactctgctgacattcctgatgtgctactttttttttttttttttttttttgagatggagtctcgttctgtctcccaggctggagtgcagtggagcaatctcggctcactgcaacctccaccttccacctcccaggttcaagcattctcctgcctcagcttcccgagtagctgggattgcagacacgtgccaccacacccggctattttttgtgtttttagcagagatggggtttcaccatgttgtccaggctggtctcaaactcctgacctcaagtgatctgcccacctcggcctcctaaagtgctgggattacaggtgtaagccaccgtgcccagccgctacttgttttttttccctcaagacataacagttaaattccccaaacaaaacaagtttgattttatttgccagaaaatattctgagtaagcagaacaagatccattactaaatcaagcctcaccccatacctgggcagccccctcagcaagttaggtgccttgtttggcagaatggtggaggtcttcctgtctaagcatggatctcgtgaaagcccatgggctcagcgcaggggccaaggttaattcacggtcccagctcgtggcgcagacttgccagtgaaagacacactcagggcttcagcaatgtccttggctgctggtttaccttcactttcagcagcagcagaggggttggtcatacctgaggtggagaaagatgttggggcaggggttgggggatggaggtaatattattgaaagcctactttgtgccaagcactgagcgaggttccccatttgcaggtattcggggattgtctacctacttactattgttaacttctagtttctttccattgtcctcagagtagatgctgtgcacgacttcagtcctttgaaagtggttgaggttattttatggctcagtgtcctgtgacgaatgttgcatgtgcacctgaaaagaatgcatcctctgcagtttggggatggagtgttccataaatatcaactgtgaaaggtccagtactcagctggtatagactcactgttcaagaaaaactcgttctttcacttattgccatgattaccagatacacccacaagcaagaggctattttgctagttgtgtagaccagcggtttcgggagagaatgtagtcttcactctgcagtgagctcagaggaggagagaggggaaaagtccatgtgggtgagaaggcactgccaggccctgaccccaggaggcaggtgctgtgccaacttgtcctccatgtggcccaaataagaagaaaaggccaagaactctaaacagatcactgaggccaggggaaaatatcttgagatttgctggagggagggaaatttacccatggaaatgagagaagttatgtgtggtaagaccccttctcatctcaagcacagccaaaactgatctgatcagagacctactgtcttagtccattttggctgctacaacagaatactgtaagactaagtttacttctcatagttctagaggtttggaagtccaagatcaaggtgctgacagattctgtgtctggtgaaggcccagttcctcgttcataaatgattgcttttttgcagtgtcctaatgtgaaggaaggggcaggagagctctctgaggtcgcttatataatggtactaatctcagtcatgtggggtccaccgtcatgaccatcaccccccaataatggtagtaatcccaatcatgaggagggctccactgtcatgaccatcacccccaaaaggccccacctcccaataccattaccctggaggttagaatttcagcatatgaattttgggaggacacaaatgttcagtctataactgggatgcaaggattcaacattgcccctgcccttctggaatttgcaggccatgagggcatacagataattaaacacacaattacgcatagcagggtgtggggggggtcataattggaaaagtatgttgagattagaagaaaatcattctttctttgtttctccctctctctttctctgttacacatatttgcagacaaaccaggaggatttccacagggaagctgaaaggggaaaacaacaggatcctatctataagcctattagaaaccgttagagaatgatttcatgaagagtaaggaacatgtgagttcgctagggcctcacccactaggatcaggaatgcttggaacgttttttgtaccataaacccttttggcaaactagagaagctatggacatcttttcagaataatgcttttaaaatgcatataacaaaatcctcagattttatttcaaaggattgcaaagaaaaccaattgtgttgaattcagttctatgcataggccttcccctccacctcactcaatctatgggatggggacctgaatgtttatggactagtggggagatactttgcagagaaagaaaaaagtctttcccagggccagcagttttctatatttatggaattcgttacctccaaggagggcctgactggagtttttactttcaaataggtttgggtaactccacgcaagactgtctttacctgcctttggtgagcttatggtttctgtttcttttctcaaaagactgcgtgcccaaacttccagaaagcagacatattgatgcagttgaattgcccaccttttacatttcccttattgttccatggatggagtataatgaattggcaatggagggaagagaaaagttaaaggctgactttgatggggggctaagtcctcagagaacgtgtttcttagggagccttttgtcacttgttaggctttggaatcctctttgggagttcaccaaacagagagtgcagcccaggaggatggggggctgaggagaagtcagaggttcagggaggacccaggtcatattctgggaggtggcaggggctgtgggtcccatgagatcagacactagttatgaaggaactactggcagacactttgctcattaatgtcaccccccatgctcattaccaccctaggacctggggtccccactataccactgagacaacagttgctgagcatagttaatccaagatcatccagtgagcagcagtggagctaagatctgattccacataatctaggctcctaaatatttttttttctattgccacatgcccagcgaccttcctgcggcatggaggtcgtgggtgcagcttgtggagtcaggttgccaggtttcgagtctagctcctctatttaaatagcttgatgatcccaggtcagttcctgatcctcctctgtaaaatgggaataattttttcacctttcccacagactttcctgggggattaaagggagaatgtatctaaagctctgagcacacgtgcctagcatgtgagtgctccgtgaatgttagttactgtgattatttttagcccagcaggacagggaggagtgttaggtccctgggggcgatcactcctctgtttactcctcggactgtcccggcctggcaggcgttcatgagtttgtttctcctgtcccaaggttgccctggtgctctgcagtggcagggctgagatgattatacaacctgcactccaggccaagtccggtactcgtcccagctgtcggctaagcctgcactgctatgggtgagggaatcactcctctccagctggctttctcacgctggagaagcctgacctttattcagaatcatcctccagcgcccacatcacacagcaccctggctcacccgctcctcccccaacatgtcctttacattctcatctggggagataatggggctccagtgtccccaagacagctgcttttcctttcttcttcattcgtgataactctctgttctccagaagtgctgcttagactctagagggatacatgaaagagcggtaaggtgacaaagaaaacagctgggttcaatcctggctgcatactcagtgtgggacagaacaagtgctctacctttaaagttacttatcaggataatatacagtatttcatgtatatatacatacatttataagatgtaataaatttttgtaaagttgtgaggatggtaaaagcttagcccagtgcctggcacatcataagcaccccacaggtgtcagctggcatcattagcagtcataggaaaactcagggtatgtctccattccaggctttgtggcatatgggtctcagtgtccccattgtcctgtggggttgctgagagctgtcctcataagattgtgagggtgggaatatgagaggagtttgagaaagctgaagcctaacaggtcaacaaccggactgagctctccccttctcccctgggccgtgtgcaagctttgggcctggtggtgacacctacctctccatcccacctggcgggcccagctgaccctcccagtgcaggggctgggaagctgcaaagaacccttaggctcagaatttcctgctgtcagccagcccccctgctgtttcccatttatttttctctatctccttttccatctccccttccagcaccttctgaaactccctagtcctgtactaccaacacaccaacctttgcttaattgtcacgtcagacagatggctcaggtgtccccagctccctgaagctcttcccttcccctcccctgggcaggggcctcaggccttcctctgactgatccagcccacctcccagtgtccatactattaggttggtgcaaaagtaattgcagtttttgccattacctttaatggcagccccggcaccctggccattggcccctggacagctgttcactcccttctcaggcttgctggggacacatacgtcatgccctgaagcgttccggaaccggtaggggctgcctgtcctgccactcacccactccagctaggaactcctcagtgggcaagataattgagcccaggttgaattatgacgttcacaggtaagaagcagggttcagatgagggctgggtctacagccaagtgtgggagagctggtgaaagccttgagagaggcagagactggccagcctcaccctgcattcccaatcccctcctctttgtcaaaatcttactctcagcatggtgccattacctttaatggcaaaaactgcaattatttttgcaccaacctaaatacttttgcaccgccaggagatctcctgccatctattcagtcttccatcccgctctctggggctttattctttctgttctttctgcttcttgctgcgcacggtgcccccacctcctgtggctgaaatgctgccctctcccatcctgcccagatgcctcttccaccaagcttttctgactgccgcatctggaataatatatatatgcaactttaagatctgtctttcttttttgatcttttcatatttttttatttctattttggttatttgctgccatgttccttaaggaaaagattctaccctcacaatgcctaagcagcttggatcacggaaagagcttgggcttctctccccacttctgttttctcatcagtaaaatggggataagcattgtaaataaccaaccctcttaagagttgctgtaaggcttggccaggagcagtggctcatgcctataatgccagcactttgggaggccgaggtgggcggatcacctgaggtcaggagttcgagaccagcctggcaaacatggtgaaaccccgtcaatactaaaaataaaaaattagccaggcttggtggcagctgcctgtaatcccagctactcaggaggctgaggcaggagaatctcttgaacatgggaggcggaggttgcagtgaactgagatcgcgccattgccctccagcctgggggacaagagcaagactttgtcttaaaaaataaaaaataaaaagagttgctataaggcttgaaagaggcctttggcacgactatcacctccctcagggctctgcacatttttttctttttttgagacagagtctagctctgtcacccaggctggagcgctacagcacagtctcggctcactgcaacctccgcctcccaggttcaagcgattcctctgcctcagcctcctgagtggctgggattacaggtgcgcgccaccacgcccagttaatttttgtatttttagtagagacagggtttcaccatattggccagggtggtctcaaactcctgacctcgtgatctgcccgcctcagcttcctaaagtgctgggattacaggcgtgagccaccgtgccgtgccagctctgcaaggaaccaatgaataagtgattgaatgattgaatggataaaggcctttactgttctacttgaggctgtcaaaatggataggtttttgctacagtcctcaccacccctcttaatgccatgtcagcagcatggcatatggacctgcaaacccaggctctgcatcaggttgccaggtcacctaaatgacagctgtgaattcttctaaaacaggggtcagcaaactatgatccgcaagttaaatccagtccacagcctgtttttgtacagcttgcacattaaggatttttgctactttttaaatgatttttacatagaaaatgttacatttttaaatgtaaatgtaaattaaatgcaaatataaacatttacatttttagatgtttaaataaaaaaatcacaagaaatgtaattttatagcatgaaaattataggaaattctatcattagcacttgtaaataaagttttattggcacacaactatgcttgttcatttatgtattgtctacataagctatagttggtgtgtgcagagctttcactcaatgatggcacagttgagtagtttcaacagagatgggatggcccagaaaaccaaaatatttactacttggcccattacaaaaaaattttgtgctgatccttggtctgtgaaacaggagcaatgatgaatacctacccatcgtgtgtgggtaaaatgttaaagtgcttgatatcaagtgggcactcaagaaaagtttttccttctactctctattcctccctgtcttcattccctttcacagagggctcttttatttcagggtccaagccatgaaaaccatagaaaaaggatgacagggagaatctgaaccagtaccatgcccataccaggcctcaaaacagcagagctgtgtttgtcatctccaccttcctgctccagagcctccccagacctctcagtctatgggactgttggtggacaggcagagtttaaatccattgcgtcttttgcgtctcgtggttccagatgtggatggggccagccctgcatgaccagccccggagagcaacttctattaggtttatcagaggctggacagcgtccactgcatcttttcttgctttgggcgttttaaaacttgggctgctgttgcataggagattgcagctgcagtttggcttggcttaagataagatgcagcctctgggctgaaattgagggtcctgattctgctttgagagatggtatggcatcctgaaaagaaccgagatttggaatctgggctggaatcccagctgtgcccctcacaagttctaggattcgtaccttttgctttttctgaaaagtgggggtgatgctttttcttggggtgagggtggggtgttggcagggttctccaccacgtaagcttgagggagcagggttttgtctttttctgcactgaagcccagcttctagaacagtgcctggctgcgggtgagcactcggcaaatacctgccttagaaaggtgattaaaagatgtagagttcctggcacacgatagaatctcattaagtggtcacattgccattgtctgtactcaaccaggaattggcacactatggcccacagcctgtttttgtaaataaagttttattggaacacagctatgcccatttctttacatattgtctgtgactgctttcctgctatagtgggggagtggaatcgtgagacagacctgtgccctgccgagcctaaaatatatattgtctggctctttacagcaaaactttgtggtttctgctctgaatgtcagggtaaccctgtctgaggatgatcacggatttcattttcccttgtttgttagcgttgcggtcagccgcaagttgaaaacaaggaaccagcttgaggtacgcattctcgatgccctttctaagatacttatggagacttttcttttccactccaattctgccatgctctttcggcatggtcagagctggcttctctgtgccctccagatctcatatgtaagatggtgttactttcatttctttgtaaaaagaaactcaacccacctgtcaattgctggtatattcattagggattaaccatgggtcctgcaacaagtaggctcagagcacagaggacatgagtcaaaataaaaaaagataaccaaccaggtacaactgtgctttgtaatattatagaatagaatgctgatggggttcaggaaggagtccactgtgtttgtggggcacaggatacataagattctgatttacttttccatcatggtgaatggcatgatcttagacaccttagttagctttattcaaactcagtttttcaatctgtaaaatggcaatgttcactatatgttgtcactctctttgatgggcagggcccacagttaggagcctctcgaggccttggtatctagaatggtgaaggagagctttctggaatgagtgaacatgtgtcaaatgctctgacgtcctcatttgaagggggccctgtcccctgtaccagctgagcaatgcgagtgggccactgtcctgctaccattttatagtcagcggatctttttttttttctctttctctccagaaggacagaataacgggctcccagattcacaagccccaccaagaggatcaccccaggaacgcttggaggctgaggagttcactgaggctactgcatcttgagactcaggatgaagacccagcttggggctgtcaaaggtgcgacctgccagctgagacctccaggggtcgagcccaggcccctttgccttgttcatggcttaggccagtgcttagcatatagtaaacaacttgtaaatgtttattagaggatgtatggtgggtcatcccttctgaatggcacacagtccattgtcattgtcctcagaggctccagcctcaggtgcttcttaaactgcgatgggaatgatggcagcagatgggcccagggctcagcatgagagctcacagcaggctgtgctccaccccacccaggcccccagtcttgccatgtttcctctgcctccccaggctggcctagaaactgcttccaactgaaaccagccaaatgcctgcccctaaccacacctacaactctagggttacctttagtctagatcaggggtccttaaactgtagcctttgctgggtacagtggctcacacctgtaatcccagaactttgggaggccaaggcgggtggatcacttgaggtcagaagttcgagaccagcctggccaacatggcgaaaccccatctctactaaaaatacaaaaattatccaggcatggtagcgcacatctgtaatcccacctgcttggaaggctgaggcaggagaatcacttgaacctaggaggtggaggttgcagggagctgagatagcgccactgaacctccagcctgggcgacagagtgagactacttctcaaaacaaacaaacaaacaaaaactaagcctttgggctaaatctggtgagtgttctgtgcttgtaagaactctgagttaagaataatttttatgtcactaaagggttgaagaatacaaaaagaatattcagcagagaccatctggctagcaaagcctaaaatattgaccctctggccctttacagaaaaagtgtgccagtcgcaggattaggcagtactgaccacaccccaggctccctgtgaaaatttcaaccacacagactcatttcctttctcttatcaacactgaggcaggtgtgattatcattccttgtaaacatggagaaactaaggcatggagaggtttaactcgtttacctgagaatctattaagtaacagagccagggttcaaacccaggcagtccagcttcagagtccatacttcctagctgcactctgggccttcagcgtagggatgagcttcagacaagaactcccctcttaatttctgccctctcctgccccacagccagtggacaggcattttgcaccccagcctgcccccagccagctcctactcagagatttcctgcagggacttagacgaggctctgggaccaccctccttttctgccctacccggcacctggaactctgcttgatcctgctccctctgaggctggacacatctccatgagccaggcctgaagttcttcccctctctggacctcggggcctcccttcctaggggcagttcctgtgtcccctctactctctgccttccccccgccccaccatgtccttggggctggaattgtagtgtgcagccttgggaacagggctgggctcaggggttgggaacagaggcccagggctctggctgaccctctctcatccccaggaggagaagctgctgtgtttagagtgtcacaaagaacagtgctggaggcttcagaaatctcgggagattctgaacttctaggcggagcagatgggatggtgcctctgtgatcaacaggcctggcagaggggtgcaggagggggtgcgaatggaaagacagctgccaaggggaacggagagcttttcaagtcacccttgtcccctccccaccccaccatcagggctaagactaaacctcaccatccggttgcggcctctcggccctggggatggagattagtacatgtagagtggaggtagagaggccatgttctggttgtgtgaccttgcacaggttacataacattctgtgcctcactttacttgtttttaaaatgatgaagatgataactacctggcagcgtgtcttatattagagataatatggttcctggcactttgtaagcactcggtgtgaaattgtcttctgctgctcctcttcatcagtccacccctcctctgcagaggtttcctccatgctgagcaagctggcagcacctaaattcctgttagtgcaccctagtgccttctgcccaggcctcgggacccccagggatcctggcccctgtggacagggacttttgtgccctccttctctgttaccagcaagagtgagtcctgcactgaatttccatgggatcattgcttgctaacatttgtgagtgagttactgtctagaaagcagcttttctggacttttcccattaatttcacgaaagttatcttcctttgcccttactacatgttcattactacaggttcattaccccattttacagacaattaatactccgagatgaagtgactcaccaggggtcgcctagctaagcagtggagagtgggcctcccacccaggccttctcactctgactcctgttctccacgtcattgcatatggcgacatgcgggtcacgtgatcacacatccctagccgatatggaattgtgagcttctcctgggtcttccgaggaaggatgctttcaggagtgctttggaatgaaggcagtggaggccaagagacctctaggtcaaagccaggcgggagggtcctctcaggggcccagccgacaagttgcatttctccctcagaggcctgaagaggcagaacaccccagaggagcctggggccaccacccagcatcactgtgggaaaacggcagcaggaaatgtcctctcgcctgcgtgctccacctcggtccacgccttccctccttctggaagccttgcctgaccactggcctgccccttctatgggaatcactactgaccttgcagcttattatagacttatatgtatgcagaaatataattttaattacttttatattgctccgagagtgataccaaatcatgatagaaaatttaaataaacaaaatagccaaattaataccagtaatcaccccagtcaaatatacccagctcacattttgatgtaaaatcttccagtacagtttctatgtacatatatatatttttaggaaggagattatattttacatgctgttttctagaacgttcttttaaaactgtatcataaacatcttgccttataattcaatagtcttctacaacaaactttgctaatgaatttttttttttatcatggtcactgttgtgttatgtgcatcttagtttagcatcttcagttacgttataagtgtcttaagccctcaggttccccagccagccgcagggtgggtttgttcattgattgatggctgtatggggtggaggagggaagtagaaagtgagtgagatttgggtaagcaaacctgggtttaaatgctgagtctgcaaattccataaattctccttccctccctccctcccaaccttcctccctccatccctccctcccttccttccttccttccttccttctttcctccctcccttccttccctccttcccgaaacaaatgccttgttagatattttatatctttatgtaaatatgcactcatttaaatatcatgtgggcacctcctctgagtggccctgagcttggttcttggatgtagcactgcacaagagaaaccaggtctctgctctcctggagatcgatgcatccagtgtggggcacagactcaaatcaaggcaatagaccaaaacctaagcaggccactaacttgtgtttaagtacaacatccacatggacgggaatgagaattacagggggagcacacttgagctgcggtccagcaaagccctctctggggaggtgacagtcaagcccagacctaaaggaacctgctgcagggaggatgggaaagatgttctgacaaaggccttgagatggggaaggctatggtttagatgaggaacttcagttggtcatcccctctctcatccatcctgttgaaaccacctttgcaaaaggtgtgtcaatgagaaaattataacagtaagctaagccaacccaacctccatcttgcctttctcttaattattcctgggctattgggtcaagctaactttggaagacatttaggctacagtttaaatgataataggccttgcccaaaactcagccacttttgtaaagctgttagggggccatcagggtgcggggaggagaagagcctgaatcctactaagctgcagacattattccgaaggttataagatatgcaactttcccaattgctcctgtgaataacactactattacagattggccttttgaaatatctttccaggttttttgcatgtctgacacccatgactccacctggaccttatggctccacccagaagcaattcagcccaacaggaggacagcttcaacccattacgatttcatctctgccccaaccactcagcagcaagcacctgttacctgtccacccccaccccttcccccaaactgcctttgaaaaatccctaacctatgagctttgaataagatgagtacgaacttcatcgcccacgtggcgtggccggcctcgtgtctattaaattctttttctactacaatgccgtggtctttctttatgcagtgggcaggaataaccccttgggcagtaacaaatttggggtctcatgtgggattgtgctggtggctacctgtgtatgattcggtagccccccactggcaacaggcctggaggccagctcaaacggctgcctagttctcctggcagagagatgggggctgactctggcaccatctctaccggcgggacactgctgaccatggtgcatggatgcagtgggcaggaagaatctcttgggcagttatgctatctatccagtccatctgtcaaatgtatccagactatgacctcctctcacttcttggtcgaagccaccctcattcctgcctggaatttttgtaacagcccctgggctgggctcccagcttgtgcctttgcctctcagtctgtcttcaaaacagcagccagggtgatcctttgaaagggcagccagagctcataagcccatttgcttcaaaaccctcaaagggttccacctaattctgagtaaaagccacaggcctcactgtggcctgcgaggcccgtgggatgcagccctgtgatgtctctgatcacgtcctcgtcctttccatctcatttcgccctggcatcctggcccctttgtcataactcagaccctccaggcatacttctgcctcaggttctctgcacctgctgtgtcctctctagcctatttgtccacttcctcatcccttctcagtctttgctcgggtatcatcatttccatgaggccttccctggccaccagatttaacactgaaacttccccacatcccacgaagctcactatgctctttgctggttttattttcctccattgttcttggtgtctcctaatgggttctacaattaattgtttgagttgatttattagtttctcttactcccctggaatataaacttcaagaaggcagtgatttttgtcttatctctttccaagaaaagtatctgtgacatggtaggcactccataagtatttgtaaaacaaataattggacttccttataccaaagacagtctgcacagaaaacaaatctttacttcaagcacaaaccttttgatatacatatatatgtccaagttttccttttttttttttttttttttttttttcagagaagggccctttctggtttcccctgctgcccatcaggatgcactcaggcagcaactgtacagtaaaaggggacacctttagcctctggtttcccagagcagagagctgtcaacaccataagctatttttgcctcacctctggtgctccggagtggcaggccagtcacaggtgtggtgcatcagactatgaagaggctgggtggccacaactctgtgctgggatgctgacctctttgaggcaaacagcatgagctggaaaaagtgtgtctatctcagagttaaaaactggtgaattcccctgttgctctttaccatctcctgggtccgtatgatctgactgccacccactttcccctttcctcactgggctccagacacactggcttccttccttcctgaagcctccatctgctgccgagctcagggctttgttagacgctcaccctgcctgtgttgcttcctgcagtgtgctgaattgtgtctcccaaaagatatgctgaagttcggacttccagaacctgtgaatgtgaccttatgtataatagaaatagggtcttcgcagatgcgatcaagttcaaataaggtcactctggatgacggtggcccctaatccactggctggtgtcctgaggacagagacacacagtggggaggccttgagaagatggaggtaaaggtgggaatgatgcatctacaagccaaggagcaccaaggattgctggcaaccaccagaaactaggaagaggcaaggaaaggctcttccctacagctttcagagggagcacagtcctgctgacaccttgatttcagactgctagtcttcagagctgtggaaaaatacttttctgttattttaagctccccaatttataatattctgttatggcagccccaggagatgaatacatttctttctcctccttcgtttcatacctctagtgccatctccttgaagagtcgttctttaactcccagtcattactaggttcccaagttctacacctttagctctgcagcctattcccacgggagattctcttggtagcctcccccgacacagtgtaagcccctttgtgtccaggttgctcactatgggtcctcagtctctgagagcgtcttcagcacacattgcgtgagcaatcaatttttgttgaatgaatgcattgcaatctggagtgagcataagatcccagtcagaagattgccctgggtgcttcccctagaaatcctcaaagtacaattattcagattgagtcactcagcccatggtaccctacagttgcagatgacacaagaaacatgagaacctctgaggactttccaagctggggcctgttcttactgtttagcatgaaatgtgttttcctgctaagaacatgaaccagaaatgagttttaccgagtggttagcaagaccttaaatagaaaggaaactccaaaaaatgtaacttctctcacacttaagcctccttttcaacttccctttcctgcttcccatcactagaacctccagatcttatttcctgggtgatgatgaatggtgggccctatttcagacctccccaaattctgctgaacttcctctctttgggttttagacagagaggtatggtaagtgcctctagaactgacatctcctgtgagacccttctcttacatgctatgtaggtttggctgctgatggattcagaatggtttttattgagcacctactaagtgctagcttttacactacgcattttgacactctgtaacttctttttcatttaatctgttccagaaacttatgttcactatgatgtgatcttgcttttgatccattttactgatgaggaaattgaagctcagagaggtcaagtaatttgcctaaggtcacacagttaataaatggtaacgccattttcaattctacatctgcctgactacaaagttggtggttttcctttcctaaatgttacaactaaaaacccactctagctcaaaatggcaatgggctttattgtaaggatttgggctgtgcctgggactgtctggtggttatccagcagcctcttaggaggagttggcctgttggatttatggacttgggacccttggtatgtgctcagcacatgccacagacctggcaagcatgctggcctggggtcatctgctcttggggctgtgttttctgattaagggacattaggctagccacttcccacatccagcttcagtttccccaactataaaattaagacatagatatgctttccacgctgccatcctgccctgataatcagattttagtatcccagggctataacgccccattcttccatacccctcaaactcctgcctttctatcctatctggaactgtggcttacataaaaactcccaaggcatccatgcaggtcccttctgtcagaggctccagcttctccatccctttcctcccctcagtcgacatcctctcctctcctggagttagtcctgctgggggaccttgggcaagttccttcacctctttgagcttccgtatccttctctttaatgatctcgaatgtaacaaccccacctcatagcctcattatgagagctagatgaaatgaaacaataaccactgtttacctttcaggcacctggcagaagtgcacgctctggagctgagtggatgggtgcaaatcttggccatgctgctcctccacacccaagcggtttgggcctggactagttgcctgatgctccacacctccacatgctctcttgtcaggcagaaacagtaacagcaaccccccacgcctgttatgagagttaagtgagttgatatttctaaaacacatcagtgtggggcattaggctagcccctaatgccactcatgccaacaagtgctgtagaagagttagccattattcttaggtcagctaattatccaatcagcctgacaaaggaggtactgttattagccccattttataaacaggaaagatcagtaacttggccaagggcagaggggcaggccttgagcccagacggataagacattccagggggaggctcctcaccttcagttacactgactgctggatataagggggctccccacttggagcttaaaggtttgcaatagccaccttgaaattcttgaaaatcttaatcactttatgtttgagtttgtgttttgtaagtgaagttctgcttctgccacctccccctttccccaaatgtgcccaagactgaagagggtcagagtcaatcccataattgtgccatggggcagggctgtggaggtcttcaaggggctgtattcaccctacaagtattcctgtgcccaaaagagtatgacattaaatagcagataaaaacaaaacaaaacacaccaggacggagatctcagaataaagaaaaaagcttttttttttcctgtttgaacaagcattttcattctgcaccaggccttgctaataaggtagccagatctgggtgcatagcatgtcacgggcgggaatgaaatgatagtactctttcgcttcaaaaaaaaaaaaccccaaaatacttgttccaagtttagtaactgagtgcagtttgttctgacttttgattcacaggtagagacaaagtctttagctgaaaggtaatagttttgccaccttctacaaatatagatatattttttccctaaagcctcctgagtcctttttaagatttgcatccaaaatatgggccctttgccaccgacattcctgtttggtagtggatgagagggcaatcttatttttttcttcttctgttgttataatcctcagatgcagagtgttctctttaaaagacgcttttaaagggcaattactttatgcaaatgtgggcatctctggatggctggcaaggctggagtcaggccgtggaagcctggaaagtggactgcgcgggctgggcaggggaccaggagggaggccctgcttgccggtatcagcaactttcttctgctgccccctggacctctgggagaagactcagcagccacagccagagtaatgggaagatcacagccgcatagggctgtgaatcagggaggacacctcatctggtttatctcatgtgaaatagatgaggctccttgagatctgagcaagcagccactcgaagccaatcatgggcgccactgcagacctgtgtccaatgagagatctcagttaaagtagaatagaccacgcttctgtgtctcctgcttcagtgtaggccacagcacagcagagggtggaacattccaggaaagagttaaggatgcaggagaaaccccctaagggaggccagtatgagaaaaggtggcctgggattgtatggtgggggagaggcagctgggctccagatccttttcttacccttggagcctatgcagtcttcaagaggccactgctggccgggcgcggcggttcacacctgtaatcccagcactttgggaggccgaggcgggcagatcacgatgtcaagagagggagaccatcctggccaacatggtgaaatcccgtctctactaaaaatacaaaaattagctgggcacggtggtgcgtgcctgtagtcccaggtacttgggaggctaaggcgggagaatctcttgaagcaggataatcgcttgaacccgggggcggaggttgcagtgagccgagatcgcgtcaccgcattccagcctggacaacgaagcgagactccttctgaaaaaaaaaaaaaagaagaagaaaaaaaaggggggccactgctccagtggctaggcccaatctcatttccaaagctgcttcaggcatctgtgaaacccccagatggagcagcccgggctgtggacactctgccgcatccatgcctccttgttgcttagtgagcctgttctcattactcccccagcgccaccctctgcatttgctccactcctcctagagatgcatctttcatttttgcatcactaaatgcacttcttctgtttctctgtttaccggagaaaaaaataggaagcgtgggaggcagggcacaacagtcttcgcctcgggttcgttgggtaagtttcgcccattctccaagaggggacctgactagggaggctcacggttcagatcggtgctccaaattcccaacatacaactgagtcatttttacttgtttctacaatttgttaatagtagctggcctttgctgagttccatctatgagcttggcccccttgctaatctctctactacatacaataccccttttaagtcttttttatcgcaatatagtttacagatgacaaaatgcaaagatcttaagttagaatttggtgtgttttgcaaatgtatacatccgtgtacctttcacccccaaacaagaacacaggacatttctttcacccctgggaattgccttgtgtctctttctatattccgtcctgctcaccccacacgaaggtgaccactgttctaatttctgtcctacccatgcattttctctgttctagaacttcttagaatcatctttactttcctcatgtctagcttcttttcttcagtacactgtttatgagattcatccaggttgttgcatagatcaaaaacacttcctttttatcgctatttagtattccattctctggatactccacactgtttattatttcatctgtttgatggacatttgggatgttttaagtgtgcattgatgatgaataaggctgctatgagatttcatggacaagtctttttatggacatatgtcttggggaaatacctagaagaggaattgttggatcatatgctaagtgtatttgtagctttctaagcaactgccaaaactgtttttccaagtggtggtatctttttttttttttttttttttgagagatagtcttgccctgtcaccaaggctggagtgcaatggtgtgatctcaggtcactgcaacctatgcctcccaggctcaaacgattctcctacctcagcctcctgagtagctgggattacaggcacccaccagcacgcctggctaatttttgtatttttagtagagacggggtttcaccgtgttggccaggctggtctcaaactcctgactgcctcggcctcccaaaatgctgagattacaggagtgatccacaatgcctagccaatattattttttaactcttgccaggagcagaggagagctccaattgctccacatcctcaccaacatttggtattgacagtcttcttgatttttggccatcttagtgggtgtggagggctgtctcgccatggttgttatttacattttcctaattactaatggcattgggcactgtttcacacacttattgcatatatcttctttgtgaagtgtctaggtcttttctttatttgggaagatgggttgtttgtctttttattatcgagtcgcaagggttatttatatatcattgatacaaatccctggtcagatacatgtgctgcaaatattttcttccagtctctactcacactgtctcttttaatcctcccagcaacttgatgaagtagatgttactatcctcttctttatttcctagaagccaaaactgaagcacagaaagtttaagtgaaatgttcagaatcacacagctactcagtatggcagtgagagtgtgggcctactgcagtgtgactcagagcattgatgtccagaaaatcccaggaagcttctttccacacacgaagccttgtatctccctggcagtctggaggcatgtggccctcgagccagtgctgggctgggttatttcggttcacactctcgccctctgccttgcacataccagaccatcctgggaagtaggcggctcccacaacccggttgggagcgtggtcttctggggaggatgccacacagctttgagttgctctgatgaaagacaaactgcggggattcttatgggcctccgaggacgctgacagtattacctcatgccaggaataacaatgaggggcctaggcgagctcgccgccagcccttctctgggaggcaccgctggaggaaaccagccaggagatgggaggacggggctgggatatttagtccacagctgtctcaaaggagaactattgggtgcctcagggacttccctctttctttctcctttctgagcaggtgaaagggtccctgcggcagtcagagcgaaaggctaggaggttttgtgagagtaagaacaatggcaactccagccctcaaaatgctagttggaagagcgagcctctctgagcactcgctgtgtgccaggcaccgcgtccacactttgcagccccacttgatgcaagactctgtgtagtggctttgcatttactccctcaatcctcgtcacacccccatgagacacgcactattaaaatgcctacaggaggaaactgaggtccagagaggtgaagtaatttgcctaacgtcacttatttataagtggttgaagtttgaataggggtttagctaattctaaagcccagtagctttactgctacgcacttctgccattctgttaaaaaactttgtcaaatttcaagtttgtgtcatgcactacacatgaggtgtcttggtcagtggaatataagattgaacaagacctgactcttctttgggcactgtgtgggttggatggtggacccccaaaagaaatgtctacatctcagaacctgtgaatatcatctcacttggaaaaaaatatttttgcatatataattaaggatcctgagatgagatcatcctggattctttgggtgaccctaaatctagtgacaagtatttttataagagacagaagagaaggtcatttaaaaaggaaacagagattggagtgatgtagccacaagccaaggaacacctgaggcctccagaagctggaagaggcaaataattctcccctgggacatttaaaaggagcttagcttaatatattacattcattagaagtgagtccctaggtccaatccacctgcaactggagtacattacacaaaagcttgaataccgggaggcaggaatcagtgggggcatcttacaagctgtctagcacagtgccaagaggcagggatcacaccttcttttgctttttaaatttcttttttaattttttcgagaatgtgtcttgctctgtcacccagtctggagtgcagtggcgcaatcttggctcactgcaacctctgcctcctgggttcaagtgattctccagcctcggcctcctgagtagctgagattacaggcacacaccaacacgcccagctaatttttgtattttttaatagagatggggtttccccatgctggccaggctggtcttgaactctcgacctcagataatccgcctactttggcctcccaaagtgctgggattagaggtatgagtctgaccccaccttctatttttctggcaatccccatccccaccttctgtttttctggcagtccctggcccctaactgaaagaaaaagaactaacatttaacatttttatttattaagaaataatagcatttattatgcattgactgtgtatcaacaaccatgccagactccttaaacacatcgtttcatgcagtatcacttgaccctcctatgaaccctgaaaagggaggtgttcttacctccatttgacagaggaggaaaccaaggctcaaaaagatgaaggccacacagtagcctctcagaggaagccagtggttctcaaactgtagctgcatcagaatcgcttgaaaacaatctctaagccctgaacacagagtttctgtctgattttgcagctttagggtgggacttcagaatctgtttctttttgcttttgcttttgctttttttgagacagagtctctgtctagcaggctggagtgaagtggtacgatctcggctcactccaccctccaggttcaagtgattctcctgcctcctctcaagtagctgggattacaggcgcccaccgctacacctggctaatttttgtatttttagtagagacggggtttcaccatgttggccaggctggtctcgaactcctgaccttaggtgatccacccacctcggcctcccaaagtgttgggattacagatgtgagccaccgcgcctggccagagaatatgtatttcagacaagttccaagttgaggctgaggctgtgggcttgcggatcaagcttttagaaccactggagaatcaatatattttgcagcaacagacaaaccctaaagtttcaatggattaacatatcaaatgcatttcttgcttaagttgcagtcttactggggtagggcagccctccttcatgctatagcccctatcatttggagcatatggtccccaaagtcaccatggaaggaaaaagagagggcagagggtcacttaggatgttcaaaaaaggctaggcctagaagaggaggcttttatgccttttgcttagccttcatgggccaagactcagccccatggcctcaaactaactgcaaaagaggctgggaaatgtagtcttccccaggaggagcaaatggttaagatgagcacacagctggtcagggcagggctgggatttgtgctcaggtgctttctctctttcttctcttgcctttttcctggtccaggtgtttttggtgggctttcttagtgttaaggaacttctgtatgtgtgtgtgtgaaactgaaaaaagagaagaggaaagagacattttcgaggtccttcagcccactctcttgccagcagccttcacccatcttcacttcatcttagaggtgcaggtgacagttgataagtaccttgaaaggcctccatgtgtgtgcagggcattctttcgtaagtttcatctgtaccatgttaagtgattcagggccactatctctgaatttgaagaaccctcaagctactggttctccaggacctaaaccctggactccaggccacagacaagctctgagtgaaaaatgaatccttcttgccgctcctcccctatgcttcacattgctccaaacctacctgcctccaacacgtggtgcagtttctaccttcccttcctttgcatatactgtgacatctgcccgatatctttctcttccctccagacttgactcagatgataccagctctatgaagccttcatcaatctgtcaaagaaatattcaacttaccctcattctgggtcagaggcacaggcatgcttctttgtctaacctatggtctagcacttgtcaaggcctgtgtagactttgcacttgcctgcctctccttagagaacgtgagatgttcttgagccaaaactgtgtagcatcttttcttggcctcttaatttctgacaagactgagtctagaagccttcctgtgatgtgcaaagccctcctcaagatccacaggtaaagaaggaagtctctggcattagtttgaatcccagctgagccacttgtgggctgtgtgaccaaggggaaattcttagtctcatgaatgcctcagttttctcatctgtaaaatggaggtagtaatgttgtgtatgttcaatgaaataatgcacctaaagccctttgaacagtgcatggaaaaaactcaggaagtgccagccatcactgtgttcttatcattgctcttgttagtatcttgctactttagcccacaccagccacatcagatcacttactcgctgacaattttgatgatcttgcatgctcctttgcttttgcacttaatctcttctgctcagaggtccctgtctctcacctattaatgaattaattcatacttattctttcatttatttaacaaactttttccttaactcattcctgctcatcctgtagactcgtcttggcccttcctgtccattcccattggatttaccactcctgttttgacttatgtttacttttctgtatctccgtgaacaacttgaaagcagaaaaaaagatgctcatttcctactggatttactgctctgaagccagttcctaatatcttgattgtcacatagcgggagcttaatgaacatttgctgaatgaatatatgaacgtttctcatctctgaatctgttcccaaagcttagtgcattgtaggtgcttacccaggactctttctcttgcaggaaaccagatcactctggatgcatatcatctaaaggccctagttgtgggagggctacttttaatcagtgtattggccgggcgcagtggctcatgcctgtaatcccagcactttgggaggccgaggtgggcggatcacgaggtcaggagatcgagaccatcctggctaacacggtgaaaccctgcatctactaaaaatacaaaaattagccgggcctggtggcgggtgcctgtagtcccagctatttgggaggctgaagcaggagaatggggtgaacccaggaggcagagcttgtggtgagctgagatcacgccactgcactccagcctgggcgacagagagagactccgtctcaaaaataaataaataaaataaataaataaataaatagtgtatctagattttgccaccttcagaaccagaaggttctccgtggtctagcctgaccaagtttaaaatgtctgggggttggggggttccctgaacaatgcaagaggcaccatttcatctgtgtttcttggacaatccctagcgttatccaagacttctcaacagttgccacatttgaggacatactgcagagtatctgtctcatcatcttctgatatcacagtgcttagattagtgcctagtaaccaaggaaagagggaataaggggacgtcccccactggccaatgtcttagatatgtggatttggagtcaaaatgtttgcccgactagcctaacggtgtggatggtgacattgcgctaaaaccgaccctcagactcttatttcatgaatttgtctgatttctttggtagctgaggtctggttttgatgtgcaaactggctctaaaaattaatctgttccctttctctctcaccctttttaattgcctgatttgtttgtctcttgggagtggcaaggtgggaaggtttctctgcccaaggctggccagggtagaaccttctgtgctggtgctggtctgactgtggaaagaggtgcagatgttggggtttggaaagtcattgtctgggttccatgtcatatggcctcctgaaagggaccctcttggttattgcctgctcatgtcatggaggaactgcgcgtggtttttatcgacattttggttttgtttctatttataggaggttgttcagaggttgtcccagtttttactccttcttattaattgtcgtgcttaaagccatgcatattttctgactatccacttttcttttccctgtgaagcaaaaataatattaattgaaactgtaatgtgtggcagagactttgcttggtattttcgcacttgttgtttcatttgtttttcatgatcattctgcaaggtaggtattaatattattagttccatgttacaactgaggaaattgcagcttagggattttaatttcataaagctagtaaacatctttttttcatgacatgtacaatctggctggctttttaatcatcctgccttgaagctaacttcgaggttctttttaggcgattttggtgtttgacccttcccgggttgcacagtgtgtgccctgtactgccgtgcttgtatttcatggtctcttgtaataaacgcttctaaacatgggctcacacgttaatttgtttatagtaattatttccctgaaggaaaaaaaaagtccatttatttttttctcttcttttatctttccagacccttggggcctgattctccgtggctcttttggagcagatgtaaccaagaaatcaatataaccattagattcatccatggcaaccataatgtcatagcatctcctgccttgtagtgttgacagaagtggcagagccaggaggaggggaaatacttcaaagatgggacgggagcctctaaagtgaacgggagaattaaaatcccacggaatctcacttagcagatgagaaattgtaggttgttgcctacggcataatcaggtcttctttcagagaatgtaatggcttgatgtcaggtatggcagagggatctccagcattcaggtatcgtgaggccctttagcagtggtggggagcagctgatggagccggaatttcgtatttgtcctttaggtaccaatgctcatcacctccagaggtagggttggcagatctcatgtgatttccttcttccagtgatctgggcttttattattattgttattattaatgattacctgcggcgaggagagagggcatcctttgtaagcacagtgttcggtttatggaaagcaccgcaggtatgtttgactagtacatgttggtctagtctacctaacacattcagttacttaacaactatttattgagcacctttttggagtcaggtgctactgtaggtatggaggtggagattctgcagaaaacaaagcatacaaaacccatgcattcagggagttcatattctagtagggactaggaattcagctgagctagcagcttgaattttctctctccaaaagaggttgccagttgcctcacagtatctcttctccccttctttagtgtaaaacagtatttcttaaccaggagcaattttgccccccaaaagacatgtctacagactttttggttgtcacagcttggtaggagttgtatcctgtgtgtgtgtgtgtgtgtgtgtgtgtactaggtgcctgtgctcacactactagtatctagtaagtggaggccagggatgctaccaaacatcctaccatgtgcacaggacagcctgacaacaaagaattatccaccctgcaatgccaatattgctgaggttgggaagccctggtggagacagaagtggctgcttggtcagtgactatatttcccagcttcccttgcatctagctgcggccttgtgactggttttcaccaagggaccatgagcaggaatgctgtgcccacatccaggaggagggcttttaagaagtggatgtactaggccgggcgtggtggctcacacctgtaatccctgcactttgggaggccgaggcgggaggatcacaaggtcaggagatcgaggccatcctggctaacacggtgaaaccccgtctctgctaaaaatacaaaaaattagccgggcgtggtggcgggttcctgtagtcccagctactcgggaggctgaggcaggagaatggcgtgaacccgggaagcggagcttgcagtgagccgagatcgcggcactgcactccagcctgggtgacagagtgagactccgtctcaaaaaaacaaaaaacgtggatgtatccttttcctttcctcaggctggatgaagagaataacaaagttccaggtgaccctggagtcaccaggggccctaaatcaccatgtggaggcgactgtctgtaaatctgagactctcaccttggactcccatgtatatgagaaaataaaatcctgttgtgttttaaccattacgaatttgaggatttcagctacggcactttagtctaccctgactattgttgtccctaagtgttctcaacagttcttcaacaataacaatagttgacacttacgctgtgagcacacaccgtgagccagacataaaactttttaaatgtgagattttattttatcttcatacaaactctatggaataggtaccattattacccttgttttactgataaagaaacaaatgctcaaggaggttaataaggcaagtaagtgccataagccagttctcttccaggttctagtctcaaccactgaagcaggttcctttctccagccttaatatctttttatctgggcattagcatctttcttcagggtcgctgtaactgttccctctttggttcctctgccaccactgtggatactccagattgaatgactttttgaaaaccaaatctgaacatgcttctttcctgcccaacttccttcagtgacttttcattgctcccaggataaagcacacacttcttacagggcagaatggtccttctgcatctacccagcctaccgccagctgccttcatcctttgtccctttttcctttcgccacatgttccagtggtgagtgcaggcttcatcagcacagaaaaaaaaaaaaaaaaaaaaaaaagggctatttttttcccagaattattctcgctgtgcagagggaatcacagttaaggtatcaggcttcctatgtggatttccaagagttcaagaaaggattgtttgaccatcccctgggaacactgttgaaaggattcttacattgggtgggtggctcattccaaccagatattgctacagttcttcaaaacacataattgcataatgtaaggggaacctggttttccagctttgttcagctctcacattctatttgttctattaaagactatattgactttggaaagtaatttggcagtattacactacagcagctttactccttttttttttttattgatcattcttgggtgtttctcgcagagggggatttggcagggtcacaggacaatagtggagggaaggtcagcagataaacaagtgaacaaaggtctctggttttcctaggcagaggaccctgtggccttccgcagtgtttgtgtccctgattacttgagatcagggattggtgatgactcttaacgagcatgctgccttcaagcatctgtttaacaaagcacatcttgcaccgcccttaatccattcaaccctgagtggatacagcacatgtttcagagagcacagggttgggggtaaggtcacagatcaacaggatcccaaggcagaagaatttttcttagtacagaacaaaatgaaaagtctcccatgtctacctctttctacacagacacggcaaccatccgatttctcaatctttcccccacctttcccccctttctattccacaaaaccgccattgtcatcatggcccgttctcaatgagctgttgggtacacctcccagacggggtggtggccgggcagaggggctcctcacttcccagtaggggcggccgggcagaggcacccctcacctcccggagggggcggctggccgggcagggggctgaccccccacctcccacccggacggggcggctggccgggcagggggctgacccccccacctccctcccggacggggcggctggccgggcagaggggctcctcacttcccagtaggggcggccgggcagaggcgcccctcacttcccggatggggcggctggccgggcggggggggctgacccccccacctccctcccggacagggcagctggccaggcagaggggctcctcacttcccagtaggggcggccgggcagaggcgcccctcacctcccggacggggcggctggccgggcggggggctgacccccccacctccctcccggacggggcggctggccgggcagaggggctcctcacttcccagtaggggcggccgggcagaggcgcccctcacctcctggacggggcggctggccaggcggggggctgacccccccacctccctcccggacgaggtggctgccgggcggagacactcctcacctcccagacggggtggctgctgggtggaggggctcctcacttctcagacggggcggctgccgggcggaggggctcctcacttctcagacggggcggttgccaggcagagggtctcctcacttctcagacggggcgaccaggcagagacgctcctcacatcccggacggggcggcagggcagaggtgctccccacatctcagacgatgggcggccgggcagagacgctcctcacttcccagatgtgatggtggccgggaagaggcgctcctcacttcctagatgggatggcggccaggcagagacgctcctcactttccagactgggcagccaggcagaggggctcctcacatcccagatgatgggcggccaggcggagatgctcctcacttcccagacggggtggcggccaggcagaggctgcaatctcagcactttgggaggccaaggcaggctgattctggtacaagctccttttctcatcgcagacctgcagtttgagtagcgttgcttaagttacactgtataaacatttatctcctcttgagaggtgaagctggctaggcttcagggtcaggtggggacttggagaacttttctgaatcagctttactcctaattatactccctagagaatgctcatgtgcaaagcagaaatgtagtatttgcaacaccaaaaaaaaaaagttaaattaaatgtccatccaacagagaatggacaaataaactcatacaaagagtatcacagagaagtgaaaatcagagaatagagctacatatagtaaatataggtgaatctcaaaaacatgatgtaaagcataaaaagcagtctgaagaatcggtatatggccgggcatggtgtctcatgcctgtaatcccagcactttgggaggctgaggcaggtggatcacttgaggccaggagtttgagactagcctgggcaacatggtgaaaccccgtctccactaaaaatacaaaaattagccaaagggggaggggagtggcacatgcctgtggtcccagctacttgggaggctgaggcaggagaatccctcgaacctgggagatgggcaagggagtgagactctatctcaaaaaaaaaaaaaaataggtgtagtatgatatcataataatgttatatactgtgcctggtagggtcccagtaggaagcagaaggcacatccagatgcaactggaattctaaagagaaggaaaagaagggacatttatagaggtctcagaaagaggagattgtttaataaccacagattcctcccattccattatttattccctatttgctgctccttatacccagagaaggaatccattttcccatcccttttaatctgggctggctttgtgactggttttaacaaataggctgaagcaaaagtgatttggggtgagttccagaggtcttgtgatttttgccttgacctttttggaatgcttctgacttcatgtaaaggagcctgcactggcctactggaagccttttggagagaaagatacaaccaacagtcattaccaaccaggacgagctgacattgacagactacaaatgtacaatgagcccaatcagcaccacttggagcagaagaactgcctaggtgagcccaagtcaaattaccaacctacagaataatgagcaaagaactggttattgttttaagccactagtttttgggtgttttgttatgaatatataatcaacatagtggaatcaaggaaccaacgaggttctgaggtttccaggaactagcaagttgggagttacctgaaggggcaagtataggaggcagtgttacaggaacccggtgggggcctgagggtcagaggagaggctgtcaggcaggccccaggatcacataaccatagcaaggaggaagtgtggtaggaaataccccgatctctctctcctcctgccccggctgcaatctcttgccaggctctttggctgaacccaataagaaccagataacaagggcatctgggagatgccctctactgggagcagtctctgaggcacagagatggatctgggtaggacagtggcaaacagaataaccaggatgtatattgttcacaaacagcagaccatacacacatttaagggaatgagaaacctcaaagttacttttgggaaggagggatttttaccttaaatagaagagcaggtacatgagtactcattatgttcccatatatactttttctttggtatgtctgaaatcagtcacatttaaggggaaattaagccaccattgagtcacagcctgggtgaccttggaaacaccacttgacctctgcaagtctcattttctctgtaaaatgagggtgacaacactcccctcatggaatccacatggggtaaagcttgtgaatgtatgatcgcagtgtctgccagccaggtaatttttaagtagttagttctgtcacacataagaaatcacatacaaggatgtgtgtgtgtgtatatgtgtgtgtgtgtgtgagagagagagagtgagagagagagaaagggagagagagaaagagagagaaaggcagacaaatagaaaaacagagagagataatactctattttggtgaaaaccattatctgcatgtaaagtaagggaactcttaatgcctttccagctaccctgtcatgcgcaatctcctcgccaccaagcaccatacacctactacacacacacacagaggcacacacatacacacttatgctctgtcacacacacgcatgaacacacactcacacttgctctcatacacatgcacaaacacacatgcaggtacacagagaggcacataaacacatattcatgctcacacatctgtgcatgtagacacgcacacatacatgcatacacatgcacagacacatgcaggcacacatgcacagcgacctcataaggcccaccaagtgcctgttaagacaagcaggagtcaacctccttccttcagcttgtcatttttcctgcaggccgggcttcctccaacccagcgctatggcatttgctgacacggaattaggacatataaataggaaagcaggctcatgcctgtaatctcagcactttgggaggccgaggcgggtggatcacttgaggtcaggaatttgagaccaacctggccaatatggtgaaaccctgtttctactaaaaatacaaaaattagtcaggtgtggtggcacacacttgtaatcccagttactcgggaggctgaggcaggggaattgttcaaactggggtggcagaggttgcaatgagctgagatcatgccactgcagtccagcctgagtgacagagcgagactctgtctccagtgaaaaagagaaagtgccattttgtgggggttgagaatcagcaccttttatttcagtctgttgaagtcctgccacctgcctcctgctactgctgtgacttgaaccacttgtgtgacatctcttgaaaaccagcttcttcttcagaaaaatgggagtagtgacaatacctttcccagggcatgctgtaggcactaaatgggagaatgtgggtgactcagcaccaggcctggcacacagtaagtgctcaataaatggcacaggggttgctgagttttagactcaagtctctccatctccagcacctgtgtctggatgaaagatccttcttggtgtgatgggcaggtaaataagtttgttggcccctccctccctctctctttccctccctccctctttccctcccttgctctctttgcagttgaggatgggggaagagacgaaataattcctgcataatatttgtctaaaaggaatgtgtaagataaaacagtgtgtgtgaggcctgtctttttttttttaatagccccatagcacctggcataggtgggcaccacaggatctatgatgattgaaaggagtgttttcaaattcagctgtcaaagacagggcaatcatcctgcctcctgcctggaaagtgatttacaattttcctccttggtggcatcctaaggcaaacaggcacttttgtttccatggagaacccactcttccctctaaggtagatgatcctccccgcctcgctccttctctccctctcccctttccttcctcctccctctctccctgcattccttacttccccccctctttctttctctctcccttcctcttcccctttcctttctctctctcccccactttactcctcagtctctccagccctttcctcctcccacagaggcttctgccccagaagggccaaacactacccttcagctttgtccccaggaagggctatgcccatccctccttcctccccctatggagaggtgagaccctctgagggcttagaagttttgccctagctctttggactgttttcttcttaagaaactgtttactcaaagagctcagagctccttgagaaccatctacccaggacccaggaaccatctacctgggtccccaggccaggccccgggaggctgcacggtggtctcggctccagtccgaaggccaagtgcaagtgtacgtgccacctcatctctcagtttcttcaccggcaaagtgagagcaactctcccaggagctgccatgagaaagagctgagggccaggggctagagagttgccatgagaaagagctgagggccaggggctagagagtttcctttctgtaggtcctctggctcactcagctgatacctctgccttttggccttgaaattaacttaacagcccaaaaaggagaacccaggacgctcctcagcctgatggcaagggatcctctggagattgattgttgagtgggatcctaggagtgccgtctttatccagagctgaggccctgcggtgggcatgggcaggcggaacagttggggactctggggctgtcttcacccttggtatctgtggagcttcagaaatgccagtaaccaccaagagcagtgtctcagtatttggaacacataagaagataaagctaatctcagagtgtgtgtctgtttcctgtgagcagctccaaatgtgtgctccttagtgtgtatgtgtgtgcgtgccctccccaccagtgggggagcaggaagttcgaacaacagccatttatttattttgcatcagatgcaggctacagtgacagaatgtgaatcttggacgtctggtcagaacactgggatgttcaactccgagtggatgagcctggtctgggaaaccgggagccctaacctggagccccaatgtccccccagtgcccacctcagggcaccatctctgtgttagagaagatctgtgtccgtgtggcctctttctgctcaaggtggggcttactgtcaggtacccaagctcaggttttcatgcatttccagaatataagtatcacttctgtctgtgttttgttacgaataattatgcagatttttaggtggcccctgctaaatatatggtgatgcttctttccttttaccctcccccatctctctaactcccacatatactcagcaccttctctgggccaggacatcttccatgtgcactcagcacacacagatgattcagaactagtccctgcccgtgagaaacttctagtctgttttgggggaagataagccaggctatggcaatagtgtacagtcctgaaggggacacagagtgggcgttctgggagcacagaggagagcccctatcctcccagggaacccaaaaacggtgttagggatgggaggatgatagaagaggctttgtaagaatagctgctgtgttacagaggtgggctgtggggagcaggacagagtcataatctcgtttctggaagatgtaagaggccctgtagtttcttgcaaaaaatgactgggcttgtgtgttactgtcacagctttgtactagaaagacacatttaaacacatttaatggaatggcaagcaatacagggaaaacgaggagggggagatgagcacccttcggtctccatgaattaccaacttagctcctcaaagcagagaaggaacatgagaggaggagatgaacttactgctcacctattgcatttcagtctactttaaacatgatctcattcagtcctcatcagcaactctgtagtagatttattaaccccattttacagttgaggagactgaggctcaggctaagtaactgtccaagcaaagagcaggattttaaactacgatctctatggctcagttcctgagtctgtgctctctttccaacaaaccctattgctcacaagaaccttctatagagaacacagcattgtggtcaatgaactccttgtcgaggatcataaactcagaattcaatataaagtcactattattccagaaaaaaaaaaaagaaaagaaaaaccctgatgcccgcctcctttgaaaaaatagcatgccttagtgagatgggctattaatatactttgtcgctgacatcagtattgcaggctggttctttgggagagccaggatgatgctaatttgcatgctgctttgcatttatttgcattctctctccatatgcaaaatccaacacagctaattagtgcaaccttgttacaatgagaagcaggcccggcgttcagtgccagggcagatggagaccagaacagggacagaaccaacccaaagccaggcacgtcctgggttggacacaccgggagacttgaaggggaggcacatgccctgaatgaaaagtagtgtaactgagcaccattattcttcaaatattgttcctttgaagtagctattgcagagaaggagggtgagagagagaaaatgacggtgggcggtgggtggggaggggatggagagatcgaagaaggtggccagaactttgcctcaggcaggattttgtttgagaaagagcacaggatttggatcccaaaggcttcaggtaaagtcctgcttggagtttggcttcgccacttacaaactgtgggaccttgcacttcatgggtttgcagggattacatgggaaaaagagggtggacatgcactttttgcaaatggtaatgcacaatatagatgtgaggaatccaagccatgccatatgaccatggagggcagcaccagagccaggtggggtctgcagactcagcctcctcttggggtccagaccctggatgtgatccacaatatagagatatattataacatatggatgatatagcatgtgtgtatgtacatatatatatatatatgtgtgtgtgtgtgtgtatacacacacacatgctagcatttaatgatcatctaatatggaccacatactgtgctgtgcttgtgcacctatcaatcatttcttttagtgattcccatgaccgctctaagacctgcttattattatgaccccatcttacagatatcactaaggcaaaaaatgcttgccaagtgcactagggcactcttgccaaatgattgggaattcatattttatgtcacccacttccttttccagctcctatggagactatggcatttctgttaatctgctttttttcacattgcctagttgtgataattttgatttggccttgggttttgtttgtgtcatctgaggacttcttcctctcaactggtcattttggttggtctcgaatatttcagctctgtgtttcattacttaaagtggcccgttctacaagggtagctccaatcaagcaaggtagattgaagtattgttcacagatattcactgggcttcatagaaggagaattatattatcctgccccatgggtatacagcatggttatgtagcttgctctggccaatgaaaggtgagtggaagtgagacctgtcattaccaggcagaaggcagcatgtggtttatcatagttgtctttctcttctaccctgatgataggcgaagttgcagacagagtctgcttcccagagggtccagcagtttcaaaggcaactggtgaagaacaagtcatgcgaataagaaataaacatttgttgtaattgtaagccttcatgatttgttacaggagcacgaactagcatattctgactaaaacattcattgtctattgaatattatgagattagctcttacaggatggcctttctcctaaattgcagaggcacattattcgagcgccctgtgaactggctgtagttgtttctgtggatggccggacaattctcccaatgatattgccattactcaaaatattttctacttccattcaaaaaactgctttacattataaaagtactaaactcctgataacactagtactcctgctaacagccaatactttctaagattttcttatttaatcttcacaaaagctatgtgagataggtgttcttaattttcattttccaaacaagaaaaacagaagctcagaaatcttcggtaatgcattcaagatcacacagctaagcagagagtcaagattgaaatcagcattcgtctcaggcacaaaccctaatctcattactactcatattttccccctccaaaatggatattaactagctgagtcacacacctcatttgccagagatggctgcaaagattttgtctgctatgaaaagcaaagtaattataatgaaaataacgttagacttgatattaggagatgtggagttggttcacagctgtttctagtaagtccagtgaccttgagttagatgattttcctctctggaccctggtattttcctctgtaaaatgaagaactttgcctcagaaaacatagtgtatggatctggccaacagagtccttcagtctcctaaaagtgtatgcaaaacattgtgtatgaatgtatttttctgagtcaaggatctatactattcatcaggtcttggaaggagcctgttacttgcagaagatgaggaactctaattctctgacttgttgaaatgatttatcactttcctcagaattgggtgtgcaggcaaaaagaattcagtctgaaaaaaatggcagttaaattttgtagggtgagtgtcagattcatcaaagaataactggaaggcaagctgtatcatttcatttaaaaatcattaacaaatgtttctgcctcacattcctgtggttccttattgcttactctgcatagaagctgttcattcatctcctcagccagggactgtgtcattagttgtggctattggtcatttcctgtctcattcagcaagtaatcatattattttgactgggaagagaatgagtcctgagctgtgaactcagtctcacaataacttgaggatgtatttctttgaatgtgggagaaaacgaaaacagagcaggaaaataacattcattgagcccctatgatatcccaagctcttcaatggcattttcttctttttttagtcacataggtctattttcaaccaaaattttggggtaactatcatccattggccactgttttaggtgctgcggatatagaaatgaacaatcagaccaaaaaaaatcacattctgtgagcttatgttctggtgggggagaaaaaaatgtgctagtaaaatttagtaaaaaatatattagtaaaatatatatgcttacatatgctactgcggtatatgcgatatcctcgtattacaggatcagagacattcaataccattgattattgttatttctatatctatgtctctgtctatatctatatctatctatatctaatcagttattgacctctttattatcatagtgtctctcaatgtctctagtaatcctgcagtttattttgtctgacattaatatagccactctagctttcttatgcttattgattgcatggtatcttttttattctcttacctttaacctgcttgggtcttaattttaaaatatgtcccttgttgaaagcatatagttggttcttaattttttattcagtttgaaactctctctttttttttgagacaagagtctcactctgttgcccaggctggagtgcagtgacatgatcttagctcactggaacctctgcctcctgggctcaagcgagtcttgtggactctttcccttttctttgaggttattataattattggtaaatttgtattgaggtcatctatttttatctttattatttatctcatttgttttttattttttctctcttttcctgccttcttgtttaccaagttttttttaatattttgtttcaattccttgttttctatctatatctctctgatatttctgtgtttgatttctctatggatctttgagttaatattaaactaattctgatttatctgaaaatatctcttccaccttcattttttaagcaaaataattagaaacacaattcttgattgataatttattttgttttaactgcactttgctgtttcaatatcttctgatttacagagtttctgatgagatgtctgccatagattttattgttagtttcctattggaatgtattatttcttctggttgcttccaaggttttagctttatgttatgcttctggccaaagatagtcatagttttactgtgatgtgttcaagaatatatgtctttgtgcttattacgctataggtttgttaagttttggggacctttaaattaatcatttacacccactttgggaacgctccgaccactatatattcaaacaacatttatattcctttctacgactttacttcttctattcttattatatacatgttggatcatgcttgatattgtctcataggtctttgaacttccgttttccttaaatattttaaatttctgttatttgaatcaaatcatttctattgctctatcttcatattcactgatttttttcttctgatatctctaaaatttaactaatttttctttagagctataatttccattgtaatagtttctaattccccatttgaattccttattagacaattcattcatgtcacattttgaaacacttttctgctgactacagtatctttgcaatgccatgtttttttttattgcctttttttccttagtatgggtcactgttttctgtttctttgcatgtgtagtaatttatggttgaaaagcagactttgtagataacacattatagtgacactggattatgttgtgtacttttgaggattattgcatttttgttatagtaagtagttaacttaaaaggattcaaagctcaaatgttatctctcttgtagtgtgtagcacctgatagccttagtctcttcttatggcttccagtgttgtatttttagcctgactctctggggatctcctaggtgcctacaaaacttggttatttgccaagaatttgggcggtgtgaggttcaccctctcagttttgttttcttctaggcttttcccctaatttctagtttgtctacccacctcaggttttctatccttacatttcaggcctataagacttcctttttctgccgcccaagctgtgcaaaatgggaaagacacgtaattaaaaaaaataataatagaaaactcacagatcttatcctttgtagttctatctttaaagagtaaatgtccagctggtctacttatgccttttactggtccctttgggatgctcctgtgcatgtacagtttagctgtcagctgaggaatttggcagaatttataactggtgtttatatctcactacttctgtgattctcattgccaggaatcattctttaaagtgttacctcctcttctatccctatatcccgacctctggcactttaggccagtaagattatgggttttcgcatctgcagccacggggatcacagagcaccctcaattgagaaagctgtaaattaccaatccttctcacagttgtggtttttcaggattaaactctcctctggctactgtctggtttgggatgctttccagtgtctttaaattgtttaaagttttaaaatccagtttttataatagccatctgcaggaggattcatgtaaccactctactcccgtaccattgctcctaattagatttggccctgggaaaatactatgtgtaagacacgcagggtggggtgaaaagtttttctgtttcagacatcttattaagctgagtccatttttttgtcatttggtctcctttcattcctttttatctcctgtgaaattcctagcggctatgtcttcaaataaaatgtaagctcttgaggctagagctcttcatgaaatagaactgggtatgctgaaaaccttcagtaaattatacagcctcatcaataacaataactatggtgaaaataaaagcaattggtcctcttaatgcattcctactagaggaataagcacttactatggattctacactgtatttgctttgcactacattgatttagagatggaagattgaatgtaatggcagccacctggatgctttcttctgaacacccaaggtttattcaattttgtcattcacctcttttgaatctaaggctggcatatattggttttgcctgccctgcagccatcctcccttttgatccaatgtcttaatttctccttctggaaccatccttgactcatccagatgagtgggaccaagtgcaataggtctatgtccaggataattaaaatgtccctgtccttggctggggactgaacatgtaatatgatccaggtgggtccactgaaatttattcctgaaaatctttttttttttgaactttggagaaaaagaaattctccttcacctgatattgctaagaagattgagaatgaaactttattgacttctcactattaataacttcaaagaaaaataaaagcaatgtggatttggtcattggttttttagtcctatttctggagagatggaagccaccttgacgtctcctgggaagagtctacctcactgaaatcaaaacaggagaaattatacttaaaagatggcatttgtttgtgttcctggaagcagccatctcggaaacttttatacctaaagtttacatctgaattttttagtaacctgagctcatacatttcttttatgccaaagtcagtatgaggtagttaggtttctatcacttgggacccaaggaaccctgactaaaaagtaataattaattgtctctttagatctcacggatgcattagaatcacccaagacccgacataactgtagtgggttgaataatatctccccagagttcatgtccacatagaacttcagaatgtaaccttattttgaaatagggtctttgcagacgttgaaagttgagatgctatcataccggattaatgtgggtcctaaatctaatggctgttgtggttgtaagaagaggagagaatacacagagacacgaagaagaaggtgatgcaaagatgaaagcatagattagagtgatgcatctacaagacaaggaatgtaaaggtttaccagtagtcaccagaggttggaaaaatcaaggaaggattctctcctgtagccttcaaaggcagcatggctctgcccacactttgatttcagaatcctagacttcagactgagatagaataaatttctattgttataagccacccactttgtggtagtttgttatgatagctctaggagactaatactgtaattcccacttatctttccagcctcattatagaggcaacagagagcacagcggatagtggtacagaccctggaattggactctttgaattcaaattttggccattttacttaaatctctgtagtagtccaggttttccagataagcagaatttataggagatagatatattaaaaagaggttcattataaggatttggttcacatgggtatgcaggctgagaaattccaagatccaaagtcagcaagacccaggagagctgatagtatagttctggtccaggtactaaggcctgaggaaaagatcaatgtcccgggtcagcagcagtcaggcagagaatgaattatctctcattcagtctcattctcttcagcccttcaatgaattgaatggggctcacttgcattggagcaggcaatctgctttactcatccaccatttcataataatttcactgagaaacatcctcaagacacaaccagaataatgtttaatcaaacatctaggtatcccaagtcccaatcaaattgagacatgaaattaactatcacatcctgggtctcagttacctaacagagctaataagagtaataactcccttcttaataaggttgtggtgagaataaaatgagtttatattttaaagcacttaaaacaggctttggcacacaggaaacacttagtaaatagctattgttatcatttattatcattatcattatcactctctcctgccacagccccacaaatgctgcctgctccaactatagtaaactgtttgtagttcttcaaacagaacttagaccaaggaacttgagagagcttcttgctcaggatcaaccagcttccatgtgtcatattatttcttttcaatttaccttttatttttaaatttaaaaaattattttcaactttagttgacacataatatttgcatttgttgggtacatggtgatgttttaatacatgtataaaatgtgtaatgattaaattaggataattagcatatccctcaccaaaaatatttatgatttctttgtggtgagaacattcaaaagcctcctcctagcaattttgaaatagataatatattaactatagtcacccaactgtgcaatggagcactagaaatgattcctgctgtcggtctaactgtacctttgtacccattgaccaacctctccctattcccccgttctccccatccatgtgtctgatttagaattcaaatcctggtttgcttctatgcataacaggcacaatgacttattccagagcaaaaatagtgaatggtgtggaaggcccctctctccatttctccaacctattctttatcctgagccctctcccctagctgtcagggcttttgaccaagttcagtaatcacactgtggtcgtaggggatggcccgcactctgaacagaagtgttaattttacttaaggcctgcctgagttttcttccctacagtaacagactcctcctcttgtctttaaaatcaggaaatagctttgtttttggggagggagggaaggggaactttaaaaagctcattacttctatttgtcatatttgcaatcagtaagacataccctaaaagaacttttataagcttagaaagacagactagaaaggagggcccataaacctttacagatatttctgataaaaacaagtgggaaacattcttcagtgttctataaactttgccttcgaagcctgtattgatcttgtcttggtctctgtcaacacaggtatcccttgggtcaatatatcctgattttccatcccagcacaggctggaatgaagaaacgactttttgatatttccagtcaagacattttctttgtgttgaggacataaacactgtcacaaccctagagaggtaatacctgtgtatacataagatatacatagtttttaaaatgtctcctattcccctcattgtgtgatactttttgtgataacctgtccttttttctgcctgtccctttcccctgtgtccctatttcttatcctttttttttttttctttttttgagaggcagttttgctctgtcaccagggctggagtgcagtggcatgatctcggctcattgcaacctccacctccagagtttgagcgattctcctgcctcagcctcccaagtagctgggattacaggtgtgcaccaccatgtcctgttaatttttttatttttagtcaagacagggtttcaccatgttggccaggctggtctcgaactcctgacctcagatgatccacccaccttggcctcccaaattgctgggattacaagtgcgagccaccacgcccgaccccctatttcttttcacccatctccatggatgtctttctgccttttcactgtactcatttctctcatctgcatttctctgtttctgtttctgtctcaggtctcacaacagatcttccattgactgtttatcatgagaaaataatgtttctttcaagtctagagctaattgccaaactctttagcttttcttgtctcctaaattgggataagttcatcaagtttttatttcctctcctactacaaaggggccatcctgtaacaggaagttttattctataaaataaagttttatcctgagcagggtcagcaaactctttctgtaaaggatcagatagtaattactctttggctttgttggtcatacataggtctctgttgcaattactgacctttgccattgcagtgagcaaaacagagccataggcaatgtgcagacacgccatgtgtctgtgtttccaataaaactttattcgtaaagaaaaagtagtttgccagtgtctgttctagaacattccttgtgaaagatgaggtgatttggtgtatttctgattttcttacttggttttatcctcttggtgtggttgcccaagattgcaccattaagagtgcgactagatttgaaccaggtctgcctgaatccaagctcatgcttattcctccttcatcacacttcttctccagggatacaagtttttgctgaggcagactggagtcatttttcctttccaaacatctttaatggcttttctttgcccatttaataaggagttgtttccttagcctggcatctaagtctcactaaagtagggttccaacctcttttttcaagcttctggtccactgggcctttccccagaacttccactgtgtctgtccccttttacccactcactctttgccaggcagctgaagtgcattttcactgctgctccaaggactgcgtggcccccctgccaggaacaccttcccttgttcctatatctgtctttctctactttcaagacaagttgaattccacttatggaatctgggttagatactctcctaggtattctagtataacactcacctacctaaaactctccaacacctttccatcacactcaccatggcttacaaagtcctctgtgctctgtccactggtgaccatagcctctcccacaaccagaaccccccacctccacttacccagctctacatgtacctggcttcatggctgtatgtgaagcactctcccacctcactgaatgctcttcttctttttgtataactcacttccttccaccattcagatctctccttaaatataatccccttcaacatcccttccctggctacgtgatgtaacacagcataccccaaagctgttatggggccttgttttaattttcatattaccccatatgaaaaacctgacaatatagtatatgttcatttgttcattgccttctccccaagtaaatggaaagcccctcaaaaaaagggctcttcatgttttattcaccaaattgatcaactgcttaatcaacatttgttgactgaatgaggccatcagcagaataaaactcattctgggaaaaacataaacaaaagatagagcaattcaggcatcagataagtgtttgaaccaaatccctttacaacccttctgattctaaggtttgatgacttgaggtgatactatctctctctgaaaatcagatcacccccttgacttctgtgtttctgttgatgggtccgctgtccttttagtcattcacggtttaaaacacaccatctgtcagagtatgttgtcaggccccttctccatccttcagcctggcttcctatacatgttggcttcatgccacctggctggctttctctatggggtagagaacatggctgtatatatttccaatttgtttcctcctagtttagcaacatcagctgagaaaagacttctctttcccaatatctgtgtattgatccagaaaaatattctgagtggctcttgttgaggaatctgcccaccactggactggtcattattacagtggatgggtttttatgatggaccttcttgcatccactcctgagactgagggttagagtgagactaccctgacggaagacctattagacccatttggaatggaaaaggttgtggttccttcgaggaagtagaaggactgggaagacagtagcagcacatgtctcctgtgtagttgcctataaatgttcttaagatgcacttttgattgtgttacttccttgctgaaggaaacaaaaagggccagtgcctctgtgtggaagtcatggccaggtccatgatgttccagcactgtgggtgtaggaggtttctagaagagctggtgagcttgctgaatacttgaggttagactttttctgctccggagcactgtctttagatggctgtctaatcaagcttttctgaaatgcaccacccattttctgtctttctgtttgcttcaaatgctttttcttcctggaatgatttcttcctctgtctccatctgaacccacacagaagtgctttactccagtgttttctaaacactttctgaaatcttttctggtgcccctcccttgaatattcacagtctttttttttcttttcttttttttttttttttttttggtacatttgtattggcgcttctacataaacaggttgagcgtaaggacttctttttttttctgttttatttttgcatcccctcctgttcctataatgtttctggaaggcacaattaatattcattggactgaatttaatgaaacagagttaaatatatcagtctacctaacatctatagtctctatcattcatttagtatttacatttgccaacctctattgttatttacttctttatgcatatttgtctaagcaggattactattatctagcatggagccttcacaacattaggttgccaaaagatgttttgttcaatgtgacacatattgattgtgtgccttttatatgctgagcactaatatcggggctacggctacaacagagaacatggcagacctgcttgctgcctttatagagaccctagtctattctgggagtaagataatgaaatgtgcatttatagaactgtgtgctgagagctgagatgggagaggggagctgccagagaatatgggtgggttggggaaatgttgcttaatctgtgtttgtgagatgaatgactagggaagttatgagtgagaaatagccattttctttcttgaagatgtcctcttcttcaacttatactaaagccctcacatagggctaagccccgtcttgtagtttggttttccatagtgctgtcttttttcctttcttattgcatttaacacattatattgaaatgtaggtgtacctctgtagtctgcttacacacagaaaacagattgtatcacactcaacaggtctgtccctggcatctagcactatgcttggtacataatgaatgttcaagaaatgtctgttgggtgcaaaaaaaaaaatgagctaaacaaagtggatctgagttgtgttggggaaaatgagaggtttatcagaaaggtgcgttgatgggggcaccttaaggccagggtaataaactccaagcatttatggaacatgactctttgttacagaagagggggtaaaggagcctggggacagtgacaaagactgatgttctgatgttgtttgaagcgagataatttcatagcttcaaatagggaagcacatgaccatttgtgctagaccagaggacaatagaccttgactcacaaccacagaggcaggggagatggagttactatcttctgccaagaggttactcaaaattaaaccttcctcccaactcccaaaagccagagccatggccttgtctgggatttgccttgtttagaagaagtctgttctttggcacatgggtttgttttccttcttcaaaaacaaaaatagactcagtccttgagtaaactcttctcagggtaaggaagggggttttgaagtgcagtcagaaaaatggatactgaatgaacagatacccttgggaactgtcgccctaggcaggggaagtggggagaagtgagagttgtggtggttatctgttaccaccaggaatgtgataactgctaatcattattattgttattttctcacattcactgtggtataaccatatgccaggcaccatgctgggcacatgacatggacattatcatttgtttcagaaaacaacctcctgttgtagagactaccagtatcctcattttgcagataggtaattgaggcagggaataatttactgagcattaatttgtgccaaatagaatactgagtggcacatagagctcatgtaattctcccaacagctttataaagtaggtaccttgtaatacttcttggtaagaggataactggtataaagtttctgttatgccagttgtctatcagataactgagaccctaagatgtgaagtcattgttcagagtcacacagtaaatggtgttgaaattggaatctgtgttccaataagcagacctggaagcccccgtaaccttccactccatggcacaaatctgcctcctagaccaggcatgtgtctatgggtaacaaggagggggttatggggagtgattgggggcactaagagtgatcaggacacctgaagttcagagacctgaacttaaaaatagtagtaattgttaattttctgctcctgtgttcagggacttgatctagattgtgttgagttctagcagcccttctctaatagggcagccattatccccattttacaacctaggaaagtgagacttcagatggctaaatcacttgctaaatgttactaagctactcagtggggaagctgggctttgaatataggtccactaagaacttaagccagtgtggactcttctaggagaccttccccctggttctcaagtctatacacatgaaccctactttatctgctaaaacaaaatatatctgcagaacaaaatatatctgcatgttacagggcaaaagcctctaggaagatgaaattggattcagaaaggtgaaatattttatgatggtcaaaacataattggtgacactaagcacatatagtcaggattactatccagagcatcatacttgcaggtttcatgtgggtgtggcaagggcgagcacacatggccccttgctcagaagagccccaggcttggtttaatgctctgtagtcactagcttgaaactcttacagatttttatctttgaatttgagttttgtaagtaaagtctgatggggtaatgcagcatgtaagtgatgagaggagataggcactgtatcacatttcttgtttatcacatatcgtccttgccatgccccatgaggacagaattctggtggatccacaaagcccagaagttcaatggaactcacagccagtacgagataagtgtgtgatgaaagccgccagccattttgactgttggtataacgtgtgtgtattgaaaggtaaaataaacataactgagtttgttttgggcagtgtttttattcttttggtaagaacaaaatatacctgcgtgtataggctagaaagtacaaattgggtaattttgatgattctgtatgtggattcaatgctcttatacttgcacttaaaactggaattgtacaatataaagatgaatgataaaatgtatgctgatgatttaaaatatttattatgccttacttatatttatattaaataaaaaatttaaaacagcatgacaagtcaaaagagagactgacagaaaggaaatagttttatattttattaatagtactttgaatgataatttccccctgcttttccaagaaggggactctcatttttatcatgttgtcagctctgctttcttgtgagaacagcaacttgaggctcagagaggtcagtgacttgtcttaggtctaggagttgacaatcatccaagtgtccacagtctgattttgctggcctgctggggatggctggactcggaatctctgaacagttgggtggtgacacttctatttcaacacccatttttacagactagttcactcattcctatagactggttctccctagtgctaaggagaatagaaatagttaggaacttggattcttctcatttttcctacttctgttcctatctgtagacaaacttatctctagaccaacttgaagtacgatgaagaagcactggatgaaaaaacttagaaaatatgcatgtataagttagttattgttagttgtgtattcaagttgctgttctatcccttctagctgggagattttgggtatctgttaaaaaaacctctaaactggagccatttgtcttctgattctctaccttcacatcttctcatactgaggtcaagtgtacctcctcccagaatccttacctgattctacctgagaatactgagatggagaatttaagtatagacttcaggtcccgcagcttaatcagggattcacatctatctattatgtatattgtttcactttcctgactattttattctttttcctgcctcaggacatttgcacatgctgtttcccagaaaaatccctcaccccacaccccaccaggacttgaaggcagcctcctgctgatccttcagtcctcaatctcattgtccctgctggaagaaacttttcctattctcctatctggaggttgctgtattactctctcttctctcctctggcaccctgttctctttccttcataatgccaccacaacttttaatcttataccaacttcttcatttattagttaatgtctatgaccctctataaactctacaaagacagggacagtggtgtttttataacttgaccaccattacctgtccctttatcatatcacagaattgtgagtgcacaattaacttttttaatatttatttttggtggggatcaggattgaacaaattaaggagaagttgtaagtatagcgagaggaaggaggacaacctggggaatgcaaaaaacttactctccccaagggagtttggtgatggaggcaagagggcaaggtacctgggcacacctgtgaagctgttgtgtgctctgtggcttggctattctgcagtcacaggttcctaagtgtgctgctgtggcgaccagggggtgtctctcgtgtgggtggtcctccctgaagtatgcagctgctgtgcaggccgaggcccagcaagagcttgtccgaggcctgatagatggaacagcccacagcatttttcttgcctggttgctggcagctctctgacttcaaagctgggacacgctgacccagaacactgtgacctttggcacgatttcctctatcctctcccctgctcgcccagcaaggaggaaggagcccagctcccttgaactggtttttgctgcctggagggcaaatttttctttgattcagagactggagaaagggagacataggggaggacccgaggcagttgccttctgaacatccggggagccagactgggttccactgtgcttggaatttggcactttggtaaactgggtggcagcctgggagattttctctttctcagcttgaaatgggtcctgttgttagaagtacctgcctagactctggaaaaaacagggcagggccacttcttgtctaccagcccttgccatccagcctcccaagtgccatctgattagatgagtcaaattgcattctgatttagctgagagttactaagggctccctgagtaactcttctgtcatctttgaaatgtagatagtaataggaactttctagaaccagcatgaggattggagctgtgtgcataaagtgcctaagcacagtgcctggcacaaggcagaagggaatcaataagtagtagctgccatcaccatcaacagcgatgccgtagttttttctaggctgccctatcacacattttatccttttggattgacacaaccccttctttgaagaggaaactgaggttgggaagtgatcaaatcactctcccacagtaacattgctaatatttgttaaaataaaggccacaaatccaagtctgtcccactgcattttgggtcttccttccttcctttctttccttttttccttccttccttcctttgtttctttccttttttccttccttccttccttcctttgtttctttccttttttccttccttctttccttccttccttccctccttccttttctccttctctctctttctttctttctctctcttttttaccatttatgtatgtatgtatgtatgtatttatttatttattgccttggcttacctccgtgagccatggaagtagaaactagtttatgttgttggcatctgctgaagacatatgattgtcactgtaaccatcactatcaataacagagagcagagatagctgccaacaccagcagaggacttaatagtttatgaggtactttcacctacactgccattttggcatccacaatcttgcgtttgtagatggaaaaatcaagaaagttttaagacagtgacttcatagagttacttccttctacatagttaaggccttatttgcctatgccagggagtgattagctaattcctgggatatgtacttatgtgacctcttttaatctcaactgtgccatctatgagctttgtgacctcaatcattctgtgtgtctttcttcatctataaaatgaagataattatagcaatatgagacaatatataacaactgcttatcacagtgtccagaacatacaaaagcttgataaataatagatacatactactatcaggttggaaaaaatgtattctgttgctagaattttttatttcttttgcaatgatagtagctgggtaaaattggacttaaaaatattaaattccacaaaagcaaaaactgacaaatggaatctaattaaactaaagagtttctgcactgcaaaagaaactattaacagaataaacaggcaacctacagaatagaagaaaatttttgcaaactatgcatcagacaaaggtctaatatccagcatctataatacacttaaatttacaagaacaaaccccaagcaaccccataaacagttggcaaaggacataaacagacactatccaaaagagggcatacatgcagccaacaatcatatgaaaaaaagctcaacatcagtgatcattagagaaatgcaaatcaaaagcacagtgagacactgtctaacaccagtcaaaatcgctactattaaaaagtaaaaaagtggctgggcacagtggctcacgcctgtaatcctagcactttgggaggctgaggtggatcacctgaggtcaggagtttgacaccagcctgaccaacatgaagaaatcctgtctctactgaaaatacaaaattagcttggcatagtggtgcatgcctgtaatcacagctactcaggagcctgaggcaggagaatcgcttgaacccaggaggtggaggttgtggtgagccgagatggtgccattgtactccagcctgggcaacaagagaaaaactccatttcaaaaaaaaaaaaaaaaaaaagtaaaaaagtaacagatctggcaaggttgtggagaaaaagaaacacattcactgttggtgggagtgtaaattagacactgtggcaatttctcaaagacgtaaggacagaaataccattcaatcaagcaatctctttacagggtatatacccaaaggaatgtaaattattctattataaagatacatgcacttgtatgttcactgcagcacaattcacaatagcaaagacatggaatcaacctaaataaagactggagaaagaaaatgtggtacatatacaccacggaatactatacaaccataaaaaagaatgagatcatgtcctttgcagggacatggatggagctggaggccattattcttagcaaactaatgcaggaacagaaaaccaaatactgcatgttttcacttataagtgggagctaagtgatgagaacacatggacatatagagagggacaacacacactggggcctttcagagggtgaagggtgagagaaaggagaggatcaggaaaaacaactaacaggtactaggcttaattcctgggtgatgaaataatctgtacaaaaaacacccatgacaaaaatttacctatgttacctgcacttgtatgcataaacttaaaataagttaaaaaattaagttaaagaatactaaggaaacctctgagcactggggggattaggcaggaacccattgctttttaactagaaatagcaatgctcaagggtatggttttggttcaggaccaaggacagcacgaagcttgctcccttgccccgcacttgggacttggcctgtaggacctgagtaagaagtctacctcaaggcttcctgttctgtatttgccacatgtctcctgacttctctgcacctgcctgtggcatttttcccacctaaaatcctttttcctctcttgtcatgaaatattttcaacatagcaagaagcatagggaatatactaatcacctttgcacctaccactcacatttaacacatgttgacatttgccacagttacttctgatcttttctcttttaaaatgaaacttggcagaggccgctgtagcttttttacacacctcctcgtcaatatttctccttcctctccagaggtgactgtgggccttcactatctccctcttttctctaccccagttatcttgcattcaactaaatcctccacatttgaaagagccaggtcaaggcccctgtcctccagctcatgatgacctttcctgcatgacattattgcattcgattttggagagcttattgtgatttattatttatcatcctagtcattcattcaacctgtgctgaacagaccctcctttgatgcagcactcttctacttgctggggttgcaaaaatgagtcccacatggtctctgcttccaagagctcacagaacatggcatgtgggtgaacattatcttgcagtgagaaggaaagcttgttgggagaaggacttgtctttagaagtctgccacagcttttacacaggaatttgatctcacataaacacttgtggccttgtgatcataagactggaaatggtgtgagaatcagaagcaaggtagaggtgtctgccccatgtcaggccttatgtaaggctctggaagtatattatttcatttaatgttccacaaaccagcaagatgagtgttatacctttctttaacagatgtaaagtcaagggttggaggtcagaaatgcagttcacatttgaactgaagctctttaatgtcaatgcctgtattgatctgtctccctctttaggccataatcaactcaagatagactgaacttaattcatctctgtttcccaggcccagcactgtctctgagcagatatttgatgtgtgaacatatatgctgcagtagatctctggaattaaaaggaaacaagaacacatgggccttgcccccaaggagcttaccatttaggtgggcgggcagactttggtaacaggtgcaagaaagcagtgcctaaatgcctgtcacacagcaagggatttctactctaaatgggaggggagatgacattctctttgctgatccaggcttttaatttaatcaggccaaatcacttggggatacagaattttctcaggacccctgttttactgcagttcaggttgcctctttttccccaaactctgacattcctggctctatccctgtcttctctatctgccccattgctctgtcactcttcagactttgggctcaaacttgccacacagattctctgctctcttctttccctttggtgtctcttgctgtctggatgagaatctactgctccaacctcaggggagcaaccatcagctggaccaaactccacttcaccacctccaactcaagaaaatgtggtatttgtacatgcacgcacatgcacatacacacacacacacatatatatatatatatatataccctttatataataataatgatatataatcccttttccaagaacccatgtcttcttcaaaacagagtctggggcaggggctcttctgggtggcatagacctccttggcagattggtgaagcctatgatctcttctcagaataatgactttaaatgaattaaataaagatacatgggatttcaaaggaaactaattatagcaaaaaactgttatggaacagtacacgcacatgcacacacacacaaatgatattagttatccattgctgagcaacaaaaagtgtattagagcaacaggcatttattatctcccagtctctgcaggtcaggggcctgggcgtggcttaattgggtccttttgcttgagatctctcatgaggctgcaattcaggtgtctgccagagctgtagtcatcttgagatggcctagggatgagcctgcttccaagctcactcacaggcttgtgggcagaatttggtttctcacaagatgtctaactgagggcctcatttcctcactgattcttggccagaagctgccctcagtttcttgctatgtgggcctctctgtggacagctcacaacgtggcctctggctctgtcagagtgaggaggtaagagggaaagtgagtgtgagcaagaccaaagtcataatcttttataatctcctcgtggatgtgacacctcctcatctttgccctattctatccatgagaagcaagtcactaggttcagctcactctcaagggagagctgaaaatgagttgtgaaagccagaaggtggagtcattgaaggtcatcttagaagcctgagtaccacaagtgctctatatgctatttgaaggcatcaaagaagatctagcagaagttcagtaactaatgtaactttgaaatagacacgagggcaatatttcatgatctctgccacagctgacatatgatatgaaattatctgtcatttctgtggatgacaaaaatcacagctattgctaataaactgtgtgttgtctacatacacaagtgatagaaatactaaatttcaattacaggtgagtgcaaatcaagctgtattttttcctttttcttcccaggcctccaggtgtctgcattctgatccttgaagagttcatggacctaagttaagaacctctcctcaagagactgaatgcaggcagagatggcttattggttcatcacaggttatgtgaactacccactgtaagatccccagattacttggggctaaaaggtgtcccaagagggtttacaacattgccagaaattagtggggtcacttctgtccagattctcgttttcagccttgtgtgtctaaaaaatatattttttattctgtattctaaggtgagcagggtttaagattagactcacattaactagatttgtaagaggcagaagtataatgcatattttattcactcaatcactcatatagtcaatcattcatatagtcttccattccttcggagcacactgttaggcacacactgattgaccactactgtgtgccaggcacaaaatacatgctaggatcagtggtctctgaatagtagttgaagacataatcccggatctctgggaactgatggtggtttacagtggtcctcagcttcccttttctcccatgacacatgcatgaccatgatatttactctagggaaatccattttacttccacccattcctgcattagctcacttccatatagaaattttaatctcagaagagctttggaggaagcttctatcctagtctgctcttccccatgaaagaatggctttcagagtcacaggtgttctctcagcttctacctcttctgtaaggtcagtcccctgggacagccctttccctgagtcagggtgataggaggggtgggaaagagaaggagggaggaaacgaaagagagaagcttgaagttttctagctgtaactgagtaagtcatctctatcagaagaggcaggagtgggaaacctgtttttgactcatttctaagccatgtgttctaattcatatttaccagcatgggaaaacagttcatccctacctaactctcaggtctgtggctcatttgagggggaaaagtataattatcaccaaacattttacactttcctatggccatgtccaggttctccatgtccttactacaactccacaattttttttccccaatgcaagaatggcattattaagtccataattcactttaatggatctttattcaacaaatctgtattaagcactgggctagacgctaaggattgaagcaggaataacatcaaggaggaagtgctgctctcctggagcttacattctggaggagagacactggttacaaacaagtaaaccaagatatggatgagattctgaaaagttctttagaaaaaataggccacaggctggagagagaataaccagatgacatttatgttgacaaggtggccagggaagtcttcactgagaagaaggcatttgacttgagacctgtaggacaagaagctgggcaggtgaaggctgggcagagaacattccaagcagagaaaactgcatgaggcttgagtttcagctgaagcttggcatgtctggagaaagaaaaagtttgcatatttttacttaattgtgttcaaagaaaaatacatgtgataatcttggtttgatgtacaagtggtatgaatgcacagattactcctaaaagaatttttctttatgtgtatatatgttactaattttacctatcacactttgggaaaactaatcacttttaggcccatactagagaacttatggataattctggagacttgaatatctaccagcctcagtaactgtctttctagaacagcactggataagtcctgccttagtcttccttttatcctagactacaaatattctcttcatgttgatccactttatcttcagtttgacataccttagacttttaaacaatccattcacatagcaagcttcatgcaatgtcatccaaaaagatttctaatttctataaagttttggcccttcttcctgtctttggtgagattccttcacccctaaggacctctgcaatgttataaatattcaccatttattatatatatattttttctctagctgtttccaagttcctactctgggagcaagccgtacccagcacttcctcttctccctccctgtgtcccactgccactgagtgaagccacactcggtccgactggcggatctttctaccctcccttccctctaaatatcctttggcctcaaatgctaattgaagagctcagaaagaggacattaagaagggggctttctggtgggcaacaatgaatcaccggcagaatcactgttcagacaggcggagacgggtctttctcgccctctgatgagtcaccactgtggtgggggggagtggacagtcagccagacagataatgtgtcagtctctctcctcagcctgaccctggacatcaaaatagactgcggttccctccttctgggcccattgctggcatttgacctaatgctatagaaatttaaaccaacaaggagggtagtaaagttaagctttctaggccattgagctgaagttttaatattgtaacagagattcttaagacaggcttgtcaccctggccagtgactacccaagtaatgtcttgctgacccaggccatcctctccaccgatataaatgctctgtgcttcatctcaatgttctcatcgttgaggtctcgtttcatttgacagtgaaaaatgcagaccagatgaaaaccactttctacaaggcaaacaataacaacagcttctgtgaattaaacatctactgtgccaggcacttggcaaacatcatctcatttaattctcacaccttctcaagtaggtatggctcactctacgatacagaccatgaaactgaggctcagaaagttgcagccatttcccccacgtgttcacgggtaggaaagggtaaaactgactatagaataaggtgattatagaacttatcatccaaaacagggcacttttgaaagtaaaagggagaactagtaataatttcacagccacagatgcaaaggggaaatgtcccagcaagccagaatataaaaatgcctgagttttgaaccagtctttttggctctacagcccagcccattcacccaattggttgtcaggaaggtaacaggagaaatttgtaatcagctcccctcattctcttatgatttttttgcttgctgtttcctttccctctcttttcattctgagataggatgaagcccaaacctctgtgctttcaagcagccctgtggacgattctgatgtgctgccaggcatgagtactcctgacgatatgatctttgaggacaggcatttgttcttattcatcattgtatcctaataagtaacatatgggcatgcagtaagtgcttaataaatcttcattcaatgaatgagtatgttattgaatgaatgcaatgatgtgcagaagcaagcagggaggagtatcactgtgtgtctgaggaatataaatgagtttggggcatccatataaagagaaatgagaaagaggaaacagtggacacatctgccaggctgagcttcaatttcatcattaaggcagagccaccagtctctgagtaggaaagtgacacagtctgatttgcattttggaaagaacatttgtgtggttgtgttccaggttaagcctatgagaaattagacactgaaggtatttaaaacatgttttcaaaagggctactgagtgcctagcataatataaccttttacatatttgaacaatttccaagctggggctagcaccacccctgctgggagtcagaatctggacactctctggaccgtaattgctcaccttgttgggacacctaagagccactctttcgggggaatgttttctgtctgtttgttttctggcttcttccccaatattagcggttctaccatggggtggctgggtgggtggaagggacccacgacattcaggaaagtgaggagcagtttctgtgattatagcagacccattcactggaatttttcctgacatctctccatgacctttatgcctccaagggcctggacacaatgcagcagctctccagctgggacagggcacatgagggggtatcatacatgagtgttcccccaagtggggctgtggccactgcagagcagcccaggggaccttgctgtgcacagccctatgtcctggggtttcccgcaaagctttgccctgtctggtgagacggctgccagacagtatgagatgaaagacaccgttcacacttaatggtgactggaatgtgcgccatgtaaaccagatgatgtggagaccaatttataaccacttcacagttcaatgatgaatggtgggtcccttgtactgactctttaactagctcccttcaaggaacaggcggcttccgagattgtcttaaagcagtgtgggatgtccaggccctgcccaggtcctatcttttcttccagcaccatccacctccctgaaatcttctcatagcacctggtcctcacctcgttcttctcgttgaattctgtttcctccttggtgtctaccttgctacattcattccacaggcatctctgttctattaggcagtcctttctgtaagcatttcccatggatattataacctaaccttcaagctttgtcaacacttatcagcagaattctgcttgtatcttgggccagaatgagtcacagcacatccctggatgcagagaagggtaggaactctgatacttggcttctcagtttccatacaagaggtagcaatggagaagagtgttgggagaagattttagtagggaatcaacagtgttaactccacacctaccattgtcattctattttacagattaaaaaacgaagtcacatggaagataaataacatgctcaacatcacccagccagaagtggtggagacatggccaacatcacaggggacaactcctgagcctgtgctaggaacagccagtcttcctgaattcatgataaagtaagaggtagaaccgtggccaattgtctttgggagaaagtgggatcaaggacaactccaggattctgcctgagatgggacacactagagcattacttgggaatgtaaataataatatcaaattattgaatgatttccatgggctactctcttcatataccagttctaattctgataagcttgtatcattatcttctttttaaaaggcatgaaaacagaggctcacagagatcatattattttccccaagttgcaatgatggtaaacacagatgacagctggacatcaactaggtctgggtggcttccaactccagtgactcaatgctgctccacacggccttcttacaaggaaaaatgagaacaggccgcgggccggcttctgtaaatcgcgtgttgttggaattcctgtccttccttgacccagatttgtaaacagaggctgtggaagccaaggtacacatgggcagatgcaaacgagccgtctgctgaggagaaagtcgaatgtgctcggggtgggtgcgcgtctgcctgaagcacgtgtccctgaggcctcctgctgtctccccagccggctgacgggcccggtggtctgcagatggccacgaagtgtctccgggctgtccagctgcagcctgggcgggctggcggttttttttttttgtggggggagtgattctgagggtgctgggtggccgctgacagagcttccttctgctacttttaggcttgttgctgagcctttttaaagggaaggggtggaaataagcaaagatatttgctgtgacctggaactgaaatgcctcactttaaaaacagctatcatttactcactcatccaagaaatacaggttgagccccttcagaacaacaggtcctgtcctcagtgcagcggatgcagcagggatgcatacagagtacctgtcctcagggaacttgcagtttattggatggagacagacaacccataatgatttgtataaatgtctaatatatgctatagaaagagaagcagcaaagtaaaggggtgaaggatgaaaaggccaggggatatttttctgatgaagtgacatttgagcagatacccaaacaaagcaaagcagtgggcccagcagatatctgaggccaggatggtctctggcaaagggaacagcgaattcataagccctgagcaaggcgagccttcaagggtgtaggccttcttcagatgtttaaagagcaccgtgcttggggagggtctggaagccgcagcctgggaacaagtgagagaactgaggtgtttagggcagaaaagggaagtcttgtgagtagcaggcagctttcctcatgtaaagggttcaaatgtggaagaaggataagactttttattacataatgccagaagttgtaaccaaagaccagaccagctgatggaagttgctggaggctgtttgcaaaggtatgttgaataatgccctaagcattggctctaaagagaaggaacccgatattagtgtagtagggctgccataataaaatattatagactggaggcctcacacaacagaaatattttcccacagttctggaagctggaagtctgagataaaggtgttggcagtgttggtttcttctgaggcctctttccttggcttgtgggttaccatcttctctgtatgccttcacatggtcctttgtaggaccatctgtgtcctaatctcctcttttttttttattttattttttgagttggagactcgctctgttgcccaggctggagtgcaatggtgcaatctccactcactgcaacctccgcctgcagggttcaagcaattctctggcctcagcctctggagtagctggggctacaggcatgagccacaatgcctggctaattttttgtatttttttagtagagatggggtttcaccatgctggccaggctggtctcgaactcctgacctcatgatccaccttgctcgacctcccaaagtgttgggattacaggcttgagccaccgcacccggccctaatctccttttcttataaggacaccagtcatatgggattagagcccactcacatgacctcatttttacgtagttacctctttaaaggccttatctccaaacagagtcacattctgaagtactgggggttagggcttcaacatcttaattgtaaagaggggacacagtttagctcataacaaacttttcctcacaatttaaatttattgaagaagctgagttgtttgttctgcactgagttattcattctgtctggatttctcagattgcctctctgtggttcactgttttcctggtaaatggtacttagatccttgattgaatttaagtttgattttcaggcaagaatactacatcaggtggtggtgtatacttccatccagaggcaaatgatatcttcttgtctctctgtaatacacaaaacaattttcaaccagaaatgtagatgagtgaggattctgacgtacctagaatatttggatgactgctgcttgaatggatggccttgagacacctgaagaccctgatgtgccttctgaatcataccacgattcaattacatccatcatttaacaacaacaacaactctagaaggtacttattttgtagatgtcattacattcgtgtacgagactggagtctggaacagaacccccgactaacctgtcatgcagaaggacaaacataaacaggcttcggggtgtgaaggaaatgttccaacagctgggtttggctcctgaccctgacccgccacatactagaatgtgatcctagccaagcgacctaaaactttgagtccatattccttattggtgaaatgtgtattacacttctctcttcaaaatttgcttctggtgtcacctcccccaggtaacctcctcctactcttctcccagccttgcctgacagctcatccctgggatgtccctctcaccgaatgctcacctccagcatgcacatagcttcccttttgctatttatccgtgtgtctcctcctcaaactaggagttccttcgggttcagtactgtgtcctcaaaatggttttcaagacagttgcttgttcatggtagctgctcaaacaataatttaatgactaaaagcgttgctcccaagtagtgttctaaatctaaaaatcccaggaagcttatttttatttttatttttattttttgagatggagtcttgctctgttaccaggctggagtggagtggcacgatcttggctcactgtaacctccgcctcccggattcaagcgattctcctgcctcagcctcctgagtagctggaactacgggcgcataccaccacccctggctaattttttgtatttttagtagagacggggtttcaccgtgttggtcaagatgtctcgatctcctgacctcgtgatccgcctgtcttggccttccaaagtgctgggattacaggcgtgagccaccgtgcccggccagctcttcagcaattactgatatcccagggcgcaacactagagctctccaggtgattctaatatatagccagagttgagaaccactgtggtagggcagtggttcttaaagtgtggtccttagaccagtgcattggcatctacctgggaatttgttagaagtgcaactcttgagtcccactccagacctacccaatcagaattctgggtctcgggctcagctacatctgtttaataagtcctccagctgattctgatgcaggctaatgtttgagaaaccttgttctagggcaggaaccagcaattatttttctgtaaagcgccagatagtaaatatttatgctttgtaaatcactcggtctttgtgacaactactgaagtccgctgttacagcaggaaagcagccatagatgatatgtaaatatatggattttttttttttgttccaataaaactttctttacaagaacagagcctaggccgggtgcggtgctcacgcctgtaatcccagctctcagggaggctaagaggcgggaggatagcttgagcccaggagttcgagacctgcctgggcaatatagcgagaccccgttctccagaaaaaggaaaaaaaaaaaccaaaaaaaaaataaacaaaagacaaaaaacagagcctaggcccagaccttggtttgccgatcactgttctaggagatggaattggtcggtcgttgttatgtaacaagtcaccatgtaagtggcttcctatccactaatttgaaccatttattcttactgaaacatctgtggttagctgatgtagcctaggtttgcctgaggggaagaagtggggaaatacgccccacctttagggataactataagtcacatggcaaagaatgtaaaaaagggaaaaatgaaagatgaagaactgaaatcaataattcattctataccagggagtaagtgaaataacacactaaaagtgcccagaagtatctgagcatatgatccatgccttgtgaatgctggctattgttattattataattattaattattattctttattttgtataattcaaggctagaaattggatgcaactgtccattcttttgggaaggctgtttcagacatcctcagtgatgagtgtcacttatcattagcacttgtgacaacaggtgtacagagttgtccgtgctagcagcctgctgttgacagaacaatttgttctcagtgctgtgtgctgtttattcagaggaggccccaggacaggcttgtcatgtcatgatcagttgctgctgagaaacaggcaaatcatttctgatagctgatgttcagtagggatggggaacttagatcctggtttgaaagaagaaatgacttgtttggagctcaagtaactggatattcttaattaaggagagtatatttttggtatgccttagggaaaagaggcacatgaagaggatgcaaattggccttagagatttattagtaatgattaacttggcaatgtatgtcctgggctcagtacaacttccatcatcccggctccttcactgtggttcccatgtgctctgtgtagaccccttgtgtccgaatcacctgggggattagcaacacatactcatttctggggtctaactctagagtttctgacttgggagtgtgaggcgagatgctggttgtaaaatttttctgtgccgggcgtggtggctcacgcttgtaatcccagcgctttgggaggccgaagaggacagatcacgaggtcaggagttcgagactaccctggccaaaaaagtgaaaccctgtctctactaaaaatacaaaaattagctggacgtggtggtgggtgcctataatcccagctacttgggaggctgaggcaggagaatcacttgaactcaggaggcggaggttgcagtgtgccgagattgaaccactgggtgacagagctagactccatctcaaaataaaataaaataaaaataaataaaagcttttggtacttgtgatgaaccatccttaaggatggcactgatctccccatttgtacacttacatatatttacacaattttacagaaactgaaattcaaactcacagcggatcagaactagagagctctgacttccaaactctcaaagggtgagggccatgtcttattcatccttgtatccctggcaaggtatcctgaaggagtaccatattgaacccagtgtttacagggccttcgtttcatgggattggagttggaacccagaatggcaaagtgattcacccacaggtgtgcccctgatgcaacttaggattctctgagtcctctactgtctcctgccccttggagtctggcccttccaagcttctcctcgggaaggaaactcctgtgtataaaaccctctgacatgttagaccttgtggtaggtgatttaaacctgcgatttcattttattcttcaaaaaataaaatctgtcaaattgggattatgaattccactttatgaaagagaaaatgtgctgaaagtcagatggccaatgagtggtggaggctgaattcaaattgaggtttgtttgatgtatgtagtgactgaaacggagcatgaggcggtgctcctgggggcctggtaatgtcctgattcttgatctggatgtgggcacctcaggagagaatttcagtgtgtaaaaatttatcaccatacactttggcttcctgcactcgtctatgggtgtttctcttcagtgacaaggtacaaaaacaaatccatgtgtgtctggtttgcaaaatcatgctctccattatctcctcttgctttttaaaaataagagcttagttccttcccaaccaagttttgggacagctccatgtgaagttacacaatgtgtaaaggaacagtctgagctagaacccaggtctttttcttcctcaaccaatatcaactgatactctttttttccccactagtcacctctggggaagccccagcagatgcctcgatgtgagtgtttctgggatagtacagaagaccattttacacaagactaagaggctttcattataggccaggagcagtggctcacgtctgtaatcccagcactttgggaggctgaggcgggtggatcacttgaggtctggagttcgagaccagcctggccaacatggtgaaaccctgtctctagtaaaaatacaaaaaattacctgggggtggtggcatgcacctgcaatcccagctactgggaaggctgaggcaggagaatcacctgaacccgggaggcagaggttgtagtgagccaacatcatgccactgcactctagcctgcgtggcagtgcaagaccctgtctcaaaaaaaaaaaaaaaaaagctttcattataattgacacctatatccctatgtcttttaatcccagggttttcttaaaacaaacagcgttatttaagtgtgtatattttatacttaaattgaaagtgtgtagtttggtaagttttgacatatgtctacatccatgaaattaagataatgaacatgccaatcacccccagaattttcttttgcccctttataatctcttcttccaggctgtccctattaaccttcctgtcccctcacccccaaggcaccaatgttctgctttctgtcactgtgatattagtgatattagttgtcacttcctagaattttatatacaaagaattaaccatcatatactctttagcatgtgatttctttcactctgcgtaattattttgcaattcatccatgttgtagcatgtatcaatcattcattcctttttgttgctctgtggtattccattgtatgtatgtaccatgatttgcagatccatttgtctgttgttggatatatggattgtttccagtttttggttatctcaaacaaagttgctatgagccttcttgtacaaatttttgttggacatatgctttcatttgtgaaaataccctaaagtagagtggctggaacatgtggtaggtggatgtgtaactatttaagaagctgccaagctgttttccgaagtggttgtaccattttacatttccactcacagtgtaggagagttacagtttctctacacccttgccaatgctgaatatggttagtctttcccatgttagctattctaataggtatgtagtgcagacttctgcagttctttgggcagctcttttctgtctcgttccggggtctgtgagctccagctacattgttctacttggactcacctttgtctccccaactcagcctgcctgctgggctctgcctagatcccactccctgtgctgagacctggaaaaattctcgaggtggtcatctggggcaatcataggactcacctgagctagaacccccagcctttgcctttccagtcaacattctttatatttccataccatgcctcaggtatgtgttattgtcctttgttgcctgacgtcaagtgttttccaaactattgttcatattttgtccattttttttttgttaggtgaaaaggcagatctcatccctgttactccaatttggccagaagtagaagtttcctctacttccagggttttcaaatctctcaggctctcagtggagatgactccagtttccctactgcacaaaggtatccatgactcacaaacttttagagccctttgtatgcaatgagagttcaaagcttatactaagtgattatactcttaggatgaaatgcaagcatccacctgtgggtatgctaattcttgcccaatctggtttatgaaaacgaacaaataaacaaaaaaaaacagaagcagctcatgaatttaacaaaggcagctaacactaatgattaagtaaagctgtattgggtaccacttttttttcccagatgttgtattagactatgaagatctaaacatgaataatgactgtattcagtgagctcatattccactggctataaaaattcatggataagtaattacaatctagttttagaagtataaggatttgagtaggtgttagggtggttctgtggactaagagctgagcaatctgctcagtgcggtcagtcagagaccctaactgatggtgcttatgctatctacctcccaaaggtggctctggagaccaccctggtatctatcccagtgacctagaaggaatagaacatgaaggaggtcacccaagggaggtttataagggccaggtcaggaagtggtgcctatctcatctgctcctttcccactgggtagagcccagccatgtgaccacacctaactacaaggaagaaggggaaatgtagtcaatctctgtgcccaggagcaagaggaaacagatttcagtaacctgttcacagagtctgtcagattatggatttctctaatgttagtttgaaaaatttacttttttctaagctatttgttgcagtgaatcttacacagcatttgatggggggggaaccatcactgtcatgtgcatttgacattggcatgtggcatttctgaactcagaggtgtgaggaagggagcaagcggagtataaccctgtgtccagctgagctgcaggagtaggaatgtggggcacacctgtttcccaccttttacagccatccggaattagaagcttgccacaaaggaagagtgaggacctttagtgacgtggcattgaagcctcatcagggcaaagtaacaaaaccagagtccagagagacagcagtccccaaatcagccctgtgcttcagtatatgacagaggcaaagcagttatatagttatcccaaactctgactttaggtcatttttgggtcttgtctatctagcatgtcaaactaacatgttatagatgaactttggagtaaggtagacctgggtttgaaatccagatccccagttgctaaactcaggaggttacttgacccctctctgtatcttgctgttattattattattattttttgagatggagtctcactctgtcaccccggctggcgtgtagtagcgcgatcttggctcactgcaacctctgtctcccagggttcaagcgattctccctgtctcagactcccgagtagctgggattacaggcacctgccaccaagcccagctaatttttgtattttttagtagagacgggtttcaccatgttggccaggctggtcttgaactcctgacctcaggtgatctgccccccttggcctcccaaagtgttgggattacaggcatgagccaacacgcccggtctgaatcttgatattcttatttgtaaaatggaactaacaaaatgcctattcatcacactgttgcatgaatgaaatatgtttatactcagaagatacttggtatagtgcctggcacatgctaagctttcactccatgacagcaattactgtcagtaaattgggaattataattcctgtcttgcagaggtttatgaggatcagtgggagaatgtcacagagcctgatcacagagcaggcattcaataaatagttgtaattattatggcagtatcactggccacatacaccagcaaggcctaagatgccccaggggacactcggagtaggacccagagatggtgttcacatatggtatgttggtggctgattcgtggtgaggagcagagaagacagttattaatatcaaaaggaagaaatgaattgaagtgtctttcaatggtgactagtacacagctgaggtcccaggaggtctagaatggtcctagccatttcctcaatcaaagttactcagcttactatattttcaggttgtcttctcaaagaccagtgcagtggattttcttcttcatcttcccatcagcttcctccaacttgtgttattcttctgggcctagcatcctgtcaccggcactattgtcactggaagtagttccctgcattgtctggctctttatcctcataaaaatcctatgcttgtcactccatatccagctgaaatgctactgcctttttgaaatccttcttggtactcctgcagatacagtccattgccatatcccacggtgatttagacatagccttgttgtgatactcaccaccttatattaaagtcatttgtttatgtgcctgtctccccaataagctagtggccctgccactttaactgcagagttcctcgtcctagcttgatgcattcatgcattaggtgctcactcactgtgtgttaaagacatttgtggaatgttcccattgcacctggagcaagagagtgaacaagagtggtcacgacaccatgtccaggcaatatcaggtcctcctatccttacctccaaaatatactctactccactctcttcttcccatatgtatcactctcactctgtttcaatcaattcattctccatcatctcacacctccactcattcttttctctacagcagccagaccttcttcataagtatacattatgtacttcttgagttaaaccctccaattgtcaacatatcatacttggaatgacatcccaacatcttactgtttctcataaagctgagcactctctgactttctgacctctccagccacggaggtttcctttcccttcatctaacacaccaagctctttcctccccttgctcttggcaaggctggctcctccttgccattcaagtctcagctcggatgttgccttttcagagaggctgtccttgattacctaatctaaagtcataccacactttctcacctcacccttttatatttttttcaacatttgacaatatatgacttcatcttgttcatttccctgttgacttgtttatcacctatctcctccacttgaatcaaagttcattctgcaagagaccttattttaatcatggttgtattgccatggtgtctagaacaatgtccggcacacagtatatactgaattagtgtaggtacttttttaaggattttatcattctacatttctttacattaggatctcgggtagaactgtatgtcttaggggctcaaaggctgagtagatgctaggcttccaagccaaaatgcagagtattgaattctgctaatgcaagagttattttttgaattatcaacagctttaagtcccataaaaacagtgcatgaatgaacaagcaataactacaccagacaaatgttctaatcttgtatgagttgtgttctagcagaaaatggctccttcaatgtactgagaatacatttttccctgagcactggtctttggggacaatttgcagaaggcaaactagtaaagagacaaaaccagtgtggcagcttgactctgtggttatgtttcagcagagtgagaagtgaggctcattggtgcactgaaactgactcattggttcataagagcctattatgctcacatcttcccagctcctcatgtcgctaacatgaaatgaacatggtgaaagtgtttatgtcctggaaactggcagtgttacaaatcagggctttgaagaaattgtgtgtgcgtgcgtatgtgtgtgtgtgtgtttgaagtgctgtttcactagtacacaattacaaatcttcattgtgttttggtcctggggaatgggaaagaatgagggggcagtggatggctgggcaggactcaggatttctaggtgctgtggtgactgacaatattagctaaagtgctttatacacacacataagcacccaagcacctattacctaagagtaattgcagcattttattctgaagcaaatgcttggctgtcattctgattaagccactaagaggttgtttctgcagaggcaggctgggtgacagttctgtagggcttataaagaaatgaagcttagactttttcaaggagttggtaatccctctggctccaggatgatttttttcccccacttcagacgcagaatatagaggtttgacaatttttatccctgtgattgtgacagattgtagtagaaaaagcactggagggggagtcaggcatcctacaaaacacctggatgacattggacaagtcagttaatttttcttagcctctgctttagtatctataaaatagaaaacatgatctgacctgagaactcattgaataaagatgaagattttgcaaacaggcatggagcccattgggatgcccataaaacattaagatatgaaatagtgaggggtgtgactgagactcctggagagtataagagagatactgagaaagtctttgaggaagctggaacatagacagatatcaaactggtctctataaatcttggtgaagtctctgatagatcacaggcttatcaaacaagttaattcctgctatttgttgctataaaataaaccaccccaaccttagtggtataaaacaacacccatatattatgctcacagattcttcaggattccatggatttgaacaaagcacagcaagaatagcctgtctgtgctgcaggctatctggggcttcagctaggaagacttgaatggctggggattgttcaaataactgaggggtgggatttctctactaggttaactggaagccagaaatcaattggaactggctaccaggtgcctacagatggcccttagatgtagcttgagcttgcttcaagcatggtggcttcaagatggtcatacttcccacatggctgtttagagctccaaaatgaagtgttccagcaaacaaggcagaagaacatgaccttttatcacccagctttaaaagtcacacagtgtcatttatgttctactctattagtcaaagctatcctaaacctgcccagattcgaggagagggaatatagactccgcttctccatgggaagacagtttaagaatttgcagccattgttttaaaatcaatgagctaaaagtcttcttgaaataataggagttattaataaaagtaagttgtgtgcaaaaagtaataataaaaataatgacaatgatacaatgatagctcacactgtagtgtttatgtatgctaggaactgttttatatactttaatttacccaatcctcatagtaatcctaaaagatagaagcatggagaggtgaagtcacttggtcaaactcacactgtgagtgattgacagagtaggaatagcagcaactaacgtgtatcaggcacttaccacgtgcaggcactctgccacacacttttcatggattgtcttacttaattctcaaaagaatcccataatgtaggtatattatttctactaccttatgggtgagaaaactgaggcccagtgagtttaaatcatacagttaggaagaatttaattctcaacactgccttcccccaaagccttgtgctcagcatgtatgcaacgtaagaacccacaaaggagagcaagtgaagggcctgggagcaatgctgctggggctgctggtggagcagggtttagacagaggagttcagtgctttgatggaaatgaaggaggagagtattctgagatgagatgataataactctatgtctctgactgtgtgttgtgtgtgtgaaaaagaaatctcaactcaatctagcacatgttgatgatgctcatctggtgtgtccatccttgttccagtctccatgacgaaggcagaggagcatcgtccaggggatacctgacctgcacctactcatcccttcacagggctcagcatgtttgtatttctgtacattctcctgttgaatcttctagagtctcaaggtttggctattagcatcttcattttacagacaaggaaatggaagcctggagatgcaagatgagcaatatgaagttaatatgaagttactcaatatgaagatcagagctcaggcaagacagaccttcgtcgttgtgccactccaaccccctcatgagatccaaagagatgagatgatttgctccaagtcagcacagacagaggcagactatgcaccagaacccaggtttcttgattccagctgttcattcatctcactcatcatttcaaacacatctagattgcaacctgcttttggaggccttcccacccctcgatagaccagagaagttaaacatttctataacagggaagcatcttccaagctcttgttgttactcttattaccctctattgccatgtatttcttattcctatgtggcaatgaggacaggagttgagtaggtgcaggtcaggtctcctctggacgatgctcctctgccttcttcatggggactaaaaccaggatggacacaccaggtgagcatcttaaacacttactggattgagttgaattttcttttaaacactgcatcctaatatctccacagaacccaagaatagaaggtgcttagcaaatattggctaaatgaatgataggatgaatccataagtaaacagactagggtaaacaaatctggtcgaacaaaagggaactgagggggttatctttgaaatatgactcagagtcagagaggcagagagaagagcaagaacattcctgatggggaccacttcaggagcaaaggccaaaggccacatggggctcctgatatgggcatcctagaacaaaactgcagccatttgcatcttagtttgaaacgaggctggagatggaagcagggagccacaacgggtctcagaaatgtcagatagcatgggcactgttctacttgtatctggggctgctgctggtttagcttcctctttgatctggaagtcaccatgctgaatcatgcctcagtcactggcagcctggattccccttcataagcactggtattctagaaccgcccccccccaccctttaaaagcagacacctcagctgcaattccctgcttaattaaggagtgagtcagggtggtggcttaagacacaatttccactgtgctccatgctcccttcctcttctctccctccaatgttatttcaagcacataaactcacaaggctttgtgaggagtggaaagaatgtgggctctgagctaccagacctcctggaaaatcccagctctgtagttcactagctatgggaccctgagcagagaccacatctactctgggtctcagtttcctcaacataatgtagggttgttgtgagaatggaatggtgttaaacataaaggactttgcagaaaatttggggtacagtgatgtgcagtaaggactaagagtgcctttggtttgggtctgtgtgccctcattcttacccttcaagatgtagatggcagggtcattttgatagaggtctccagcagattctgggaacggttttctctttccttcttcctggttggctattgtggatcattcctgcaaaattactttctgtggttctccagggctggagggcatagctcaattgctcttgaaactaaaccctttcacaacttcctgggcagctgccagaccctggtgctagcaggactacatgggccaggtttctgctttgaggattttactgaattgtacagacacacagtctcaggtcttttttcttatcaactctttggtgacatgaacaggcaccagagtaaggtctctttactgaatgctcctgctcagagttggtgaatctgtggaatttgtttttgcttcctgagttttgggtgggccttcagactcggctgtaggactcgccgaccagaggcccccagattcttgtgtggagtgcctactcttccttcctcactccattcctcacctaatgtaatttccttggattcagacaagtgctagtggtttcctgcctctagtacacccagcctgccccagactgggcatgcactgagtgtgtgcactctttttatgagtatcctctgctcactccattcaaaactgtcctgttttgtacctcatctgcttggagatcctcttctagccttggccttgctgttcttaggtgttaatgagtaaatatatgctatctttctcagtaggcataatgaaccactctccctccaccaaaatagctataacacagggcgctgaggcactgaactgagagtcataaaactctcattcccagccccactactcagcagttttataatcttgggcaaatcacttattgtctctgagccacaagtgttcatatttggaagggtggggctaatgctaattgccctatttctccccacctacctccccacagttccatttactgtgagaatcaaataagataatgcctgtgaaagtactctgtaagccagaagctgttattatacagaggctacctattattattaagaactggttttcctgattcttccagctccccgatcctctccatcccctgagctggctcgaggctggagatctgtagaagcacacctttggggccagagcctagaaatcattctgctttgcctaccaaggaatcttcttaattcctcttatttaaacatgtggattcaaagaagaagagttgaaaaagtctgacaccaaaatatttctttgtttggctttttaaaatcctagtgcaagctaccatgttaagacccacaccaaacccagacagaaaaccctgttcatgcagatgctctaggtttacatccagaatgaatgtgcttggctgacactgctcctaatggtttccccaatctgaccactttctgggtcccattgccactctctttttgaagtcactactattttccagaagcctctccctccaggcttctctcttcatccattcttatacccatatgagctctctaaatgcttgtctcttcatattacttctttgcttaagcctccacaccatgagtccacattctcctcacagtaaagtgcacttgctgtaaaaggggctcctgatgagctttatggacttgctccatgacttctcacccctctgtgcttgatccttaagtaattctgttcaccagacaccttgttctctgttctacctcttcttcctgtagggcccggcttagatatcactcacttatgaagcctacttgaactccccttgacaaagtgaggagccctgcaaattgtttccatagcatccctcttttcgcctatagtacccttctcatccttgatcattgtcatgtgttaagatctgtcttctccaggaagctgaagctccatgagggcagacactataattgtcttgcccattcatttcatagtcatggcacctagcccagtgcccagccatgaacaaatgaatggcacgggtaagtcaatgtttaagatttttgctctggaagccaggccacttaaacacttcatggaaaaacacagatgaactcattttagagacggatgaacacattatggaaccaagtatgcaacccttaattttcttctcctaaacctctcagcacatgccaactagctaatgttgcctaacatttattgagtgcttcacttgtactaggcatagtaatgagcattttacataagtcaactccgtcaaccttcacagccatactcagaagtgagtgttattatcctgcagccactgatgagacactgtggttcagagagtctgaatcacttgcttaagtttgcccagacagcaagtgaaggtttactattgacctgtgtctgttctcctctaaaatccatgcttttaatcactggaccaaactgcatgggcttgggcaccagaaatgtacaggtttaagttcccaagacttactagctgtgttcattgaaaaaagttaggtttccttcttgtgcctcattctttattaagtgtctgtgaacgaagcgaaataatgttgtagagcactcggtatttagtaagttcccaactttcattgcaagtcagtaagttagagatagagcttagatgcttaaagttcaggcagtcctaagaattaagaccgattgctttcttctttaacatccctgcacagtggggaggttagcatataattgagcttcttgcatcctgtggcatttatcactccttgaggcacattaatctgtcctttgacaattgagtctgtgagaaaatgtttttcatcagaagtctgctgccttcttgtcctacttgctcagagcctttggagaaagtctagtcactgtgtcaccaacaccttcctggccatctgagggcagctgtcatgccaccacttcagcctatggactctcacttttccagagaggaggatgccagtttttccacgttttttttttttctcatggaatgagtcttaaactcccatcatccacccaattactagtttagaacaaactccaatgtatctacattgtcttaacctataatggctaagacaaagacttagcaacaaggattttcactgcagtattgattacattgtgaacaaatgtccagcaacagagaactggctgaacagattactgcttatccgtatgaactaatggccttcaagaatgactatgggaatgaacatttattgatctaaaagatggttacaatgtaatagtaaatgtaaaaaccaggttataaaatagaatgtaatgcatgatctccaattttgaataatagtattcatttatatatggaagagaaatctgaaagtgtttaaaagagtaaaagtgtttatctcagggtcacgagattatgagggattttcttgttctaaattttctattaagggaggaagtaataacttggtggttatgaaaatggacttcaaaatcggacagacttggttttagtctattttctgccacttagcttcatcacctgagtttcataatttgtaaagtaaggcatataatagagtttgctttagtattgttgagagagcgataaaactagctttgtttttggagtgcttgctatgggctaggcactttgtgaagcaatttacatgcatgctttttatcattattcccattcactatatgagaatgaggctcagggaggctaaggaacttgtcccagtgctacattcaaggggatggtgactttccctcttcttagtacttgagttatttcaatgttgttaaagtggaaatctgttttcctgtcatccacatctccctgctgactcattctggaaccactttgactaaaacccccagatattttcatactggccatgtctcctctattctccggttgtgctttgtcttatttttttggacttaagtgaacttattattgagcagacaggtggatgactatgaggaagtccgagaataagcttgtaatttgtcagtaaaaagttgctgattaaattctactataatttggcagtgaaaagttgccaatcacactgtagagccacaggggtagtaaaatgcatgagctttgcattttccttttttttttgctcatctggaaagagtgagtgcttctgatggaagaatgaataggggaaggtgccaggatggatccagcaaggatgtcattggccagggctcccaggagaagctggaggatggagtccttggaacataatgcggggcacatttgtaagagtgggagccagacccctggcagaccaggagtctaattcctgctcttactcacctgctatgtggccctgagcacctcactaaattctctgaacttcattttcttatcctcaaaatgtgatagggacttggctgagttgatttcagcacatccatatgaacaaatgctaagcagccatcaagaatgactacaggaatgaaattcatttacttaaaaagatggttatgatgtactggtaaatgcaaaaagcaggctgtaaaatagaaggacatgtaaagcactcatttatagatgaaagaaaatctgaaaatcagtgatatgacttggatgttcagctttctgtagccagtagcacttattttgtgggaattttaggaggatgaaaatgagattgtgtaaggaaatggctcagacagtgctgggatcagttttagtctcatctcttccctgtgagcccttcactccctactgagtgacctgataaatgttaaagaacaagagaacaaattcatgtaccaaggggctccatgacaaaggtgggaaaattacagagttagaaacataagggagctggcccaaactcatcctatgttctcattttaataaatttattactatttttaaatttccaacctgtccatgatacaaaaaaatcaaattatacagcaacacttagagaaaatagtaaaaattcctctttattactcttctaatctcttttgtctctccaaagacaaccaagggtgaagggctctctgtgtatctttctagacattttattagggatttgaaacatgcatgttcaaatgtacagacttcctcaccaacactatgaatggtccatgacttgaatgttcgtgacacttttgtgatgaaaataaaatgctggctagagagaagagtcgaatgggtgccacaatcttaattgtttttccatgactttttggcctgggttggatattaacaaattcagatgcctactgaatttagaaatggcaggaatcctcttgacattctaacatttccatatggctaaagcttttagctctagttattatacttctgctttggaagacagttcctcaaaccagatctctctcctgaaggacttgtctcctttagccagaatgatccttccccattcaaggagaaaagggcacaggcccaggaggaaatatgtgcctgaatgacaaattgcatgagtcaaagacatttatgaaaatgacaaacactatttcagaggaggaaggcagttgcttctgctttcttttttcttttgagaatgggtggaaggccttcagagatggtgctgaacacagcactttgcaatgagtaacatttcagggataatattagcattaatgctcctttgattcctcagttttggagaatattagtaattggggccaatccaaagcactgagtggattattgaggcacagcaaaagctacaaggattttcattgcatagattctttacctccctgccttaagacatttattgtgatatgcgattctaacaaaagtcagagacacaatgccttacaccaaataggcacctaattgctattgattgatttacctcaattgtcagcattcttgcagaccattcatttattcatctgcccattaatcaaaatgtattgaggtaatactatctgccaggcactgcgttctttgtatcagtgtgggcacaaaagaggaagtgaacagttatcctcaaggctgtggcaaggacaggctttcagaggagaagacatctgagaaaggtttcaaaataggaataggaatttgttaggcaaatgtggggggatggcatttcataaaccataaacgggggaacagagttaacaaatgtaggaaatataggaggaggggcaagattgtgaggttgaaagtcatggccctgactgattgacttgaccaaatattcattagagaaatatcacctttaactcaactcaaaactgagtttcattgagctgtcaatttactcaacaaacatttattcaacaacttttcactgtgctggatgctagcaatataatgctgacaagtttctagtggcaattttcctaaaggctcggtagacactattagagcttaacctgacagtgattaccattatactggacacatgtcaaagcacacccctatttaagggaaatccactgtggggacaacattcttctgtgtgtcctgcacaatgcaaaggagtttttttgtttttttttttttgagagcgagtcttgctgtgtcttcagtggcacgatctcagctcactgcaatctccgccacctgggttcaagcgattctcctgcctcagcctccgaagtagctgggattacaagcacccaccaccatgcctggcaaatttttgtatttttagtagagacagggttttgccatttggccaggctggtcttgaactcctgacctcaggtgatccacctgccttggcctcccaaagtgctgggattataggcaagagccactgcgcctggccacgaaggagaatttgacacactcttttactaccttctcaaaatacaaatctagatttcaatgtgactcattgttttatctattgccatatactctgattaaactctgtcttctgagagataacttataaatgcctttgtaggaatcatagccatagctttaagtataatcttgggttcagctcttttgtcccatgacgaagaagtgacttgtctgatgttacataatgagagttatcagattgtaaaggagaactaaggctgctgatatctatgacactacattatattgcctccatgaataaaatgttaatgtcacccaatcagttcataaccaaaaccatagtgggatcggctctgagctcacagttactgtgattctatcttctgttccacctacctctatctcctccctaattctagagtttaaagggcagtaaactcaattttgaacatcctgcctttggtctccctcagttggctgtctgatcttttgtgcacctgtcagttttccaaaaagacacactcaacctcaccctagaatcttcattggaaagccctttcacttgctactctatatgtctgttttggtagacaaaaccacaaacccagataggcaattagggattaagggcaacagtggtttgggattatttcagctaattgctatcctatgtgaaagagtgcatcatctctgacagctggcatgagtaatcgtcactgttttagcagtaagtttataccttctgtgtgatagggactgccaatgctgttttgactggtttatcatcagagtggtgaatgtgaaaagctattgtatgtatcccattggttgttgtgacaattaaatacaacaaagccatcacattcttactatctgcctgtttataatatgcatttgatttagcttgactgtttttactttttagactctgtgtatctccgacccttgcgaacatcgcaccctgtgccattattttctgctgttaatggcagattggctacgatgccttcctttcttctgtattggggtggaggagtgatgtgatttgcatatagttacccagaatgctctgccaatggtcagttctctgctggctgggagactgagctcaggaacaagctgcaaggtgtaaatgggcttttgggtatgctgatttatgttctaatttatactcatgtgacaaggattgaaccctgactatcttagctggggtggaaaaggtccctggacaggggcagggcggggaatttgatgtccacatatatccacttttagagttttagagttctttggaaatagggattttttttctttttttggtctgtctcagactgccaagtagaagcccagagaaggaggaagttaattcacattcttaattttttctaagggcaaaaaaaaaaaaaaaatgcaccagctcattttccatctctgcttgggtcatcagtgtgcattgtgagcctgtacaaaggccttagacggggaatgctgccgagagcatcaccttttatgtcttcttttatatgaaatgtgccacttccccactaaccctggctctgggctctgcctctgctctcctgatggtgtgtttatggtggattcagcattctgggccacacaaggaagctgcagggggtgtccaagttcacatgtccccgcattccaggcgaatgtttctgacattgagcaatgatatggctctgccaggtttaggtctgtctgattggaatgcaacccgaaaggaaagtcccggaatgattcaaacactcacctccccacaaccccttcttggttttttttttttttttaattcctttttaattctccagtgacaaactcagcccagcactctcgctgaccgcatggcacttgttggtgctgataagtgcaacttcccaagagataggaatgcaaatcgtaatattttgttgagtcatgtgtactctgcggctgtttcccaaacattgcatcagacctgtaattggcagctcccagtactctgctggatgacaccaaatgtccaggaaaagctcagtccatttctcgaaaaatgtagtctcactctctccatctgcctagttgtaacatcctgttcctaaggaagtagaatcccttggggtagcaagggcaaaaccggttttgcggataagtttgaaaaatatggctgttggcctttcccacccactctggtctcttagcaacaagacagctgatggtatccactagggggaaaaaaaaaacaaaaacacaaaacaaaacaaaacaaaacaaaaatcatagaacatgtgggggagcctgtctgaattgttgcctacagcctgatttatttaaacctccactacattcttggatgtgaagacctaggagtcaagtcatgggagctttctcttgcccttctcttgacctctatgaggcagatagaggaaaatctcagaatgagaggaactttcttcctcttcaagagtctgcgttatccgagatggccatttcctttgacctcaggagtaaccacttgaaaacttggacacatttatagaaaatttgggctcctgggatgcagtgctgggaaaagcacagggctgaggggctggagcttggggtaccaatggtgacagtctctccctccctgtgggagtactggcaggaaatccactgtgcccttgtccccaccgagggttgattttctccactgcaaagtaaggagattgaattagatctcagtcttctcttaaggtacctttcacactgagcctatgggagtggtggtatgtgcatgtatgtgtgtgtgtgtgtgtgtgtgtatatatggtgtgtatgtatttatgtaaactttatatcatgtttcaatccaattctctctctctctctctccacagagctaagtggtaccacaagaattcaaacctagatctagccaagtttgaaatccttgttctcagctcctaccctatgctgttatgatctacacagagaggcaccacatagctagtattttatgttatacctggtgaactttctatctatgcttatcaattcataggagtagaattgggaatgttggcgtttagaacatgataccccaaagtatggcaccatggcctgctaagtactttgagctgaaggacatagggagttcatagaagtgagatccttttgaacttctgctcccactcctcttttttgcctagaaccagcgacagaaactagaaatgctacactaactttctcccaccttactgtggaggaggagctggccaaaaaggaattctctgccctaccttattggatagtaggtcatcagactctcatttcggaggaatcctaccccaaacctgggaggaagaaatgccacccagagaagccgagaagaataggaacagacagatcatgctgagatcccctctgttaccattagatcatatcctcttgcctgatcacatttctacatggcagtccattcttcattgaatctaagcataaaaatggatagttttctgtagctcattgggtcttcattttgaaggttcttatgtcacaccaaactttcatttaaaaaaattatcatgcttttctcttgtcatcctttcttttgttataagggtgccatccttacgacgaggaaggacgaggaaagatatcacacgtttgtgctcctataggaagttatagaggacctaggcgttaataaagaaacctgatttcacatccttgctctgccccgaacagttacgtggcctcaggattctttactatgaagtgtgaataacagatcctctctgatcaggttgctatgagaattaggtgaaatgatgtaaaatacctgacacagtgcctataacctagtaagtgctaaataaaaagaggagagagcttcagagagacagagagggagatgagatattgataaagtataggtttcttgatgacaggaacttgccctgtttatcctgtaacctcagcacactgtgtggcacactgaagatgattgtgttttctgagtcaaacagatgtctctctctctcacacacacacacgcacgcacacacacacacacgtgatagagtgatgaattccacaattttatgttgctggaacttcttagtagggctctgcattttacagcaatgcatcacagttaaaataatcaatgtgatctggctgtgattatttctttcattatttaaaaatatcaacaattgcttttcaaagcactttgattttttttttttttttttttttttggccagattttgttagggtgtttctctctttctaccgccactctttttcttgagcacttactatatatcaagtcctgggtcaggtgtcttatattcattgttttatcattattcctaatatcctcctagcaactctatcagataggttttgttatttccatttcacaactgaggatcttgaagctcagaaagtgtgagtcatctaagaccacacacctggtcagtggcagagaaagaatttgaacctacatctccctgcttattaaagcagagtgtgagggcagggagtaatttatacatctttggtcttgataattgagctcactccttccaaaaaaaaaaataactgtttacttcctatcaatactagagaacttggagcacttcatgttttcttggcactgagctacattcattatacactatcttatttaatcctattaatgaccctgcatgataggtaacaattattaggcataaatttcagagaaggtagttattgacaagcaggttaagtaataagcctgagtaactgggatttaaacttaggtagtctgactccagagtgagctttcctcttaagagtgatccattgattttattcacgctcacgagattatgtggtcttcatgcacttggggagcgtgattgtggcttatctagaacttaacttccgctctttttggaagtgaccatcacctccttctctgccctgggaataaacaatagaaattgaggatacagaagctgtagaaccataggccaatagagtttaaaacttgaaagacttcttcaagagatcatctagtctaatagtttccaactatggggcattgcttgtttagtggcttataaaatcaatttagtagttcatggctgaccttcaaaaaatgaagtgagtagaatagaaaacatgagattttgttgtacttagggtgaagtagtcttgagagcagtagtttcagttatctatatgtcagtgtctcctgggtcactatgtaaaatgcatttcttactgagggttaagtttgaaaagtttgaaaaatgttgatttcatccagtgtttttcaaattttattccatggcatctgaggaggcctcagatatcttatgggagataaggatggaaaaagttaagtagaaagaatttcagaaatgtcttcttatgtttatctgcctttcatgttggactttcataaaatattttatcttaaaaagaagaactttactgaaaaaaaaaaaataattcaagaaccactgatttaccccattggaattgtgttgttttgggtattgattcattcttatgtaacttcgtgaggtaaccgaggaccagctatgtgctcagaacagtgatggctgccataggatatgcaggaagtctaaaaaatgtggttatccctgtccttaaattgttgatagaaccaatacgatatcaatttatttcttacatcaactatgataagaaaatacatgaagaagttattcggaatatggcaattgatttaaacaggaatcaaaagattgctacaagaggagatatgaagggatcaaagctggctgaagcaatggagatgaaattgaatacgaagggttgcaatttggttctaatcagctgcataaatacaagtgtaatatgaatttagttgacaatagttcatcattaaaagtcttaaggttgtgtctgggtgcggtagctcacacctgtaatcccaggatttggggaggctgatgcaggcggatcacgaggtcaggagatcgagatcatcctggccaacacggtgaaatcccgactctactaaaatacaaaaaattagccgggtgtggtggtgcacacctgtactcccagctattcaggaggctgaggcaggggaatcatttgaatccgggaggtggagactgcagtgagctgagaccatgccactgcactccagcctggcaacagagcaagattctgtctcaaaaaaaaaaaaagtctaaggtttttcattgacttctctgtgagttaacagtatggcatgggccaaaacccaaggcaagctgattacattcaatgcattcatgaacatacagtatggaatacttctgttgtggaattgcagagatgatcactgcactttccagcttctcctatatgaggttcagtctgtcatttattctggtttggcctcatgactggctttggccattagaatatggttgaagtgaggttgtgtcacttgagcccatttttcaagcatgcagtctccattctcgaactcggggaacgctgatacagccatgtgaataagtcctggttagccttctggaagaagacaaatagtgttgagagagatcccacctgttctagcccaggtcaccctagaccagtcaatctctagctgatctgaagctgatgcagatgcatgaaattaccaagcccaatccagaccagaagaattgcctagctgacttctagaagtgtgagctaacttttggaatgttttgttaggcatcaaatcctaacagacggacccattgtcttgcactggcaaagccactctggaagacaatactatgaccacatttgattgctagaaacattcataacattggctacaaatgtttacaaactaaaagatgttcagatcagggtggggagaaaggctctgaaaaccaaggagttgagaaagcttagtttgaaaagtaaagatgtttttaggaacatgaactccaccttctgagatctgaaattagtaggaaaagtgagttgaataatttgtaacttctgtggttggttgaatatttcgctgcaattcttgccccgttgcatccattttgtcatagccttataacaggcagcatgcactttccttcccctttaccttgggattagatgtgtggcttgctttggccaatgagatgtaggtagatgttatagagtgccagttctggccccataaggaacatctcatgtttccactcattctcctatacttctgctatcactgtaataacctagcccacttggcccactggtcccagataaggtgagaaacatggaacacagctacctcccaccacccttcagcatgttccagagccttcccagctagcccataccttcgtaagtgagaaattaatggttattgtacatgcctctgagggtgtgataatgattcgtacccagaaattgttggccaacatactgctgagattaaaattaggattaaagaaacataaaataattaggatcaaggaatagctacaccaataaagtagacttctgttgcatttaaggaggaatttctttgccaaggaagaagaactggtgaaattaggaattctgtatcctgagggatgttcaaccatcagcaagatgtacatcgtctttgtagctggaatgagaatcagaccttcatttcccggtgaccaagatatcaagtaatttaggggatgaatagtaggtcatttcagctgtgtttcagcagagagggaggatgagcatgggagcttatgtgtgtgcacagtgaaggtgttgcttaggagaagcagaggctgggggaggtttgtatgcctcaacaagatgctgacctttgatctaaacctgtgtgcatttgttatccaatctcgaattcctccctcttaccaacaagttctgctcctgaagatccagcttaagtctaattttctctgtgacaattttctctgacctttctagcctacagggaccaatgcatttctgaattttttatcttggctgtaatttatatgctgtctttgcttttccttgacttcttttccaggctgttagatgttttccaggtactcacatagcatttcctcaaattaaaaaacctgttactctgatcatggtcttgtctctttccttaaatgtgtgaactggtagaaggccaggagtatggcttattcactctggtgcccctgtatcaaccacaatgcccagcatgccacagggcttcaggaaatagttcttaaatgagtggacatggatttcttttgtctttctgactcaagtataaattccttaaaaggctactggtactcacattctcatagtgctccaaggcctgtgcatttattcattcaacacatatttgatgaatgatccttactgtggcttacgaagtcctatgtcacctggctcctaaccatctctctgacatcatcttgtgtaactctttctctgaatcactgaccttcgctagccacattcattttttctcagtttttttagctcttaaagttctttcccatctcagggttttgtagtttctttggctacaatatcttccccttgattttctgtggcttcctctttcttatcattcaggttcagtttgaacttctccttttttgagaatcctgttctgaatacccaatttgaggtatcatccagcctctctccatcacatcttccaatctcagttttctgcatgatatgcctcactttctgataatttccctttttccttcttttattcctctctctcttgctccttccctccctctctcccttccttcttttcttccttccatcctttctttcttacttctaacttgcttatttatttaattgattggctttctctgttaaaatgcaagcttcataataacaagcacctttttggttttgtccactgctgtgtccctactgtctaataaatatgttttgaatgaataaatgaatgaatatgagtctaggagtcagatgaatgttgggaatagacaggaaagaattcagacaaagttattgtctttgagtattttacaatttcttgctgaatgaacaatcaatgtgtaaatgataaagcaaaatgaacgaaaacaaaataaacaaacaaaaacaaccaacgaaccaatcaaacagcaaaacaaaacagactggattgcgtgtagcccatctgatgtacttaagcctcagctttctgtgcaaaataggaataataatacatagtttgcaggtttgccatgaggattaactgaggcagtgaatgggcagcagcatatcattcctagaatatcatacctggaattcagcaggtgctgaattcccagaatggtattcttgactcccctgcctcatctcccttctgatatgtgaaataaagtaattaagaagctcatattggtctcccatctgaaccacttcagagaattgaactccaattccaagtatgactcctagatttaaatcccattatgaaaatctctctatcccaagttctccagagtgttaacagtggaggtggaactgatgatagttcatttgtgtggcatgcactttgattctttcagagcctttgtgtgacctgtgaagtcttgttagttgctgttccaccgcaatgtggtggggaactatgtgataattggctaaaagccactgaaaaagcataaagtgtctggaaatgctatagacagggctggtcttctgcagaggtgcagttgacaacggctggcgtttcctgaaacaccaccattgatgagtcagtcctttaggttatatcattgctagataaaacaaaacaaaacacactttagtagtgatttgcatgttcatacaagtttgctaaatagcagtgtttagttctagacctttaaatagatcttgttcagccctgacattcaagacaattgaaatattctgtgagcagaactgtgaccacaactataataaggttaagtgaatccatatttggggatagttctttctgaggctggctggttgtgtctagtgaagaggacccacaaaagccctggagaaggggcaagtttagccactggaaggggcaaggtcaagggcagttacacaacagaactcccagagttaactcatatcttttcctactgttcctaatctatttccctcccccctccacgtacacggatgtgccctttaaatatttatttgcccacctttgcagtgtgcggtagactttgtctcacaagtcagcttgatccctttgaaggtgtttactaattaaatcaggctgggaggttaggaaagttcagatatatttatcctgtataaagtagtccctggacccaggacccctaaacagccctagggaggtcagctacagtttccctgcttactttctttgttggaggaagtcctaatcattgcccaattaagctgaataacgctgcttctttttctaccattggctcctggcacaattctaagacagacatcggaatggctggagccagaaagctaaatgctcttaacaagtatgtttatgggccagtttcccacacagccgtatgaaattctcactcagtaacacagcatctgagccacagacactgactcaaatacaatattggcttggaaggaagagtgctgctgtagcacaggtcatttccctctaatattttaaaatagtatttgtttcagaagaatctgtgcacattcatggatgtatgtgtctgagtgtatatgagtagtgcctgtgtgtatgtgtttgtatatatcttcagctaagagagctttctgaagaggcgaaacacaaagtgagtgggagatctctgttgtattgggtcttagggcagcctctgcctcaatacaactccattgtattaagttcaggcttatttgattcccttcatccactttgttcattttcactggtctgatagagagtgagaaatagctgatcatgattacatgaaatgtctggttttggtctcagggaatccccttagagattcttgtcttaaaggtctcatctagttccaacagcaaggccaaccacttcccatttctggagcagtggcatgaagcacttgggggtgcctgaaagcacactgagaatcatgcagttagcactgtgacaaagctgtgggtgcccatgggcttttctaggcatggccttcctctcatggacagagtctggagcattctgctttctgcatctatgggtcatcagtcacagggctgccatgtccataatccacagtctcttgctatttttaccatgaaactgggagcaccttaaccctgtagactcaatccctagctctgtgcccattaacacagaataaatagctagtagtggtgtttctggtttaaagggcctgcactttttaaggttttgatgaatactccctaattattctacaaaaagactttaccaagttcaagtttctttcccaataatctatggcaataatttcaatctccctcttccctttttttttttaacttctaggtaaacataagaaaggaaaacttttgtacggtgaacttgggctaaaaagaagaatgatgtctctggaacttttgctgcttataggaatgagagcaaaatcctggcatgaccatgatccttcaatgagcaccactgtgttgctgcattctgtctggccaatctagtctataatagttttttgttttgttttgatttttgtgtgtttttttgtttgtttgtttgttttgatggagttttgctcttattgcccaggctggagtgcaatggcatgatctcagctcactgcaacctcctcatcccaggttcaagcgattctcctgcctcagactcctaaatacctaggattacaggcacctgccaccatacccagctaatttttgtatttttgatagagatggggtttcaccatgttggccaggcttgtctggaactcctgacctcaggtgatccacctgcctcggcctcccaaagtgctgggattacaagtgtgagtcatcactttcggctataatagtttttatgcatcatattaattctgggtttttgcttttaaaaagaagccttttttttttttttttttttttttgtagggaagtaagactggatggtgggttagcaggggactcgagaaaaggcagtcagtgctacaggcgcagggatattaacctcaggagtgaccagtgggatgcaaccagccgttggggcttaaaactcaagcacatttctcggatgataatttcaaagaagtagctagttttggttgaggctgcctctggactatccccagcttctcagtggaactcggtgtttctgaatgaatcacaataaagaagcattacttgtgggatgtggccaacctttctgttcagcttttattgcagagctgatggcagcagctggactttacaaaggtgatggtggctcaaagcctttctgttccactgtgtctcataaagcttttatgaagcctcagtcatctcttcagcagatcctgtgtcatgaagaaggatgcagagaacacaaggagcaccccatccatggtgcatcccaggtttctaaaccttccagggaggggaaatcagcatttttggctctggccaagaagccaaattgctgaagctatgggacttgttccaaactgcaagatcttatttgatgggaatgattgtagctttaggtaattctgcggcttattggcttgggtgagagctccctagtgtctgctggaatgtgatggctgtaagacgcagggaggagaaatggaaaaggagcgtctttattgacccaacagagccttgtaaaaaagcaccaactacatatatgcagtctgtgcatttcaaaagtaacaaacaaacaaaatcagtttaccaactcttgggagagaaaatggattatcattcactgcaaattctcctaggtaaacagaagagtgctacacctgtgcagagagaaaagttttatatatgctcaactatgggtcctcagtataatacagtcccatcatgtatttcctgagacatctactaaggagacttcctagaattgaatctttctcatctttttttctcttttcttcctcaagtcttctgtgacatgtgataatacaaaacaaaatacaggtcttagaataaatgtacctggaatcaagtcattgtgaaatgttgggcttctttgaccctcagtattcccatcgcaaaccaggaataataagacctgcatttctccattgaccattagtaaattgagcttcaattacctagttagagaaaaagttaaatattgcctccaaagcttaacatgcattttaatatttttgctttctgcttttaaaaatatgcttctcattttcttcccctgactagctctttgactgccagagagatgtataagcatcttgagctccactggtagagttatgagttcttgaatttagaggttattagaagaattttttcctactgttttcatgtaaattaccactcaggaaaaaatggtggaatagaatcttttttcccttttatagtgtctttttcattgcttccaaatttttcataacttttctacagctaccaataccatcttatatcatccagactgccattgcaatacactcttaactctttccatgctagcacatcctatacacagcattcattcattcattcgctcacttagcaaacatacctggtagagcctgaacattctattaggcattagacatattaatgagttcaaatatcttcttcagattcccatcacttgtcatataaatgtcaaggcccattgcctatgattcagaatcctctgcatttacttatttcaacctgctttgatacctttaacctactttttccttttttttctttcttttaagaaatagggtcttgcaatgttacccaggatagattttaacctgtaggttcaagggatcttcctgcttcagcctcctggttagttggaactataggtgtatgctgctggccctggctcaacatgctttttaattctttctctccctacatggtattatgaactctcaactccaggtggaccaatctcctcttgtgtctgtgcctttgctttggtggtcctcttctgggtgtgcccgcctatctagatttcacttgttcaaacctaatattcagtgggaagttcaggtattgctgcttttgtgaaactcccctgacaacaaaggttcataggacccttgttgtttaatatctgaatttatataattaaaactgctagttatctttttaagcatataggaaaacaacaagatttcaagatacttaaatgaaaagagagaaagatactggtttatctgttctctcaccttccatagcatctcatacagtcttactcaacaaacacttgcctatttattttttaagccacataataacacataaaaatggaaagtgattcactgttggggttattccagtagtttattgcttccctcttatttatttattttttggatgacttcagataccaacctggttcaaacccttatcaaaaatgacctttccaacttggctcctgtggagtcttcatccttcttctgtcattgctatagaaatacaggattccctagtctagtctggagagcacagtatcaggtagtggaaagagctgcagccttgcacagcaaactagatttgagttctaattctccctgcaaattgtttgactctagaaatagcttgcctctctgagcctcaagtccctcttctgtaaagcagaattaataaaacccattgcagggctgttgtgaaaataaaatgtgataatatatgaatatagtacctattttgctcacttcacagtaggtgattgctaaattatagctattatttatatcgaccatgaatgctatagtgttctgcctcttctagggctctggaagaagcactgaacttacagcaatgcataccagcctactatgtagtgggctctcccaaattgtaattttgggagctgtccaacatgcagactccttccttgttggtacagagcctcttttttgtagtatggttggagaatagtggcctctacttatcacagatgtcagagactttaaatcctccctcttttcatccctaggttgatagagtttagcaaatgtccagagtctggcccattatatccctctgccaccttgcctctgagattttgaatcctgactgtgtgactcttgcttctgggattttgaaacctgagagtatgtcccaaagctaaatactcacgtaaaatttattcacagctcaggcagctgcagtggtggtattcggctacattcttccttcttcctacaagatcattgttgagcttcctcctctttaatcacccagactgctacagttcttgttcttctaagtttcctgttgctgagaacctctgataaacttccagtaaatcactaacccttcttccccaatttttctccctatgttcttgaaaccaagagctcagagtgatatactacatgtccctggtgcttcattcaatgacagaggatccatggtgcactggcccaccctttgatcttgtccccatgactgaccgtaaggcttggtgaagtcttctgctgtcatcgtttttgtatcatagtttccagggaatcctggtttttaaggaatcctggaatcctggagccagaaagaatgttgagctgccctctagctaagccattggctttccagtcacctcctgtctattttcacaggatgacatttctcaacttgaattgtttccgtgttccggttttcccctcctcctttagaagaatggcccaaccaataaaattctggcaccttctcttttcaacatctgaacatgttatcaggagacacaaattctcgtgtaacctttgctgtcgatagtcgttgtgtaagccaattcatctctttgtccttcagtcttctcacctataaactaggctaagtagcagcagagggccattttgaggggaaaattaaaaaattgtcatggtggaatatttcaaaaacaagactggaagtaataagcagatgatgccctgaatatttttcacagaccaatgatcataaaatgaatggtaacaacattaggaaagatggagtgacttttgggtttagctattagccatggagaattgtgcgttgagtggcagtgaggggctgggggctgaatgaaagctactgtttttctaatcaggtagtgacctcttctggggaaagaaagagtctagcagagcctcagcattaggagacatgtgcaacgtttgtaccaaggcaaccaatgatagagaggatggtccccagagggagaagctcttggggtagatgtttgccctgggcagccaggtggaaaacaaaaataaatgaaatgaaactaaaaatcactttctgggtagctttacccaaaagagctctcattgagagagctaatgaaaccttgtggacctgtgtatgcattgtggtgaggttaccgtccgcgcaagctggccagattcaagaacccaagattggtttttagggcgaatggttcaaaaaaggtccagatgggaaacgtatttgtgtgcattcccatctggaaggaaaaaggactctttcagagggacaaaccaaaattcaaacgaatggtgaggtctagagtggtgagtgacttttgcccagtagtcctttaggtggtaggaaaggggcaagttcctattgcaatcttgtcagttgaactagagtagtacaaactgtaaaagttttttttttttttctccctctaccacacaccagtatattcatctgctacttaaaggtcttggaaggaggaagaaagaaaatctccaggaagtcttctgggtgacttcagcaacaattgcattacccttttccaggtacccaaaggacttaaattgtgctagagaatggaacattaaatcagacaggttctgcattgaagagtgctgcatgacattactgaagatacaagctattgctttcacttagacccatggacagcaaggtgcagggctgatgaaaatcatattgtcttatctatttttgaacggtattagaagaatgggtctcaaaaggtgaagagacttgcccaaggcagactcagaaacatatgggcataactcaaattagagctggggtttctgaccatcttttttttgtttgttttctgttagcagtcactcctcttccacctttctccagccccgcactgcatattaaattgattagtcatattaatattaatatcacctggatattagatagattaataatatggtagctacagtttaaacaactaccacatgctagtctctgtccattcattcattcaacaaatatttattgcgtgcctacaatgtgctaggcactggagatacaatagcaagcaaaaatgataaactcagccattgtcaaaaatgtcatcaacaaagatataactaaaactgtgcaatctctgaaggcaagagatttgatgtggtaagaggttgtgatggtaagggtggggctattaggctagggagagcttcctgaaggaagtgaaaattctgttcatgtgttgatcaggcctaaaaatctcagcatcatccttgacttcattcattttcttacactctgtatcctatccaccagcaaatctgattggctctgcatttgaaatatgttcagaatccagttgcttcttaccacctctgctgccatcctcctttgcccaaacacttcttgtctcttgtctgtattgttggaatatggtgtctctgctttcactcttgtctatccatgctcaaatatatttggacaccgctgggtcaaaattaatttccaagtcttgtactgccgcaggacttctcagaggctttcacatactaaccaatgtactgactctccaagaagtgggtgcagtatacagcatattacacacatttgaccacagggactcttttcttatagtgcatttcacacaactgctgtttcgtggaagacatgctgaaaaacacagaaaatgtttatgaaaatattaatacatcacataaaggattattattattccacaggagtacatgatgggaaatggagccacctacaacagtttcatgaacagggagtcaggtttactgagtcctagctgcagttacctttttctgagctgggtggcattcaacaagttatttaatatctctgggtttcctcatctgtgaaatacagacaataattcctgtcctgtctactttgccaggctattggaagaaacaaataaaattaaaaatgttaaagaaagaacttccccttccctccactacaccaaacacgaactaaacctgacaccattactgtgctagtgtggacacttagaaaatcattagtattttcagttacacgatctctgcacttaatcaatgagcaacaaattaacatttggtttatttatttaagcaaccaggagtaaaacccaaagagttgctggctgttggctggaaatcaaacaaaacaaagaattaattggagctaaggctgtggaaagtgccagtctgtgacatgcatggaagaaagcaaggaaagcctggagtgacctggattgcatagcagaaagaaaaatccctgcaggggcagtgtgaaaagactagggaggtaagagaacctgaaaatacagcactgtaggtagaaggctgtaaagctggaatgatgctaacaaatactgtattattaccttagctgatagcggtgacatagtggcccacacagaatcattgaatagcatcgggtgtggtaattcagggagagccagtggggcaatgtagaaactctaagctggcaaagttctgtggtttttgtaaagtgcctatccagagtacatggttcattcatgccagatcagcaaaagcagctgctgatgtgatgatgatttcccttttgagctaaacctctacagagttccttttttctctagggcttttggctatgactgatgacgtagccttaggctcaggattctaacaccccacaaaagcaaaaattgacaaatgggatctaattaaactcaagaacttctgcacagtaaaataaactattaacagagtaaacagacaacctacagaacaagagaaaatatttgcaaattgtgtatccaacaaatgtctagtatccagtatctataaagaacttaaacaaatttacaagaaaaaaaaacccaaacaacgccattaaaaatgggcaaaggacatgaacagacacttcaaaagaaaacatatatgaggccaacaagcatatgaaaaaagctctatgttactgatcattagagaaatgcaaatcaaagccacaatgagataccaccttacaccagtcagaatggctattaataaaaattttaaaaaatgagagatgatggcaaggttgcagagaaaagagaaaaattatacactgttagtggaagtgtgaattagctcaatcattgtggaaagcagtgtggtggttcctcaaagaccaaaacacagaactatcatttggctcagtgatcccattactgggtatatacccaaaggaatagaaatcgttctgccatgaagacacacacacacatatgttcattgcagcactattcaaaatagcaaagacatggaatcaacctaggtgaccaccaatggtagactggataaagaaaatatggcacatatacaccgtggactactatgtggccataaaaagaatgagatcatgtcctttgcaggaacacggaaggaggtggcagccatcatccttaacaaactaacacaggcacagaaaaccacatacggcatgttctcactcataagtgggagctaagtgatgagaacacatggacacaaatgggaacaacagacaccggggcatacttgagggtggaaggtcggaggagggagaggattagaagaaatagctattgagtactatgcttggtacttagctgatgaaataatctgtacaacaaacccccatgacaagaatttacctgtataacaaacctgcacatgtttccttgaacctaaaataaaagttaaaagataaaaataaaaataaaaggattctgatgccccagactaacttacactcagtaaatacattttgatgtatttgtgggccaaagctcctaatggagatgatgatgatgctgctgctgctgatgacgatgatgactgtattgataatggtaataaaaaacatagctttcatatggagtcaggttacatgagatacaatactctttcagagggacaaagcaagattcagaggatggtgatggtgaggtctagaggagcaagagacttttgctcaatagtcatatagcagctcagaaaccacactcatggccaggcatggtggctcatgcctgtaatcccagcactctgggagggcaaagcagggcagatcatgaggtcaggggattgagaccattctagctaacatggggaagccctgtctctattaaaaatacaaaaaattatccaggcatggtggcacactcctgtagtcccagctactcaggagtctgaggcaggaggatcgcttgattctcctgggaggcagagcttgcagtgagccgagatcgcaccaccgcactccagactgggcgacagagcgagaatccatctcaaaataaataaataaataaataaataaataaataaacaaacaaacaaataaataaacacactcacctctaacccccttaaatgatggcctgaagttggcattgaaatccccattgaatttaaaaggggaacccaaactccaacaatttactggaggtcacatggcagagagagacagcactggggcaggaagcaaatcttctgtccttccattgtctttgttttatatgatgtgcttctctggccacaacccggtgggaccattaaatcttttgggcactcagtgctgggaaaaaatctcttgctggactctttcatatttgaaatgaatcccaatggataagaagtttcatgttttggggcatttgtaagtgaagatattctaggctgatggcaaagttaagttgtcattcaacctctaagttaatgcttagaagttttacttgatgaaccaacgtatggtcattaaaaactacaaagttttcctcctcaaatgtggcacttaagtgctgtgtgacctgatgtgtccatggttcaattttccagctgtaaagcggggttcataatacttcccaactttgtagggttgttgagagagttacacaaatatgtgtaaggtacctggcattgtacaaatatatgtgagccacattgtcaggcacactcaggctttacgattcttgtttattttgtatctgttatttttgttttcctacaattcaccattctgaatgttaattatctagccctaacagactaacaggtcttggagggcagggagcgtctcattcactgctatatctctagtacctggaggataaaaagtctcagaaaacaatcgttgattgaatgagggaataaataaacatatgaatagctgtttaatgtagccaattaaaaaataggtaaaatattttccattacttgttttcttatttgtgaagagtcataatttcttctgacacagtaaaaaaaaaaaaattaaaaagcaagaggtagataacttcttaaagtcttgtcttttcagtactcatacattgaccaattcaaattaaactactgaaggtgacagagccagtgtttactggtcaaatactctgccattaattatttctatcgtatagaatattccttgattgggtattaaaaaaagaagacagagcctatgctatattctctgttatattctgaacagctaagaactgtgcctgccacccagtaagcactcaatatttatttaaatgaataaagatattactgctaagtgttctttcattttgttataagctcatttataaggtagtttaaatccaaaacactttttccacctatccctggaccttaacattgagcctctagtgtcacaggcaagaacccaatagaattaaaaggtttttgtttgcacaaagttatttgccaggattactaagcaaacaggagaaatggaacaaaaatgataaaaacaatttgtggtgctttcctgtgggatttttggaggtttttcaaagcatgactagtgagtaatgtaattgacttttggaggagaaggggaagaaaaatgggcacatgattatggactttgtctcctgtgagctttgtggctgtatccagcctttgcaaaacatcacttttttggaatggcctgtagctaggtacataggccaatggcattcactggaaacacagggaacttggtcttcctcagaaatgagggttcattacataacagaatccaggtggcagcacagtcaagggacagggagcagtggctgaactcaggtgatcagtcgtggcaccttaattgcctggatcagtaatggacacaaatatttaggtagctgttggatttctcacaagtagaaggaccatagctcacaaaacaggctgacagctcattcagtttgaggtgaacattattgttcccattgaacagacgaggaacctgaaccctggaaattatattgaacttgcttgaggttactccactagtttacccaggtccaaattttgagttttcagtattgtgtcatgagctctttccttacagaaaaaaactaaatatcctcaaggttgtttagccactagcccagatattgacaatgagtcattctctaattactggtttactctgaagctggttgtgcagtgcagcctagtgaggggatgcaggatagttgatcccaggggctttaaaacccctggaattttaacaactcacaaatattgagcacttgctaagagcaaggtagaacactgaaggctctatgtgcaggaactcccccagtcattgcaataactttttgagatatgcattgttatcatctccatttaatgttgattgagactgaggctcagagaaattgacctgcccaagtttgctcagctagaaagtagaagagctgagcagtgacttcaggtaggttgaccaattcatcctggctgtgcagttcttagaatggtgttaggaccagcagtatcggcatcgatgggtaaattgttacagatgcaaattcttggttccactccagacctactaaatcagaaactctggcagtggagcccagaaatctgagttttaacagttttcctataggtcttgttgcatactcaagtttgagaacttctggaccatattaaatcactgtgctttcagggaagaaaggacttacacagagcactgagcataccagcggagcttagagccttgggaagatgttcttccaaaagatgctattattttgggcttctggaccacaactgagggagtagagtggaagcagaatctcttaagaaagaatatgtgatgggaggagatggtagaaagaggtgacatcacagccaccttctgagaatatgatgtgtttatagaacaggtgttgattatccactagactcactgaggtcaagtgacttggccaaggttgggtaatcagtgacaaatgaatggactcaaacccagtcccctggctcctcagagagtatgttaaagctacatttcctcactagagtagggtgaggcatagaggttcagtgagcctctgaatcatgagaacctctcctcagtaactgtcacaacttctgactagatgagctagaatcaaaagaagaattaaaaagatagtaatttggtggtcccaggagggagggaagactaagggaagaattcagagagaggcactaaggaggcgaggatgtcttcaaggtaccactctggaacccatgactgtctccttatcttgatcatcattgtcaccatttattgggttgcacatgctctagtatgttaccaaccagaaaatgcaacacaggcgaccttgagtttaattcccaactttgccagtgaccccaagcaggttattgagcttctctgagattatttcttcatgtacaaaatgaagatcatgagagttccaacctcatgggatttgagggaagttttaaaagaaagaatgtatgtaaaacccctagtagattgtctagctcataataggtgctaaataaacattcactatgttgttgttattatcttatccaaaggctggttcacaggacaaggcagccatggacataaaaggatgcctcagtgagtgaggatgatgatttagctgtttgtgggcacataagtctcccactatttgtccgttcccattcttatctttactccctcatccaccacttctgtcctctcagaccctcactcagagagagtggtcttaagaaaggacccctttaatctcttgttcccagagaggccatgggtgcatctcatctgcttcactgtgtcacccaacactgtgtgcagcgtccagggcatcagaagctcactcacctggacaccagctgccaggaggtggcaggtagatggagaagaatgttttcaagggatctcatctgaacattccttctgattgattgcttagcagactcgtggcaaaacaaagttttctggaccctcttacctcctttgtctacttaaatgacaataatatttattgatcaattgcaataggccaaccattttatgatatttaaaaatgttatttcattcaaatgttgcaatgatatttgtaaagtgagtataattatttatactctataaatgatgtaaacagtaatagattttggaatcaggatttaaatcacatttctggctccaatttagtttatcagttgatgtcttaaatggctgcttcctcttaaaaaaaatgaatatcttgataaagaggtcccttggcaaggcacatggaggagtgtttttcagggaaggggcctgattccctctaaattacagccatctttctgctcatgctggtatgtgatttggctcctctccactccctgaccatatctttgtgattatgcctttttacttagccttgaaaatgggcaataactctactccgagtcaaattaaggggtgggctagacaggaagttgccagaggattgattctataataggctctgagccatcactggaaatttaatgacatggaacacagtttatttattaatattccttccatggagaattctgcttggaaaaatgtttgatacgacactgaaggtggaaagaggtgccaacagagttatcttctagggatagtggatcaggtcagtgccaggaagatatgcaagtctgggtcagagctgaattgtttgagaggacagaggggaggctgaggttgctaccaacaagctattttctctgattttcccacacagaataggtggccaaacagttaaacacatatttccttgaaggagcactgaatcattcccctgtccagggtgctcccacccctgcatggagccctgacgctgctcagaatgctgcataggccctcctaccctcatattcttttctctttttccttctttctctccttttctggacattgctgtgcagtgttccattctgatctccagctctaggtcattttccactacagtacagcatctgcagcctggacaagaacaacagtgtgtgaggggcagtggtgagacctgaaaggcagaaacagagggctgggttccaggacatttctaacattaagaagaggaggctgggatttggaatctcttgctctgcctctgcctacaagccttgaccaagattcttgggctcatccataaaacaatatgaaaagtaaacattgagcacttaactatattccaggcactattctcagtgcttcatgtgtttatgcaaataattctcataataaccccacaatataattactgtcataatccccactttaaacatgagaaaatggaggcacagagaggttgagtaacttgttcaagttcacacatctagcaaatagggctcaaatgcaagcactttggtgccagaagtttcattcttaaccgctttgtgatactgcctctctgaaagggacaaaaagcaatggtgaaggtgaaatgaagtcatgtatctaaaatctttttggaaattgaagttgtttgactgtgagtattattattagccctccccaccgcctacatctctgctattggcagaaataaaaatgtgcatctagagatgcctagaagggaacggaactcacccagatggtgcatgtagatggagaaggggctaccccttttgccaaagagtgaagagagattcgagtgttgctcacgactgtgttctctttatttagcccatgcccaaggcacagtagagcatcaggtaatattcattaaataagtctaggtttgaatccttgctctgtctattacctttggtgagttattgaagttttctaagcttcactttgctttcattttggaaataaggatttgggtacctacttcagaggtcatgaggcctaaatctagataaacgtagattttgaataactgataattgctaatattattttactagaccagtggccaacaatcttttcctgtaaatgaccaggtataaaaaatattttagactttgcagagtagactgtccctgtcacagaaactcaatgctgccattgtagtgtgaacacagtcatagacaattaataagcaaataggtatggctgtgctgcaataaaactttatttacaaaaagaggtggcagatgtgaagtggcccttggtttgtagtttgctgacctctgcattctatggtctgagcagtgtgaatctgaaaggtgctaagccatattaacaggctgaaaatgttcttgaacttcctaggcagatctcatctcttcattcctttccagcgttaaggaatgagcaatattttcctggcagagacagtgtgcttgcaggggaatctgttctcggagtttgtgtttgtttgtaatatttctttaacaagtgtgagtggtgagagcccttcctcccacatattttccttctaactccttgtttcctggtaactgcaccttctccacatacctctagagctagtctgtggtgagaacacatagaatttgggaggctggaactttgcttgactcccaaatagaaccttagtaagatggtatatttatctagaataagtgatgtgctgaaaaatatattaaaaagatggtcctttaaaaaaatgtggtggggtcttggaaaaagaacaaggtaaaaatattatattttatatgttaaagagaatgaaccaaatgtgctttggggtgtagcggaagagagaacatcagtagtttttttagtgtttactgtttctcaattatctaaaaggggcctgagacaccacagttgatggttcatccagaaccacatgggatgggtaactgtggctccccatgggaacatcaaggggctgttaacacaagaaggaggaaggatgatagagatgtaaaaactgcattgggtttaggtaaatacgaggtggctgcccaatctcacttttttgaacatctgtttgctctcctgtgcaaatgaaaatagataatgtgaaaagcacttggcccattgcctggcacaaaactgatctagaataagtggatactataagttttcattttgttcactgatattattaataaaacctgacaggtattaaatcttcacatgcattaggcctctctgagctgatcacatacttgctggattccaatgcatgtcacctttcgatgtcatcgaggacctacatcctgtatatctttctgttcttccattcttcaagtttcagcaatgtttctcctcatggttgcaatatggctgcctcacccccaagcattctgtcctctcagaacatcatgtccgacaagaagaaagggggagggctgacaaaaagggcctcttctcctatgcttttctttctatctgggaggcaaatatttccaagaaggcccctttcagactttctcttacataccattgaccagaagtgtgtcacatatccagctgtaaacaaatggctggcaaaatgagtgggtaaccagggttggctgagaagactcaggatagacccatgggaccgaaacaaggaaggccactgggtatgcagggtctgatgaaaaaggtacttcctttctcatccctccctttacctcaagaaacaagtatgctgttttcatcagttcctaacacagtgcctggcctaaaatggcactcagtttatatttgttggggataaataatgactaaataaatcatgaatagaatgttcttctttttgccttttttccatctagaattctgatttcctcttttccgagtctggggtaggcagccatggagctattcttccagtctgacgatgactctttctaaatttggtaacatgggaagaattgaatatggcctgtcacactgtccacattcagcctttgatatgagttggtcagtgtggtcaaagacagaccagcatgggtgaggctgatggtaaactcaagggttgcatgcacagaaatgaccaagacctttctaagcaagattggaagtcaggataagcttgttccctttaatcatctctttgggcagtttcctatggcttttcaagctcccctgttagaatgtgaacaaaataacagggatctgcagagaaaaaccttaaaagaaatgatttgaaatgcactaagcaccttggaagcattagttgtcaagcctttaatgagataattataaatgtcctctatgtagcgcatagctcaaatggtctacaatgcctttttaggtatcactttgttgatctagtttgaatgaagcactggaaaatatttctttaaatacatggctattctggattatttgtggtttcagtcttgtttacccacactgataggccaaaatgaggatttttgtgctcaaatctggaatcccaggcgaagaagacagaatggcagagtggttgtctaatctgacttgaatctgattgctgtcacttattagtgtgacacactgggcaaatggcttaatgtctccaatgtcaatgtctcagtttcctcatctgcaaaactgggcaataatcgatggtggttctggcatggtgtatggcacattgtaagggtgaaataaatgctatttttaatggcttttgataacatgttacattcttcagtttgtcattgaaatgcatacttaacaactgtagttgtcatctttgaaaaatggattatgtcatgtggatatcccaacttcagcccatccaacaacaatccgtcaatgttataaggaggtttctgtagtcttggaatggttctaggcaccgggattatattgaacaactgatgaggcctcatgccgctgaagactttgaccagacaattaaggtggtttaaaaacacccaagaaatagatatttctttactatgcagaaatgagtttctttaggttcaatggactgattatgttactcaaaatagatacttgaggtttcttgattgtgtcctgcagttggtgtgaaacatgaagtcatgtaacactgcagcgtggagtgcctataaaattaggggctgggcaatgtcagtttaccatacctgtttactaacacatggcacttcacacaagtcatctcactgttctgggactcggctctctggtctctaaagtgagcaaacacccattcatgtcgttcagctggttattccagagtaaaagacaaaaatattttgtcatagcaattattgcagttactgtggtatttgaggagttttttcagaagccagaaatttcttgggcaaggggtatgagaatcattgtttttctattattaattctttccaactctctgaagatgagttaaaaaaaccatcttgattatctgaaagtctgaatgaactaatgtggaagtttgggcactctgagaagcacacacagagggtaggattagctgtgcaggagatttattagaggaaacacccatgaagaaagaggaagtagaaggcagggagaggcttcagacctgctgcaggtcttacacctgtgaaaggagaggaggaggaaagaaaattgagtggcaaagagtctcagattgtagtatggctctaaattctagaatttggcatgatcagagggagttcttgagcctgtctgaacattttcatgacttaaaacaggggtccctgacccctgggccatggacctgtactggtccatgtcctgttaggaacagggcagcacagcaggaggtgagtggtggcccagccagcaaagcctcatctgtatttacagctgctccccattgcttgcattacctcctgagctccaccctctgtcatatcagcagtggcattagattctcatgggagtgcgaaccctattgtgaactgcgcacgtgaaggatctaggttgcacactccttatgagaatctaatgccttatgatctgtccctgtctcccctcactcccagatgggatcatctagttgcagaaaaacaagctcagggctcccactgattctacattatggtgagttatataataattttattatatattacaatgtagtaatagtattagtagaaatacaatgcacaataaatgtaatgcaattgaataatctcaaaaccatccccttgatcccacaagtctggaaaaattgacttccatgaaactggtcccttgtgccaaaaaggctggggactgctgcgttaaggaatgggcccggaccagtctctttgtggtttttagtcattggctgggggctgcctacaggaggtgtggccgggacatgaacacagcagatatcagcagctggggcattcattcagcttctcatggcaagagatctgaacagtatattttcatggccaggccctaaatttcctgaagttttctgtttggaacacagacttattgagtttgagaaaaacccagaacatgtgtgatgatagagatttttttcactccaaatcagtgtttcattccttcctttgattttcacttcctcctctgtttcagctaggccaaccatgttgaaaaccccacccaggtttgtagagttcctcatttcacaattaaaaaaaaaatctctatgtgaataagccacttgtacttcctttgttttacctgcacagggagttatgattactttcttgagtttcacaggttttctccctccactccctggtggcaaggtctttgttttaggatgatgacatgtaatagaaaaaccatatgttttgttccatgagcaggcacaaatagttgtgtgaccctgggcaaattacacacctctaggcctaggttaacccttttgtctaatgaagctaataatagtatctacctcgctgagatgttataaatattaggagagataataaatataaagttctcagcacagtgcctggcacattgtaggtgtttaataaatgttggatgaatgaataagcttgaatactggaggcacataggtctttgttccttttcctaccttcttccctacctctatgtgttcctacctctatgcagtcagaggatttagatgagaacaggtggatggataagagactagaaccatagcaacaaacaagccattcttgagcatttattgtgcacagccactgggttaaaacctgcaggacaagaggagggcactgactggggcacagtctctgtccttgtagaggctgcatttccccatggcattaggcattcaaagatatgatgactggggacatggggtggggaacagggtgattaaaggcatggtcacaggctaaggtggcagcttgggagatggtggaaagtctaatgtgaggaaacagaagatgtagctggaaagttgtcttggcatcgaacccctgagagttctaaaagccaagctgaggaaactggacttgattctgtagatagtagtgagtcaatacaggctctcaaagagagacttgaaatggtccagctcgcgatgagaaggattcactgagaaagaatatcctgaaatggcatgcctgaacaaccccaaggcaggaagtcccccttggtgggttgggtcaaacaccgttgtcaataaatgacggttataatatctttattttcattttcaatacaggcaatctccaataatagaccattgagagctggcatgttgctcttccctgtggggagacacactgggagtggaagttttaatctctgttataaatgagcttgctttagtagagaggagaagaatcacactcacctactaagtcacatttgttcaatcagtgacatttgcaccaagctcctaccatgagtcagcccctatgccaatgatcggggtgtaaaagcgggcaccttgcctgccctcaacgggctttgcatgctattgggatagcaaaacaagtaagtgactgcagtaggacaagactaagggccaaaaggaataggacagagacagggagtgatatggaaatttgctaggagaaagagaataatagaagataaaatagtggagaaagacttctcagaggggacgagacctcaactcggttttaaatttatttattttttataaataatagttgtacatatttggggagatgtgtgatatttcgatacccatatacaatgtgtaataatcaaatcatggtaatcaggatatccatcacctcaaaagttgatcttttctttgtcttgggaatgttacaattcttctcttttagtcacattttgaaatatataataaattagtgttaactgtaagtttccttctgtactttcaaatactagaacttatttcttctagctaacagtattttttttactctttaaccaatttctctttggggggatttgaggtgtaacacagaagcttagaaatgtagtatataaagaatgagagtttacccattggagtctgactgggtagtgtagacgctgaatccactttctagctgtgctcactagagcatgttatcctctgtgccccagtctcctcaccattaaaatggaaacactggtgggaactcacatgtagggttgttaagtagacacagcacaggtcagaagttcttttctgcaaagggccagataataaatacgttaggctttgcaggccatttagtctctgtgtcaacttctcaactctgtcaccacagtggaaggcagctgtaggccacaggttaacaaataagtggccgtattccaagaaactttatttacagacaccaaaatttgatttatatcattttcctttgtcacaatctattaactattgttttgattttttccaatcatttaaaaatgtaaaatccagctgggcacggtggctcctgcctgtaatcctaacactttgggaggccaaggtgtgggcatcacttgaggtcaggagtttgagaccagcctgaccaacatggtgaaaccctgtctctagtaaaaatacaaaaaaatagctgggtgtggtgtcacatcgctgtaatcccagctacttgggaggctgaggcaggagaatcgcttgaagcctggaggtggaagttgtagtgagctgagattgtgccattgcactccagtctgggcaacaagagcaaaactccatcttaaataataataataataataataataataataataataatgtaaaaaccattcttagctctctggccatacaaaaataagtggcatgctggagttggtccacaaaccatagtttccagcccctgtgatagagtaacagactccaaaggtcagctctcgttattttcaaccttactttttagacaggaaaatggagcgtagagaattcatacaagactccagaaagaaatttttgccatgtggggtctcattaagtatcttctatcagctatatatatatgtacaagggaaaggcaaaggattctgtaaaagactgatttcttttgctagcataaataatacatctgaattctaaagcagcctcatcttccatgcaaggctttatttaacagaatatttaatgtgatacgattatgctctacaagacccaaatgaagagttctgcccagctaagggggaggcactacggcaacacagggcaccagctctgagtcccttcctgtattaagttgttcttgcattgctgtaaagaaatatctgagactaggtaatttacaaagaaaagagatttaattagctcatggttctgcaaactgtatagaagcatgatactggcatctgcttggcttctggggaggcctcagggaacttaaaatcatggcagaaggtgaacagccagtaggcatgtcacatggcaaaagtaggagcccgagagtgctatgggagaggtgctacacactttctttctttctttctttcttttttttttttttttgagacggagtcttgctctgtcacccaggctggagtgcagtggcgcgatctcggctcactgcaacatccgcctccctggttcaagtgattctcctgcctcagcctccggagtagccgggactacaagcgggagccaccatgcccagctaattttttttggtatttttagtagagatggggtttcaccgtgttagccaggatggtctcgatctcctgacctcgtgatccacccgcctccgcctcccaaagtgctgggattataggggtgagccaccttgcccggccggtgctacacactttcaaatgaccagatcccacaagaactcatcactatcacgaggacagtacaaagggtgatggcgctaaaccattcatgagaaatctgcccccatgagccaattacctcccaccaatcctcaccttcaacattggggattacatttcaatgtgagattggaggggcgggggggcaaacatccaaactcttatcacttcctcaactgaaatttctccccactgatcagctctctttatgtatgatttctagagctctaaaaatggcagccacaggaaagcagaatattccaaacagcagagaaacgtagctgaaacgaaggcacataccttcttcagcgagtggtagttatgtacctggggtttggccacaaatccaagacagaaatgaaagacatatgagtaaaacaaactcgtgtttctttttgtttgttttgcttgtttaaaggagttaaacaaaacaaacaaaaaccactttggaattttttactttaaaataacacttacgtattgaatgatatgtaacttactcttttcccccagctcagcaagctctgtgccctcctcctcactttctggggaagaatgcatgtttcagctaaaaacaggtgtcaatcactgtgtgaagaaaatgaacaggcaggatgtgcctaggaacagtacttaatttgaagcttcatttttcccttagcctgacggaatgggtatcttatatttgtgtgttgcctggatgtttggaaggcttttgggtatagttagcccatttgtttctcagagatttttttatttgcaaaaaaagtgcttgcatgccatctaaatttactacttctccttctcccacctagggtaaaccaaaagagatggtacattcaaggaatctaacaaactttcccttagctgatctccctgacccccacttcctgtccgtctttgttcacaaagcagccagggtcatttttcagagcctcactgttgcctcctctgcttaccttccttggggggccctcaatggccatgggataaagtcccatcttctgaaacagcatgtaagtgtgtctagcatctgaggctgttcctatatttccagttacatgtcttctctcactgtggactctgaattcaagtcactctatggtttccaaaagtcacagcgggctcacatctctgtgcctttgcccatgctttcccttggaattgagtgctttccacccaagatcagcctagcttgggtgaagcctagatagaacaaaggatccaaactgaggaagttctctagcaactaggcctctcaaatccccctcactcctttcaaatagcagatgtgtccattattttgaagaatgagaagtgcaagagtgggtggaagaacccatccctgcatccgcctcaaatgtcctgagcatcctgtctgtcctgggtgtgggaatgtagcaatgaattagccctcagtgaacttgcagctagcagggaagatgagagcagtccatgaactcccaaaacaccaggcaggaactaataagaatatgtacaaacagaaggctccatagaaagctcagaggagggagaaactatatgaagctggaataatcagaaaagacattttggagcatttgccctgtgactttaaccttgaaaataagaaatatttgaatatgcagagagggtgggagagttttgatgccagagttcagtctgtgcaaaggcaaggaggtggaagataagctgggctttcagagaacagagagcctcagcttggcaagagcaagtgggagctgaagaaagaaaagatagactaatgggtcagggtcagacaatggaggaaccaaaggtgttggctgacaactaacctgcagattccctgctcccagccatccacagactcagaaagcttctttcctgattcaaattggataagaggttgcttggcagtggtaggaacccagagcttgatcaggatgctgctggtataccttcaggccaccagcaagacagcaccaatgtcttagagttgtattagaaccattttgtgtattttgactttctactgagtttattaaaggcatgttccctgaaatgggagataagggtcaactgctgataagaactcattgaattgaaaagaaaaagtcaggctgtaatcccaacactttgggaggctgaggagggcagatgatgaggtcaggagttcgagagcagcctggccaatatggtgaaaccccatctctactaaaaatacaaaaaagtagcctggcgtggtggcgcgcgcctgcagtcccagctactcaggaggctgaggcagaagaatcgcttgaatccaggaagtggaggttgcagtgagcgaagattatgccactgcactctagcctgggagacagagtgagactcgtctcaaaaaaaaaaaaaaaaaaaaaaaaaagaaagaaagaaagaaaaagaaaaagaaaaagaaaaagtcagaggaatataaagtgatcaagtgatcgtgtgtgtgtgtgtgtgtgtgtgtgtgtgtgtgcgtgtactcaccttcttgcagagaggtcaaagagcttttccaacatcatttcttctttagggctcaatgctttctgtggcttggtaaaggaggaaatatttgagcagtacaagataaatctgaatgagaatgaaggtaaccaaataattacttttatatcgaagttttccgtgcaagacagtatttagttgcctagagctggtccttgactcctgggctgattggactctgattagacttctaccacctggtatatccagtcaacaaacatcttctgggccccagcaaggcatcaggaactgtgctatgtcttaaaataaggagttgagtggagacacaaagaaataatggaaatgacccatcttcttgagaactgtgcatctaatggagtgaatacatatgtccagacactttcagttcaatgtattaagggaccagatgaaagtaggcagtggatgctgtgggagcccagaggggaaacacctcatccggcctgaggtaaggatgttggaaagggccagggagggttatctaaaggagctgacacatcagtacaattagcatcttccagtggttggtccagctttaaaatcacagcacctcaaagctggctatccctgaggtcaccgcatctgtcaaacttaatagtcatcacctgtttaattatctgatgttcctctcagcttcaaagaacaaagatggtttctgttttgcttattatgtgtccccatcacataacagtgtccaacacctaataggcaccttaaaaatatgggttgtgtgtcaagggataaatattagcacatgaattttcaccttctttccaagtgttaaggggaatcctgttgtaatatttaatgacagcctactgcattcttaactctgagccaagtctagaaggaaacaacaaaatcaagagaaacatagtagaatgtttggacacaagaaaacttggacatcagctgtttctataactcatttctaccataaaaaacaagttcagaaaagttgccttgtaactactagcacaaggtcatccaggtaattagtagcaagcaagtctgaaatccaagtatcctgaatttcagtcctcagttccttcctttgagccatgggtattgtatcagttacagacatgtgcagaggaagcacaaaggagtctggaaaggatgtacttcttttgctggcatacagagtatgtctgaattctaatgcagcctcatcttgcaagtaaggctttgtttaacagaatattttatgtgatagaattatgttctacaaaacccaaaattttaaaggatgttttctttgcgcatctgtaattgcttctggcgggtgcgccttctactttataaaaaagattcctttccctctttcatctgtctcagagaggctccagagggaaatgtaggaaacaaatgcttgttcaacccgtaatgttcccttgaaaagtgaagctt

SEQ ID NO: 47 - DNA, 137671 bp, Homo sapiens
aagcttggcttgtagtggtgggagacctgtgttccttccttcctgagccccacttcctcttgattttattgtatttttagcagcactgagctgaagctttctgggttgcatgttagaggcagcacttcttgcacaagctaggggagcgtgagtatcgtttcggttctgatagcaggatggattgttatgtatcctttctgatggaggctaccaaaagctttagatgttaggatggattatctcaccttgcacaagacagtgagtgctagagtttaagttttctcctctgcaaaataaggagtggcagtgagacttagagcatctctcaagcccactttggcccaaaagttccatgactgtggcagtctagagtaaatgtgtttgatagcccctagttacaactctcttctgtctcttcccctttctgcctgcgctaccatctaatccatccacgcaaccacccatccacccacccacatttcctagccagctctctggaccaggccttgtgttaagtcctgaagacacagaaaaggctaaaacagcccctggtcttaaggactcacagatcatgaggaggcgatagatactggaatagaaggcaaaagtcaaatgtcatgagtgctgggattcagaaaggtgcaggctgctctggtagcaataaaggaaaccagctctcccttgagatccctttcatgagggttatagcctggatcctgtgatgacccaggacagactggtcttgatccaggggaaccatatcagtgacctcaagaggccccttttagccacagtaatctatgatgtggagttctcaattgctggctttgctggagaaagagagaaggaagaaatagaggggccggtcagccctcctgtacatttagtttgcggtctcaaacctctgtttcctggagctgcaggctgtatgtgtgggaggtgcacagcagtggcttggccgccccaacgcgcctacagcccgctctggggacagccgtcttttggcagagtctgcctctgcagtggtggcagctggcccaggcagacctcctctctgtccggttagtcagcgtctggtggccaagggcagagtggagcctgtgtttccgacaggccagctgcccctcagagtgaggcagcgccgtgattctgagggtgatgctggcgttcgcccctcaaccctgtcccccacaaggagattacggacaaggcagcatttctaataagcagcctctgcttgccccgtagcagatgaaagactgcgtgtaagagtgggtaattttgggttttcctgatgaaagtagttgacatttgtgctgagacctcatgcgctctgcagcgctgcctttcatctctgctctcaaagccctgctcatctctgccatgactcgggggcggcctgcgccaccggaattcagttgggccagtggtgaaatatagaggaaatggtggaatgacccctgaaggcagtggatgggggagtggagacaagtcctgactttcctggtggaggggatgttcctgggggtgtggaactgtgtatcggcccatgcagcacagccagggaaagagtgtggatcttggagcttggtatggctggctagattggaaaggcagctcctccacggacttgctcggtgaatggagggcatcctttctcttccctgatctgtgtcctcatttgtcagtgggaataatagaataacattactaccaacgacgatggctttcacaactggaaccactaggccctcaggaatgtttactggcttctagtctcattgataaactgaagccattgtgccatagctctagagaactggcactaggggcttgcatgattcatctgagttccccagacaatgctggcacatagtaggccctccataaagtaagaagggacactttgctcctgacatccatacagctcctctagctttgcagagaaagccctagagagaaagaatgtgaaggaacaaagggtcaggttaggttgtgcaacctttctgatatgcatttgtaatgcagtgagcaaatgcacaagccttgagtcgctgcattcttttctaaccacccaagagataagttgaacccccactcgtagcaacctggccacttgtctgtttagtcagccctggaatacctccactgacggggcactcactaccactgaaagatggtgtgcagaattctaatgttcttcctctcgcggggtcgtgggggctttcttccagttctctgggttctgatcgttggggctgtcctgacacccttcttcagatgaccgctgtcaggttggtgaaggcagtgcgcgttgggccttccctccctagagatgtgattgcacgtcgggtaccaggagcctggccagccctcagcttctgctaaccagggagcagtgaagcccggtttacttttgttggcttgtttattttctaatgtcacctgcctctgcactttaagtagtatttgggctgttatggagtgtgcacattctaacacagcaccttgtcagctggctgagaagctgaaaattctcggcattcctccttgatgtcaattacttcaaggagcaggaaggtgacttcttttaacaagtggaaaggattcaggtaacaaagccatttcctcttcttaaccctctactgtggaaagttattgacttagcgacacagtctgtttatctgggcttcaggagcagggctttggagactgaaggcttctccccacttttgtgcaatgttatatattttttctcactcttcatccagtctgagtggggtctgccccctcccctgagcagtcaccatcctgctacccactccggctctattggcgactgtggcatagggtggtggaaaggacgctggactgagagcccagagatcagatgtctgaccttccctctgcctggaagagctgcctggcctctgatcagggtccctaccttcgttttctggcctcactcactgtggcccaccatccagcagtgcaggtgtcctggggactcggggaaggtcagaagtggaaggaaagcctccaagccctcgcatgcaggcccaccattccactgtcaggttttcttccctttccttctgctctacattttgtgccagcagtttgggggtctcctgaatcttatcccttcgcagcggtaggcaggtgcaatttctggccagtcactgaacatgaagaagcatctataggcggagttaaatccaaaacacttggcctgacacacctggccttgaagtctcccccagcctctcctcttgtccccaacagtggttcatgttctagccacacagaaattgagggggtcctgtgttatctgtgttcctgcagacagagcttgcctaggacagcaaaagtcatcctaacataaaaatatgcatgaataaactcactgccaacattcagcccacccacatccaatgataatcagtcatttactgatggccagacgttgtaaacatctgtcagtccactgcaagaacagcagaaactcgtagctgacctccatttggcctactcactgaattaagtgatgttactcattcgctttgtaaaagcaaactgagtgaggccccaggctcattgaagactctgtgggttacccagaagcccaactttccagattcaatattttttctatttcttagctgtgttaccttgggcaagttaattaacctctctgtgcctgcatgttgcatctgtaaatgagactaatactagtacccaccttctaaagtgattatgagcattaaatgaattagtacgtttaaaggcttagaacagtgttttatgatacgataaacactcaataaatgttagctattgatattggtgtgcccagaaggcttgttactactagttgatttatgtgcttgccaaaagttgttgtgttggtaattaagtacgacataaactaatgaaaattgagtttataaagagttgttttatgaaaagtttagtactttggatagaatggataatattgatttgctaaaaaaaaattgtcaccaaataacttaaaggcaaaacagctgtaaaaaattgtaaaaccatagtttgtattccatatgctttacaggtgattaactttggcactgctttaaagaaactgaaaccaggaattgtagatgttgacttgtgagtgtgtattttgcatggaagatgatttgcatctctagtcagcgtgccaaaaaaagatcctaccctttgattggttaataaatatgcaactataataaaatatttaagtgttggtccttaatgattgcctacattttcaatgaaatgacagtggcagaactgaggaacaggggtttttctctccaaggcagatcagctgccagaaattgcacgttttgtaccagctgcagggtttcctggaatcagcaaaggcctgtgagaggctgcatgaaccacacacgcttactgacacctcctgtgtgccgagcgctgagtagtgctgaggatatagcaattggggagcactagcagaatcagggttgttaaccgtggagaagagaaaggaaagatgatgtctctctatgcaaatcaagggaaagtgatttaaaaatgttaaaaaaaaaaagttaagagaggtcttcgaaaggtgttttgcaaaatgattccttggattaatgatgaaggagtggagtgaaggaagtttatattttgtgagaaaacgtgtgctaaggaaggcctcgacattagattcattctgtacacaactcagcaaattagatcatagtttaaaatgataatttcaggggccgggcacagtggctcctgcctgtaatcccaacactttgggaggccgaggagggaggatcatttgaggccaggagtttgagaccagtctggccaacatatcgaaaccccatctctattaaaaaatacagaaaattagctgggctttgtggtgcatgcctatcttcctgtctacttgggaggctgtgcatgagaatcacttgaactcaggaggcagaggttgcagtgagccaacatcacgtcactgcactccagcctgggtgagactgcgagactctgtctggaaaataaataaatttaaaaaaattataatttttggttcatgttttttttttttttttttttttttgaggcagagtcttgctctatcatctaggctggagtgcagtggcgtgatcttagctcactgcaacctctgcctcctgggttcaagcaatttacctgcctctgcctcccgagtagctaggactacaagcatgtgccaccacgcccggttaatttttgtatttttagtagagacggtgtttcaccatattggtcagactggtcttgaactcttgacctcgtgatctgcccgccttggcctcccaaaatgcagggattacaggtgtgagccactgcacctggccagttcaggtttcaaagtataagatcaatcttattttatgtatagtttatgtgtaattataaattgtatactaataaagtcatttttataattctttatttctttttccaagatacccacccccccccccaccaaggagggctaggacaagtgacaaaagtcaccccagatcacagccaaatgggtagagctaggaatccgaagtaggtgatgaagcttgatttttcaagatgctgcaacccctctcccccatatgctacattaaatatctggacctattttaagtgggttcttttctggggtaatgaggttctcttctgcctcagttttccatggctgcagagctcctgctgttccttctgcctagttcactcttctttgccttgactgcacctctctgagctaccttcctacctccatccttgcattcattaggggtttctttatgtgtccagctcactgtgggacccaggactccttgaagagggagatcttgctcatccatctgtgtcccccactctactgccaacacagtggtaggaagggaaggcggcaggcttaggcgaggtcctgcaggctggacaggatctgtcaccattacttagcccaggcccatctctttacttccagaccaactggtgtcaccataatgccttctggcaatttgaagattctggcaacctcttaccggatgcagctggcaggataatccctgtgcattagccactttcagaggtatctgggcccccaaaagagtcacgggagtcccagacatgaaggagcattagtggccatctccccaccttgctgtatcagcaaaactgctaagccctgacccatattttgggcagtgctcaccctatctcattttatcttactgtatatctcgtttgtatcattttattaggtatcttattttatctcattatatggtaatctcatttgctgggtagaccagtgaggagggctgggacaagtgactggaattgcccaaggtcacagacaagtgaggtttagagttaggactccgaagcaggtggcggagtcaccgttgagttcatcatagcgatgctggctgcctcaaagtactgttttagttaatgctcacaagcaactctgcgaagcagacgggccattcatttgtgcttcacagtgtgggaaactgagtcagagcaggttcatgtcacacagctgataaatgacaaagccagatgtgaagcctgtgagttggattccaacattcatctttgatgaagcgttcaggttggggcctggtgtgggacatgctcagaggaggacgaggaggatgatttgggggaggcctcagaaggcgttcctggtctgagtgtgctgctgtcactgccttggtttgggtccccgcttctgagcaggatcttctattggcagagggttcaatgcagtgggtgccatgaaggaagatgtctccccaacagcatcacagtctcagggactgttcacatcacattaaaagcgctgagactctggcttttggtgaaaacggctattttgtcttgttccacgggagctgggaagaggagactaaacacaggagcctccccctaacccaggggcacatggagaaggaggaaggcagcccatgctggggagcaaaagggagagaaggcgagggccagagccctgggaagtgtcagatcctggtgtgccgcgcttctcccaggttgtataatcagctgtcacttcagcatttccctgcatcagccttcccaagtacagattgaacattaaacaaacagtgacggctttataaatatttaactcccactgtttaggaattgctcggggcaggagacaaaataagagttcctggctgtctgctccatgccccctctggcatggtgttggaggccgggggtcagagatttggggagtggtgggcagcagctattctcttcttcctttccagggggatgtgtttggggacacatgtctgtgtgttcatggagctgttagggcctcttctagaagccaccagtttgcgttttcatacagtggctgggatccatcattgctggtgttattccttcacatcagagcaaacttcttcctttcttttttatatatagcagctttattgagatataattcacatataattcacctgaaactcacccatttaaggtatacaacacaattttttttgtttgtttgtttctttgagacagagtcttgctctgtgacccaggctggagtgcagtggtgccatcttggctcactgcaacctccgcctcccgggttcaggctattctgcttcagcctcccgagtagctgagactacaggcacacaccaccatgtctggctaacttttgtatttttttttttttttttttttgagacagagtctcactctgttgcccaggctggagtgcagtggctcgatgtcggctcactgtaagctccgcctcccgtgttcatgccattctcctgcctcagcctcctgagtagctgggactacaggcgcccaccaccacgcccgactaattttttgtatttttagtggagatggggtttcgccgtgttagccaggatggtcttgatctcctgacctcgtgatccgcccacctcggcctcccaaagtgctgggattacaggtgtgaaccaccgcaccagaccccaacttttgtatttttagtagagatggggttttgccacgttgcccagactggtcttgaactcctggccttaagcgatccacccacctcggcctcccttagtgctgggattataggcaggagccacggtgctcggccaacacaattgttcttaatatattcatggagttgtgcaaccatcaccacaatcaatttgagagcattttgatcaccccaaaaagaaatcgtttttattagcagtcacctctttattcccacaattctctgcgtgctaagaaattgttgagctacttgtactacaaatatacctatcctggaatggtcttttgtgcctggcttctttcacttggtgtaatgttttcaaggtttatctgtgttgtagcatagatcagcatgtcatttctccttagggctgaatactgttccctagcacaagtatattgcatttttaaaaatctactcatctgttgatgaacatttggggacagcaaagctctagttgaaaaatcaagatgaaaaatcaaaaaaatatagttgaaaaaatcaaaaaaatctagttgaaaaatccagcatcatgtgattaaggccaaactcaacttcacaaaagagagcctctactattttgggaaagatctagaaggttatctgtaagcatatggtggatgttacaatgtgttcagtggacacgccattcagcttttattcagcacttaccatatggtgggcactatggtaggattcattaattaatttattgaaaataattattgagattatatagtcttgtgaaaagatttatcagaggctgttctgtgaattttagaggttttttgtttttgttttttttttgaaatggagttttacttttgttgcccaggctggagtgcagtggtgccatctcggctcaccgcaacctctgcctcctgggttcaagcgattctcctgcctcagcctcccaagtagctgggactataggcatacaccaccatgcctggctaattttgtatttttagtagagatggggtttcaccatgttggccgggctgctctcgaactcctgacctcaggtgagccacccacctcgggctcccaaagtgctgggattacaggcatgagccaccgtgcccaggtgagttttagacttttttggggtgtaagaatgggagcatgagtttgtgttctcagctcgtttcatttgatttcagatgtcagctctctttaggagagaggcgtggagaaaaggtgggactctctgcagtcctgttcttgttctgcccacttccctccagtcatggtctctggccggctctcttctccccagagtggttcttttcctgcccctggtgtccctctaagacccagatgtttccagcacccatttgagaggctgattcagcccaggcagtgtctggcctagggaaggtgactgcaggaaatgttaaaaaatgggggctgttatcatgcctgagcatcgcacagtccctccgttgtgactaattgtagtggttgttgttgaagggctgccccaggtccccctccctggaccggtacactcaccccagctgccgagacggcggctgctaatgtccactgctgctaatgtccacagcaccacttctctggagattagccttcctccaactggagctgcttcatccgggaagttgctcaccctgcaccagccctggctgactcaggggtgcaaagggctgctcctccttgtttccatgtggggtaaactccatggtgcggttcatgttccagggcatcctgtggatggcctgagttggtccccagccgagaccacctccttcccttgcctggctctgccaccttcccttcctttctcctgaggttgctccctgttaaatcacacagacagacattccctcctcaggatctgtccccgggtgcccaccctcagacactatccggcaacacgttccctttcctgagtcccctctgatgatgtatctgacttggagatccttggcctgctggctctcttttcagttctgttctggagaatagaagcttcctgggctggcctgttgagtgttttgtttggttggttttgatttccaagtcttttcaggctaatcggacacgaggaaaggtctgcattgaatcacagccttggcactgttccccccttccttccctcctccgttcattcccccgaacatccttttctgtgccgacaatgacctcagcagaaaggggaaaaggacgtgggaaggctgcatgggaaactcatggaacttggtagcaaacagctctgggttcaagtccgggccctgttgctcaggagccaggcactcagttgtggtggcttctctaaccgggaacttcttctatgaaaatgggactattcgtctctactccttgcattattgtggggatcggaaataatctgggtcaatgatgtggtgcagtgactagcatcgaggggacaccctctccacacaggctggaaagacatccagaaggagtcctgggctccctcaccacgcaggggctcagcctcgccagatagttgtcatcacccatccaggcccgtttctggtctcattgcttttgttcatgtactttcctcctgggttgctcttccttttctctctgacctgtcaaaaagccccattgtaagcaacatttaaatgctacctcttccatgaagcccttttggatgcctcttagggggatgagttctttccatcctagcactgcttgctgcatggtccaggatctgtggggcctgtcttctttaccactttgctcacttcatgaatgtgggggtgtatgaagagtatgatgaaattagaggctatgttctggagtcagactgatcagtactgggattctggccataccccctccttagctgggtgactttaggcaactgactgtaccatcctgaaagtcatctgtaagccgtgctgaccccccaaccacaggacacttgtgcccgctgcaggtgctctgtcagcagtgacttctcactacctggcatcctctgaattcacgagcagtttgaagaatgagcaaatactgagcaaagctcataggattaaatacacacagacctgtgtaagttaacaccaagctaagggttaaatactttacaaaaattctcagtgcggttggtgggtgagaagggctgtcgtcccctctggctgccttgccaagctggtagaggggccatctcccactacctactgacaaagattctttgcttgacccaattacccaatttaatcagacacttaagtcttttcctaggcccatctgtgtacttcctgtaaaatctagttttagcaaaaaactctgctgagtcagtttggtaaggaccaccggccgtcaatatcttccatatctgatagatagggttcctcatcttctaccaccctccagatgatgtctggtcaccctggcctgcctttagcaagaatcttgataggttgatttaaccagaatcccccttactcctgatgttgcctgttagtaattttctatcctctgacccccaccctgcttcttggctgtgaatttccacttgctcaggctgtattgagttgagccctatctttctcctacactgcaaattcccattgccgtggtccctatacctatcaggatggtcctgaattgtcttctttatcatctgctctgctctgccagagcttaagcccaggcagctgagttaaaagtgtgaccaaatggaccatcttgtccctgaaaattgggacctaagctcgattccgagatttaatcatggcagaggagtttactctgctaaccaccatcaccccaccctatcccccagaggggtgcggtgagtaagggggtggcaactggttgtttccaatctcccatctctctctggccctcctctgtctctggcctcccttctccctttgaaagggacacagtgctgctcacagcctgtcctgctgcggtggctgcagagaggggctgagaataagcctgtgtccgaggcagccctccaaatacagcagggctgggttgacctttaaatagatgggctctgggccactcagttcctggaagtttgaagaaagtcagcctttcaagtgatgcgacttccaacctcaggaaagatcgctgtgtttgtaaagggtataatttactgttgcttttgcacttcatgatatgcggctgcacagccagtgggagccagcatgccagaattaggaggggaaaatcctcaagtattttaatatacccctacttagaagcaagataaacatatgtattgtactttgggacagaagcaaggggggtttagcgggtgggaaagggagagtcctggcattgcatgaaaggtctttttaagctgaactctgagggttttcagtttttcatttttctgttttttttttttttttttatttgtaagcaaagctggcatgagcaaatgatgccaggatctacttggctgtgtaaaagctgtagtccctcctcagacaggcagactgctagaaccctccctaagccataaactagtacaccgttttgcctcgcccaattaaaaatgattgggtgtgggttgtcatcacagttgacttagatgatttactttcttccaggaaatcttcctcccaactcttgctttgcaattaggcaaaagaaaaataaatgttaatatgttctgtgctcccagggaaaatttttttaaaaagaaaataaaacactttgggaggccgaggcaggcggatcacgaggtcaggagatcgagaccatcctggctaacacggtgaaaccccgtctctactaaaaatacaaaaaaaattagccgggcatggtggcgggcgcctgtagtcccagctactcgggaggctgaggcaggagaatggcgtgaacccgggaggcggagcttgcagtgagccgagatcgcaccactggactccagcctgggtgacagagcgagactccgtctcaaaaaaaaaaaagaagtgtcaaggtcatgagtgtcagggaaagactgagaaatggttccagactgaaagagactaaagagatgtgagaattaaatgcaaagcttgattctggacaattgtcaaaccttggatggctgggagcgttagatgttagttacgtatctgtgtcagcttcctgatcttcctatagaacatggtcctaagggagaatgtctttgctttagaaaaatacacatggaagtactctgtagtgatagggcttcaggtccactactccctctcacatgctgtaggggaaaaggatttgctgtgtgttcccagcacgtttgtgattatttcacaaataacaataattaaaaaaaaccaacctctggtggggcggtgcggaattattattatttttttttgggacagagtctcactctgttgctcaggttggagggcagtggcatgatcttagctcactacaaccctcaactcctgagttcaagcgattcttgtgcctcagcctcccaattagctgggattacaggcatgcgccaccaggtctggctaatttttttgcatttttagtagagacgaagttttgccatgttggccaggctggtctcaaactcctgacctcaggtgatccaaccacctcggcctcccaaagtgctgagattagaggcgtgagtcatcatgcctggcagtaatcttttcagtggagaataaaataaacccgggtttgaattctgaccctttaaatttactcagggtttgacttcagccagggaacataacctttctgtgcctcagtttcctcatttttcaaaacaaagatggtgtgtgtgtgcatctccatctatgagttgttgtgaataggaatgtaggggccccagcagggtgtgtaaaggtaccagttcctggggcgtcaaaggtttttctttcccttcgtaccccctcactgacatgcccaggtctgtctgtgtagagcagtgggtggatttacagactccgctgagaacccccttatagcatattttcaggttcgtgatgatatcatgggctgtgaccctgggagtttaattggaatgaatttcaaggttttgttaaacttggctagaatcttcctatatctccagcaagatattgatggggtttttgttgttgctgttgtttttgagacagggtcttgctctgtcacccaggctggagttcagtggtgccgtcactgcagcctcaacctcccaggctcaagggatcctccccttcagcgtccctagtagctgggactacaggtgcgctccaccacacccagctagtttttgaatttttttgtagtgatggggtttcactatgttgcccacgctggtctcaaactcctgggctcaagccatctgcctaccttagcctcataaagtgctggaattgcaggtgtgagccactgcacctggccaagaacttggtgtttcttatttccaagcttatctcctctgttatttgctcccagggagaccccttttccatttatgtttccagggtgctggggggaagtgattgccctcatctcttttgcccagccaccaaacccagtgcagactctgctgaatgcaggccccatctctgtattttacttattccatttcctgtcttgaaggtgggggcactatgtttatctctaggaccctgactggctcatcattgaaagcttattttgtgcaaagcattgttctgagcactgtgtgtgtatgattctacttcatcctctgtaaccctagcagtccggtcaaatagtatcattttatagacaaggcaactgaggcacagagcagctcagcagcttgcccagatcacacagctggaaagtggtagagctggaatctggatgggtgctggcagcctggcctcagagtcggtgctaaccactgagcggcactgccacccaacggatgggagcctgcaggatgaggccatgggaattgatttcactcagcgcgagccaagcagaactcccgtccagacctctgtccaccaccctaataaagccagtgtttacacaggctggaggtgctcatcagatgtttttgccaatccccaaatacggccagggccagaaagtgagaggggtgcctattatgtaaggccctgcggctggtccccagacaatgccacttcctcgcttggcgctgtgtgactgcataacaacgggttactcatttcctctggaaaacttcacagggcctctttgccccatttcctcctcccaccccatcctcaggcttcctctgttgaattttctccagattcctgggaacaccaccatggagggcctggcctttggcggtggacagtctgtggctgggtgggaacgtcaggagtggggcctgcctctttgctgggaatgccgtgcactcccagcccacttgccccatgccagcactcgaggcaggtgaggcccagccatgggtataaggtgctcccagggcgggattagcctcaaggaggcagggggtccatgtttctgctcctctcccattactaacgggtgtctgctttaggtttgatctccctcccttctgcccctctcctggtaaagggatgaataatgaaggccttccttgggaagtctgagatggattaccccaaggaggctcgaacatgggaggacatgcgagaactattgtcacatgagttttctttctatcctgtctgcaggacttcgcaggtgagcagtaacggaaatcagccccgtttattcctcccagcacctgccttatccaactccccacgctgtggctgagtcccagcctgctatggaagcatcactggactcccattgaactctgtgcagattcgctgttcgtagacatggtacctgatggacaccaagctacgtacagcttcaaggccccttctttctttgctaataaaaaataaaaaataaaaacataatacacgttatatttctatcttataatacacatttcttatttttatctcaataagctgatatatagtagatatacacatctctgactgtacatacatacacaaacacacacacacgtacatgcatgtatatgcgtatctatctccaatgcatgtggagtgttgtgccaggtcatcctcacatttaatttttctgttctatttatcattcttaaggattgtcaggcattagggatttatctatagcaatttggatcttagcagttcttttcatgggttatcttattttttccttccaacaaccttggaggctataaaagggcatattattgcccttttatagatgggaattaatttattagcaaactcagtttcatgattttttttttcttttgagatggagtttcgctcttgttgcccaagctggagtgcaatggcacgatctcggctcactgcaacctctgcctcccgggttcaagcgattctcctgcctcagccactggagtagctgggattacaggcatgcgccaccatatctggctaattttatatgtttagtagagatggggtttctccatgttggtcaggctggtctcgaactcccaacctcaggtgatccacctgccttggcctcccaaagtgctggggttacaggcgcgagccattgtgcctggccagtatcatggatatttttaaagtgcttgttgtgtgttgggcactactatgtcctgcatttagaaatagaactcattcctattctctgctttcccatggagagaggcacaaacctgcgggtataggtgggtatagtttcttaatgtgcacaccatcgtaaagtggagaccctgtgcgtgagatgtgtgctgtgtacagggtgggcaggagagagactggtgaggggatgatgcccttatgctggaaggggcaagatgaagcctctctgggtttggtgggaccttggagacatctgcctagtgtgtggtcacccagaggccaaggatgtgctgtttctacttgcttgctgctttctctgggagtggccatttcttccaaggcagtgtaagagcctgggcataggagccaggcagaactgtgtggggatgttgcctccatagctttctagatgagcaaccttaggaaagtttgaacagtttctctacatcctgggttcttcatccatgaaatgggaattattgtttgagcctctaaagtgagacagtcaaatgagatgggcatttgaagccttcagcagggttccagcctcacagctaactctcaactagctgtgatggttacagagctgtaggttgctcataagtcaacattgtagttgctggagccatcaactcagctataggatacaacactgagcccttttcactatcctttgatgggtctccttttccctagtatgggccatcggctaaggtgattgaaaaagggcctttcatgttttcaaaggggcaaagaaacttcagtagttggttgggcattttattgagtagaggtgactccatgcagttctttttgggggaaggatgctgcacattccagggtttaacaaaaatttattgaatgcttactttgccccaggtacctgtcttggtaaaggtgataaataagacagcctcatcctcatcttcatcaagccaccagtctggtggtggtgactggggtggggactgctgaggcattgggccccttgaagccttccctctgggtgtcttcctccccaggatggtctgggctctctcgggatgggaggaagttggtctgaaagtgcctcagtgatcgctgaaataggtttgccaaagatagaggggaaagagttggccagcctttgtttagggactcccagaatggtcttaggtcaggaaagagtgaatgggtacatttctcccaatttctgggctggagattccaaactgactccttcatggcaggcttccttatctctgcaacatttgtttacatgttcccttcatagatttctaacaggatgaagactttgttccttggggtaagggtctacctccaggtgtgtggggaaaagttgagaagctgctaaattcttggctttgacttatcaatggtttttcggagggcctggagctgggctgggactgatcaaatttggtaattgcttaggcagcctccacttttgttgctcctggggccagatggcgttgggctagaaacaatatcggggagttctgtttggttttaactgctgtacctgggtgctctgttatccaaccaggccctctcctaagttctcttctttttttttgagacagagtttcactcttgttgcccaggctggagtgtaatggcgctatctcacagcaacctctgcctcccaggttcaagccattctcctgcctcagccgccgtagtagctgggattacaggcatgcaccaccacacccagctaattttgtatttttagtagagacggggtttctccatgttggtcaggctggtctcgagctccggacctcaggtgatctgcccgcctcggcctcccaaagtgctgggattacaggcgtgagccctgtaatcccggtgcccagccagttctcttctttttttaagcctcttcctttagaaggaagaaaacataatctatatgctggctggctctacacagcagcaggcatcacaaggggtttttgtctgcttttgcttctgaaggtgaacccactatctatttagagaggccaggtcagggtgtgtgtgtgtgtgtgtgtctttttccctagggtgggtattttcattcaggaaggtgttgttatgatcccctgttgtagaagaagcagtgaagttttagggagatgaagtgctttgtctgatgtcacacaactgatagatgacagaatcacatatgtattcaggggtctggtccaaagcctagaagaaggtgagccatgcgtggcccgatggcacagagcatgagctctggttgcacaatcgtgggaggttacttaatcttgagaaacctcagttttcttatctgtaaaatgggacagtatgtatcccaaagggccattttgaccatttatcaaagtcagtttctcctccgtatggagcggagaacagtgtccagcatgcagtacgtgctctgatgatcttggctgtaatgaccatcctggttagggtggatttggccaaaagctggagtaactggtagcttcctgatctgagaggtgtcagtgggtggtgtggcccaaagattgagaatcttgtcaggggtggccacgtgagggtggaagtggtttgaatgaggaatggtcttgaggtaagagttggacaaacagtgtcttctctctctctctcttttttttttttttttttttttttacttttttttgagatggagttttgctctttttgcccaggccagagtgcaatggcgcgatcttggctcaccacaacctccgcgtcccaggttcaagtgattctcttgcctcagcctcccgagtagctgggattacagacatgcaccacccacgcccggctaattttgtatttttaggagagatggggtttctccatgttggtcgggctggtctccaactcccgacctcaggtgttctgcctgccttggcctcccaaagtgctgggattataggcgtgagccaccccacctggtcgacagtgtcttctctaagcagaactgtagccctgaagcgcccaggctagaactctctattgaatgaggatcactccattgtgccagctgctctcatattgctttgatggcctttctcagaaaggagaaaggtggtgctgggtgtggctttggcttcctatggccgccccaatgctggtctgacactttctgaatctggtttgtggttggatctgtgcatcctaccgctccactccatgtcctggccttggagaaatcatttccctcccgccgtgattgttcaccttcaaaggtcaacaaaggcagtaggcactgctgagctcttgcagccttcagggctgagctgcttcctctcctgcttccagtgaggggttgcttgagggtgcctttaggaaggaacctcacccctaatgtaacttgagcaggtctttgctctaaactcttcgctgggaacataccctcccgtgggacttggcatggcacccacctctgcagagccacctgtgccacagaataacctcttctccctagacacactgtgtgtccttggttggattctctagatgggagggaccggctgaagcataactgtgtatgttcacatatgtgccttggaagagttttatacaggaaaggatttgtaaatcagaaaaatgaatgctggtatctaatttcctgtccccgttttaagtccagaccaagtcacctaacccctcgggcttgcagcccgcatcatccactgggtgattaccttgagttatctggttcagtccctttgctgtgggcaccctctttacctctacaagtaaactgcaattaatctgacagcaggggcaagggaactgacgagtcttgggtgcaaatcttgagatgctttggcacattatctaattcattgtttttcttttcttttttcttttcttttcttttttttttagacaggctggagtgcagtggcacgatcttggctcactgcaacctctgcctcctgggttcaagtgatttttgtgcctctagcctcctgagtagctgggattccaggtgtgtgccatcacgcccagctaatttttgtatttttagtagagacagggttttgccatgtaggtcaggctagtctagaagtctggccttaagtgatccaccctccttgggcagggtgccacctgcctgaaagaaaatgcccaccctagggaaaaagacacacacacacacacacacacacacacacacagagagagagagagagagagagagagagaccaacgtggcctctctaaataggtagtgggttaaccttcagaagcaaaggcagacaaaaaccacttgtgatacctgctgctgcgtagagccagccagcatatagattatgctttcttccttctgaaggaagactctaggattacaggagtgagcctggccccaattcaattcaatctttatgggcatcgaacaagggcattatttattacccatggtttacagaagtcaaacccaagtctcagagagggaagacattttttagtctcactgcgaaagtaacagagctagaatttagtctctgtcacgctaaatcgtgctacatgctccgtctagttcagagcctgtgtggaggtcgacactggagtccctcagttttcctcatcaggctcctggtctgattcttccaagatcagtctctttccctcagcggaagccagctgggaatcactggccttgtaacctcttcaggcgacctccttgggatgttcacaaggagcatagccatctggagaatgatactgttttttcctagggctgggatgggggtggtatccctcacatcattccagaaacagcgccagccctgcttttatcagcgggggccacaaagaggcgacaagccctgatcaaatgtgagcgagattgacaatctcagcactttccagggaaaggatgccgtcccacatggcttcaggcctccgaggaagccccatcctgagacagagagaccccaaatcacagtgtgtttccttttggccagagatgaggcttactcatctcagacagctgtgtccacggcatgttcctcaaggacagctgctccagatgaaaagaagagatgctcccagagccttgaggggctgctgataggaacccaaggcctcaccctggggctgtatcctgtggcttcaaaaatatatgtatttgaaagcttctagcaaaacagattacacaagaacgcaaatgtaagatccctttgggattctaactttttttcttaaggtgtttaaagaaaaatgacacccttaaaaagaaatgccatttgttttcaaagctgcagcaccagaggacatggaagagaaaggctgaagtgtccctgaaaatgagtgaagattccagtctgtttttactaatgtccaaaatcttaggtttattgcctttgcgttcctctgccccagggtctctgtgtggcaggcgagtgggtctcgttcgatggtgcagtcatcgtgtggcggaatgcatgctcacacagggaagttggttgagcgtctcctttgagcagtccttcctctggtgaggtgcacaggcgggcatcatgcccatttcatagatgaggaaactgaggctgagagggatgctgcaatttaggacttctgggtgatatcacagaagcctcattctcttttgtggcatgtaccttctctatttgggaagttaaattggactatggggattggaccaaggggtcttcttgcttccgctttctctaggccaaggctttgcagttatggaggaagaaagagctggggtctgtcttggcaaccctgtgactcttctcccctatcctcacctgccttctcacttgaccaacatattttaagggctccatgtacaaaggtggggctgtggccctttcccaaccagcaccttggccctgtaccctgatatgggatggttaaggcacacaggcttcatggatgggggcctacgaccgcagatggagcagaggtggacagggtatggtccggcaggtggaggtgctggagaaaagccgcgttaggcagcacgggagccaggtgcggggtctctcaaagcctcgagtccctggcagtgctgtgctctgtgaggactgcttttgactgcagggcactgacactcataccttttgcttctgcagctgaccatactccctggagccttctcccgaggtgcgcgggtgaccttggcacatacagccatcatgatggtactttaagtggaggctgaatcatctcccctttgagctgcttggcacgtggctcccttggtgttccccttttactgccaggacactgagatttggagaggtaagtggcttacctgaggccatgtgctaacagagaagatgaagagatgattgaaacaggcctaagaccagacctaagggtctgtacattttccacatactttccatatctttagaggcctgaccaaagcagatcttttcctttcttctaggtaagtccaaaggcacctgcctgctgggcccactgttttctaactttcctaactttctgatcccttggaggtgataatcaaatattctagtctgaggcattgggatacatggtgctaggttctgagactctgcgtcaggcctgaaccctgcattttgtggaggtgggtgggagaatgttcccctggggaacatgcctagacacgggggacaacagttgccctcatggggaggtacctgtttactcgctgttatgggaccgctttcacaaaaccactgcaggtgagtgagttcctgctgaatatcaggcctggtgtctctagactcattatttcccccacccaacccctatgttagttcatctcgagccacatttttattgccataatccaggcctggacaggccaagatcttttaacaattttaattactgaaaataataactgcattttttttaaagcccaacttttggtagagtcagcccaaaatacagtctttgtgttgccatctgggaactggatttggaattgttcttccatgagactgcagagcagaacggcagggccagaggtcccacgagctggtcagacccggttctgctccttgctggctgagtgaccttgggcattgtgattcatattctcatctgccttcaagtgtggttacgaatgctttttatcctgcttatcaatttctatgattgccataaaatattaacacaaatttagcatttatataacataatatattaatgcatagtttttttgtgggggggggcggtggaggggcagtgttgagacagagtcttgctctgtcacccaggctggagtgcatggtgtgatcctggcccactgaaccttgacctccagggctcaaggggtcctcccacctcagcctccagagtagctgggacttcaggcatgagctaccacacctggctaattttttgtattttttgtagagacgaggtctcactatcttgcccaggcaggcctggaactcctggactcaagcgatcctcccacctcggccttctaaagtgctgtgattacaggtgtgagccactatgtccggctcacgtccagttatctagggcagaggtcagacatggatctctccaggctaacatcaaggaacctgtaggctgccttccattctggagactgcaggggagagtctgttccttgctcattctggatgttggcagaatttgtttccttgaggttgtagggctgagatcccgttttcttgctggctgtccagatgcattgagcttctggaagcctcctcgctaggcttgtggcctcctctctccattttcaagtccagcaatggtgggtccagttccttttaggatttaaatcttttctccctctttcttttcacctctgtgatctcagctagaaaagattatctaattttaaggattcatgtgattggactggggccaccctgataatccagaataatccctacttcaaggtccttaggtttaatcacatctaggaagttctattgccatgggaggcaacatattcacaggttccaggaaattccgacatgggcatctctttgattggaatgaggggtggcaggtattctgacacagtacctcagaagggttgctgtgatgatgaagtgaatggagacacgtaaagcgcttaaaatattatgtagagccatgtgaatttggcagcattgaattgttgacctataaaaggtcaacttaatagtatctggtctatagtaaatcttcagtaaatgtttgctgtcattactctagtggtagaaatgtcatgctttatttagccagtttgctattgttgggcattactttttaaagagttattattttgttattatagtatatatgtgaacaccgtgatcatcatgcctttgcaaattttattctgatttagggcaatgcatgtctttccaggccacactcagtctcctgctctggtgccagtgtctctgtggcctgaggggcccctctttcttgcagagcccctcatccagcaccagctcagctctgggccatgtgtgtggggtgggacttttctcttttgggaagtgggccatgcctctccttcctgagaccatcccctttggcttcctcggggcccttggctctttgaaccagcctgcagggcaccacacctgtgggcccatttttgtcaggaaacgactcccttcccaagggcaccctgagtcccaggtccccaggcccacagatgttgggccctcagagtgtgatcccatgtccccagctctgtaactccctgcatgtggctcttaagactcacaagcccatgtttgccttggccagacactttcgcctgtcagttctgccagttgggaagtgtcatccccactgtgtgaatgtggaagggataatgaagaatttccacggcttgcctagggtcgttgagcaatgtggaagggatcatggagaatttccatggcttgcctaaggtcatcaagctggcatctcaacccaggttcatctgcctgtgatgacaggaaagaaatcaggtgtgattctgttcttgttgacccatagccacctctctcattaaggcttctcctgcaggcaactacacagccagtggtgggaaagcacctaatttacatcttcatgcattgaaactgatgtcactcacctctcccccttgacctggaagagcccctgaaggctgccataggggaaatgataacccattctacagctgctgaaactgaggcccagggagtgtccagagctttctgaggtccaccatgtactgttgaccaggatgagtgatagccacctggtgacaatgttgaaggttctcattcagtagagctgggttcaattctgacttgcctgaccagctggtgcctcattttgctctaagtattggagcctccagctttattttctttcagtgggaaagactgtgagattcagtccctccttgaagctgcgcatcgactctcctgtcctgggtactctttaggtagtggctgttctgaagtggctttggaaaccctggaatgaaactgtcatgtccaatgctgagatttgtataaactgtcattttaactgtgattattattccttaggatttgagaaataaaatctgaggagggagcaggacctgcctcagggcctcctctccaagttgagtgacccatcttcccaggtctccttttgttctgtcttgagcctctctcctgaggtcctgaaagaagagaatgtgctgttgtagggggcctggaaatgtcccatggaccatctcgtgactcagtaagatgatgtgtgtcctctggggacagaaggaggtcctgcacagagtgttcctgcccgttgatgccctccccagatcctaacgcgaagtctgacacatagtagcctcccggtaatcttaataagcaaaaggacacatttctcaagtgatcttagcaccatttcatgcaatcaattccagcccagccctttattctggccagccctggtgggtccattagctgcaaaaattagtcgtgctcagttttaatgcaaatgactaagtattactttattgaattgattaataaagaagctctctttgtatgatatcaagaccatgaagaaattgcaaagacataggtagggtctacagcagagtttctcagccttggcgctgttcatattttgggtcagatgatttgttgtgggggctgtcctatgtattgtaggatgttgctcggcatctctggcctctacccactggatgccagtagctctgtcagtcgcaaccccagcttccagttgggacaacctaaagtgtttccagacattgccacatgttcttttgtggtggtgttggtggtggtgcgtacatatgtgtgtgtaaaaatctccctttgttgagaaccactaatctagagaccacctaattagggctgacgtgggctcttccacagagccttctccttaaagacagataggttgatggacagttggatttagggaaaagaaaactgagttgagggtttaaagtgaatttcatccccaatgtggaagatgagcgttccgttcctggctgtaggatgtggagcatgttactccacatgtgggagaaaaaaatcatcccatctacttcaggacttttgtgtgattaaagaggcaagatagtctagtgcttttcattccatgcgcactcaataaaaaataggggttatatttatgaatagtaacaaaaagcctcttaaggaaaattattttgggcccttgttcaaggttcagttgaccatttatttttaaagagatgggggtggcccaggctggagtagagtggtgccatcctagttcactgcatcctcaaactcctgggctcaatcgatcctcctgcttcaacatcccaaagtgctagtattataggcatgagccattacacctggcccatttgactattttttctgcttgattgtagagaagggaatgtaagtcatgaagatctaaactataaaacctgcgtggcttagaggctgagcatggattgtgatttaaggaagccccaggttcaatttctggttctgccacttgctagccatggtgagaccttgcccagctttcatactttcaggttctttgtctgtaaaatgggaacaataagagtactgacctcaccgggctgttgtgctactggctgtgctgcctgaatgggccctcctttatttgaatccctctgccacagttgtcccattttttttttttttaaatggtgacccaagttccattatggacgatcaggcattcaggggaaggagggatccaaagcagagacaaaagcagccagccagctcatcccctctgcagctgataccgaggaggaggatgccagtgggaagaagcgtggccatatggctggcaggatgcctcactggtaacagtcagcccggcccctttgaagtggttttaagaccaatttggtaacttgatttggaaagtggtatcgatgactccgagggcgcaggctgctcattagctgctgtctgggcccggcaaattggtttaagtggaatgaaattggttccttccctccccgtgctcatggctgaggtccaggcccgattgtaatgggaacctctcctgggcaaaggacatagaaaagctttccggggagtctgaccctcttttttcatatgtgaattctactttcccctgggggtcaaggcaataggctgataaaacataaaaatgaacctgaagtgggtggggtgagtgtgtgtgtgggaagttggatcagaggagaatgaacaatgaacagtggccgagtgtttttcaagggccagttaaccattcccctgttgagacactgtgcttgatgcattttttttcttttctttctttcttttttattctcccatattacaaacactgctgggaggaacatccgcacatgctttcttggtcacttatgtgagagctcatccaggatttataccctgaggcgacttcactgccgtggaggctaaggaacattttctgtttcataagacgcgatcacattgccctccagaacaatcatgccagtttacactcccactgactgtacacaagagccctgttttcccccatctggtcacccacatttgataggtcagaattttgctttttgccagtctcatgggggtgatgccatttctggtagttcccctgattgccagggggatgagcagcctgccctcaactgccccatgctgaaggccctccaaaggcagcatgaatcctcacagttcccagcctgtgccctgacaacctaggaggacacgctggtctggtccattgcttatctgaaacgattccctttccctgttccttttgttgccttgagtgtcagttttggacctcccactgagcagttttttctgtcacgtagccatagacaggactgagttctttggaaaataatcacatcccactgttgttcccattcgttcattttttccttcaactaaccaacattattcagcactttactcagcacaggatgtggaaccgaaggcctggcttttgggacactcaccgtccccagtcagctctgtgtcctagggagagacccatgagctctctgggcctccttttgtttctctgtaataaaggactaaagctaccagcctcgctgcgggttggaaaaaagaaagagttagtgtaacacatgtgaatgtgtacgaaggggtttagagacagacaaaacattgcaccaaggcagggctcgctggagtgcagacccaggaaaaacactgcaggccaaattgcttctggtctgtcagggtaccagccacacatccaaggcagggaacttagggcgattggcctttctgctcatgcttactctcccaagcttgttgggttattatcatgcacaagccattcaatcgattgtattgggtgcctaatatatcagacactcttaggtgctagggatgtaagagcaagcaaaacagacatggttctgcccttgtgggctgtatagtctagtggaggaagggggaagaggttaagtatttgtaggaaggtgaaccccatgttaagaaagcatcttccatctttcaaatgtttccaagtagctggttattcatgatagcgaggaaatggtggtcatctccattgctctggtaactagtttgtgtctgagaaagtgctgatttccaagaaaaggaaagagaccacggatgaatgatagcaagactattaaacaggaatacaaagaagagctcacatttattgagcacctactatatgtgctggaccctcttgtaagagcttcatacaaattaggcagacaggcaatattattatccccatttgatctacaaggaaactgagtacaaagtgatagcttttctgcagagcttgtgcacaggggccaaagtttgggaacaatgcctttctttaatttgaaagtatctgttgttggtgtcacttgttggaattcctagaatcccagaaaagtaagtttaagttttcttctgccagcatcggtcagcctacctttgacccaaggtcacgactccctccctcctcccttcccttccctgctctgacattcttaccttgtttttgagttccttattccctagcttcctccaagcagcaggctctgggaacagtcccgttcatttatataacaaatatttattgaaatgcagacttgttgttttcataatacctgtgtacaagttaaacccgtggtcacttgttcatgtgcctcttgtttatgacaagaggtggtcccttgttgaaagcctgtcacatggcaggtactcagtcttttctttccttctaataagtaggtgagtattttccttggtttgcacacgaggaaatggaggctcagagagcttaggtagcttactcaaagccacacagctgggttaaatgggttcagcaccatgaaaatctgacctttaatgtctgcactcttattctctggcttattgggaaagaattggacagggatggtaaatggagttgatggaggcaaagagataattactgttgctcaaaggtggatcgagagagtttgggcaaaaacggaaccacgaacaagccgttgaaagtcccctcatcctggacctgtggtctgtcctttgtaactgctctttttttggcattccctctgtctcctctgcccatcccaatgccaggcacactgagcctgtagggatttacaaggtgggcctcaggtttctcccctcccaggtgggcataggaatcactgcttagcttagatttggcagaatgaaagagtcaggcagagtctcacccggccctgtttcttagctgctttgacacctggggcaggtttttggacctctctggacatggccagctgtgttgtgactgcccaccagaggctgggtctgtgaatggaagactgaagaaaaggcgatgatcacagtccagggacaaggtttctgaatcttgtgaaatagttacaaatactatgaaacaggaatacaaagaaaagctcacatttattaagcacttactttgtgctataccctcttgtaagagccttgtacaaattaggcagacagacaatattattatccccattttacctataaggaaactgagtgcaaagtgacagcttttctgcagagcctgtgcacaggggtcaaagtttgggaacacattgcctttctttaatctgaaactatctgctgttggtctcatttgttgaaattcctagaatcccagagaagtaagttttagctttcttctgccagccccggtcagcctgcctttgacccaaggccatagtaagttccagagtgacttcccgtctgttttattatccctgacaaagggatacagtattgtgcggtggctgtggatggcgtgtagtagtgttttccttctcttgaaaagcagctgctgagtggtggagcacagaggtattccctgagccccagcttgtgcccatggtaggtccagggcgtttgggggaaggagaccgactctaggtggtcccgtctggtttctcaggggagaaaattcatagatccatctcctagctgtcatccaattctgtgtagaaggggaaagccaaggttgccctcagattttgatcttggttcactctgatttctctatgccagactagtagagcttcagggaagcttggtgactatgactggatgaattctgtcccccttaaaaccataggttgaagtcctactcacccatacctcagaacgtgactgtgttcggaaatagggtctctagagaggtacagttaactgagctcacgtggcggggctccaatatggtcagactggtgggtgtccttatcagaagaagagattaagatgacaaaggaggagtgaagaccacgtgtagacacagggaggaggtggccatctacaagcccaggagagaggcctcagaagaaacaactctgaccacaccttgatcctggacttctggctttcagaattgtgaggaaataaacctctgttgtctgagcaacccagcctgtgaaaatttgttgtagcagccctggcggatcaatacagtgaccatgagcaagtcactcaccctctctgaacccccttggtctcagctctaaaaagaagcctgagaatttctgcctcacaggctgtggtaagaggcatcagaaatagccgactttcatcggaggctcactgcgagccagggcctgtttaagccttttccatgtctgaacacacttcatcttcatgtgtagcctttggctggggaggggagatactattgttcccattttacaggtgaggagagtggagcacagagctgttaattaacctgtcccatgttagtcagcaaggaaggggctggtccatatgtggaacttcgtagttgtactctggtgcccacacaccagatcactatgccgtcccagctgttgttacaataagactatgtaggtgaagggcccacccagtagtgcctggcctatgggacacattgaagaccagccccctgtgaccagaacctcccatttgctgcattgagtttggaatgtttgaactccaggagctgtgtgtgtgtgtgtgtgtgtgtgtgtgtgtgtgtgtgtgtgtgtatctgtctgtctccctctctctcctctctcccctaccttccttttcttccctcctgtttttgggagggagctcagcctcccttcactgccactgcccatcagcatcctctccctattcagccacccccaccccccatccctggtattaattgactttggctcctgtcctggagctcagcctggcacccagacctgccgtgctatactaacacctctcacatggttaaaccaatgggggtggcatttagcagatgacgctgaaacccgtgaatctgccctttctcactgggccctcactgctctagagtccccgcctcttttacgaagcggctgtcatggttgatgggtgagtgtcaggccccacccagggacagggaggcccagtgccggctgtggagttacccagaccttacggtaaaaacgcatcaccctgaatgggggccaggccaggcatcggcccaagccggccctgcccagcggctggattctgactcgctgtgccttagtcacaggccagagactcttctgcttccagctgaggctgtcccctgccttccctggcggcccgggttcctggaaaagctgtgtgccagaggacgggagtttccctccaacttaagccattagaaagctcatttattgagcacttactaagtgtcagagactgtgctaggcactttacatgaatcttctcatttaatccttttaataaacttccggggcacatgctcttctaatctcccttttactgatgatgcaggcttgacagtgggaatgctaaccgcagaaagcagctcacctcacttgggtgctactgtgtgccaagtcctggggttagcacccaatagccccgtggcggcatgctgttattactctccctgcataggagtgggaggctgagacctgggtgtttctgggtgtcccagctcctgtatgccatctgcctgtccagcccttagccacaaagctgttgtgccatgtggggagatgcggccagtttcccaggtgaggctggtcctgcttcaagcgtgggagctccaaccactgctccacgctgcctccactcctgaacctgaaggtggaggagtttcccactgtctcaaataagcaccggggcccaggggtcaccaggctcagatggaatttgcttaaaggactcttgggagaaaagctgattgggggatgggaagagacagctggcagtcacttaggagacagatgtgtcaccagaactaaagactgacctgggaggactgactttcacccaaaagggcctgggctgggaattctcctttatgtctccttccctcacactcaagattcaggtgctcacaaggagcaccttcgagtgaggaggtgtaggagggaggatggctaacagctcagtctgctcagcacttttacagtttataagccatttcacagacattatctcactccattgggcaatcatatgggaatgcaagccactgtcttttcttttcttttttccaaatggagtcctgctgtgtggcccaggctggagtgcagtggtatgatcttggctcactgcaacctccgcctcccggattcaagcaattatcctgcctcagcctcccaagtagctgagattacaggcatgtgccaccatgcctgggtaatttttgtattcttagtagagatggggtttcaccatgttggccagactggtctcgaactcttgacctcatgatccacctgcctcagcctcccaaagtgctgggattacaggcgtgagccaccataccctgtgcccctgtcttactgaagagggaaccgaggcttccttagagagggagaggaccctcctgggaaactttcatcccacctgctccttctaccccagtgcactgctggagctcaatattcctgaggcaaagctccctgcacagcagtgtccacagccgtgttgttgtcatacccgtgcactagcagagagctcaggggtagggccctgggtaggaaacccagggcaaggccagtgggtagagttgatgcaggcctcaggctgatcaaaaggaagacagcgtcacagcatggatctgacatctgagggacgtcagatcacagaaaggtcttgagattagagctgaatgaatacccctaggagaaactaaaaggcgtgtaacaaaggagtacaatatcaacagcaagcctcccccggtcattacatgcctagactgtgcctgaacctcacatttgtcattgcactggtccttggcactgtccttcaagggaagaactgtttgccctattttgcagactaagaaacacatccaggaagcagctgagctgggaattaagcccagggttgatcccaaagcctcccttctttccatgctgctctgctccttacaaaaacaaaaacagaattcctttttttttttttttaagatggagtctcactctgttgcccaggctggagtgcagtggcatgatctcggcttactgcaacctccaactcctgggttcaagcgattctcctgcctcagcctcccgagtagctgggattacaggtatatgccaccacgctcgactaatgtttgtgtttttagtagagacgaggttttaccacattggccaggctgctctcgaactcctgacctcgtgatctgcctgccttggcctcccaaagtgctgagattacagacgtgagccaccgcgcctggccaaaaaacagaattctttcaatgttgctctaggaaatttatttttaaaaaatgaatttccttctgcaatgcctggctcacgaccgattgtagatcaagaaacagatcttgggcctttgccacccaagcaggttcagaaagactgccctggcctccatgtgcccagggaggccagaggagcccacagtttcactgtctcagcagagctggaggaacctgttaaactgtctaagaagctaataaaaaaatcccagtgagatcatgtctgttaaagccctttgagctccctgagctctgaggctgtcttaacactcactgtctcattgcttactcagcacaaatttccccagggctgcaaagccccttccctgtttccagacccctggtttcctcactcatttcatttgatgcttcctttacatcttgaagatctgccatttttttctttaaacaccctattctagaaagaactggcatgttttgggtacctattttgtgctaagtcttttttctccattggctttatagtcatactttgaaacaaaatgtaatatgtgccctcattttccgatgaggcaacagaggcacagtctggggagctcagcaaggtctcatgttttagaatcacaagctgtgtctgcacctaggttgtgcctgcattttttttttttgagacggagtctcgctctgtggcccaggctggagtgcaaaggcgcgatctcagctcactgcaacctccacctcccaggttcacgccattctcctgcctcagcctcccaagtagctgggactacaggcgcccgccaccacgcctggctaattttttatgtttttagtagagacggggtttcaccatgttggccaggatggtctcgatctcctgccctcgtgatccgcccgccttggcctccgaaagtgctgggattacaggcgtgagccaccgcgtccggcccgtgcctgcatttttcaggtcattctctccagtaggcagaagcttctctgtccttcctcaatgggagaacaaggacctgtctggaatttggctctgaactgatggttatggcacattacttattcttgctttgaaggtcaggctgggcaatctctgtccttttgaattgtcctggagtatcttggccccgatctgctgggagatcaccctactgcaacctccctgtgcaggaatgcttttactggactctgcataaaatgaatgaacagatagatcttgatgttggagatatcagcctgtagattgcctgagaacctgactcaaaccccactcttgtctccatctgcaaaaatcaggctctttggaatacctttatcaggggatggccataaagattgttagaaaaataaattataatagctaacatttatttagtatttagtattatagtaacgtttatttagtatttagtatcagaaaccattctaaagtttgctctggtagcaacagcactatccacacccctcccaaattaaccatgagataaattgaacgggtaatttgcttccattttacagataaaaaagctgagactgaaactctaacttgcagaattgggctgaaacccagatctcctgagattagggaagacattcccttctccctactccaagaaatctgttgtgagctcatttctatgtggacttcctagatgactggaacattttttttcttcttttctttcctttcctcttcttttcttttgtttccttttcttttcttttgctacagctcacgtaggtgcctcgttcataatttctccttcccagtagaatcccaactacagaagatacatacataaatgcaaagcatggtctaggcaggttggctccaggactttggagaaaacgtgcacaaaacttgaaatactgatcatcttgaatatctcttaattactagcagtaaggcacaaccatatgcaaaaagaaaccaaaaccatggacttttgccactgcttgacattgctccaagaaaaaacttgcctttgagggtgaagttgacctccgttactcttaagtttccttatgtgcctcagaatgttatttgagaatcattctgagggatgacagaggcctgcaatacctatgtcttaactagaacagatgctttgtgatgaaattgtcttgttgtggttgtgtgactgctgtgactgagactcaacaagtacccacttttttttttttttttttttgagacagtctcactctgtcaccaggctagagtgcagtggcgccatctcggttcactgcaacctctgcttcccaggttcaagcgattttccggcctcagcctccccagtagctgggactacaggcacgcaccaccacccccagctaatttttgtatttttagtagagatggggtttcactatgttggccaggatggtctcgatctcttgaccttgtgatccacccgcctcggcctcccaacgtgctgggattacaggcatgagccactgcgccaggccaacaagtactcacttctacctgtgggtgtggttcagcgcccccagtgcctctcccaggtgggagttgcctgccttgagcaggtgaacaaactgaggcccagggagtggcttccccaaagtcatacagtgtagaagaaggattcgggcctctgagttcgtggattcctccatgaagcaatgactgagctgctgctctgcaactggtgctcggcttggtcctgggggtctgtgagctctgtaccatgggccagcgctttctgtgtgctgccacatttatcctttgcaccaccctacaagcctgtcctccaggtcctccatcctttattcaaaacatttaggatgaattatgtttgggagtttatcctgttttgagattttagaaacgcaatacagtacgcatatcatactatgtgttatgggctgaattgtgtctctgcaaattcacatgttgaagtcctagtgccaaggacctcagaatatgactggatttgaaggtagggcctttaaagaggtaattaagttagaattaggctattagggtgggccctaagccaactgggctagagtccctgtaagaagaggaaatttggacagagacaccaggatgcgcacacacagagggaaggccatgtgtggacacagtgaaaagacagccatctgcaagccaaagagaggcctcaggagacacccaactgccaacaccttcaacttgatcttctggcctccagaattatgagaaaataaatttctgttgttaaagccacccagtctatactccttttttatggcagccctagcagaccaatataccgtgtgtctggggcagtgcctctaaccaagcccaaaatttctacagggaaatatattaattttcatagtaagtgggataaataaaatccataaatagcttcatggtagttcaggtcaagatactaagtttccaacacacagtataagagttatgcccaagagtctgtaatcccctcccctcccctgccctcccctccccttcccgagacagtctctgtcgcccaggctggagtgcagtggtgcaatctcggcccactacaaccgccacctcccaagttcgagtgattctcatgtctcagcctcccgagtagctgggattacaggcacgttccaccataccctgctaatttttttttattttcagtaggaatgggattttttcatgttgcccaggctggtctcaaactcctagcctcaagtgatctgcccgcctcggcctcccaaagtgctgggttacaggcgtgaaccaccacacccggctgtaatatcatttctattctgcaaataaaaagccaagctccaagaggcttagtaatttgcccaagatgcccaattagtttctgcaagggctaaatttgtagctgggtagttggcctctaggcctttgaatttgcctgtcatactgtaccacctctttgacagagatagcctgggttagtgccctctcagagcttggggaggtagacaggtacatctacaactatagtatgtcacaatggagtgtgagaagggcatctgggacccaagctcaaggggaagagccttggctttggccccagcactcagctgttccaggttgagccttagtgcttgttccacaggaaggatggtgcagagccaggctggcagggctggggctggagctgaggctgagaggggcctgcccctcatccatccagcaccatcaaaggcctttccttggctggcaagaagggagctctgaacagtctgctctgtctttccatactgtgtagggacagatagggagctgttgcaggagaaagaactgccacctcttttccaggttccgtggtgaagggaagacacagctctgcagtttaattttttgttgttgttgtgttttttctgtttttgttttttgagacgaagtctcgctctgttgccaggctggagtgcagtggcgtgatctcggctcactgtaacctctgcctcctgagttcaagcgattctcctgcctcagcctcccgagtagctgaaactacaggcacgcgccaccacgcccagctaacttttgtatttttagtagagatggaatttcaccatgttgggcaggatggtctggatctcttgacctcgtgatccgcctaccttggcctcccaaagtgttgggattacaggcgtgagccactgcgccctgccagtttaatttttttgtaagtctcatgtttctctgcaaaacttgaaaacagggtctgcttcacacttgagctagagccctccttttagcagaagcttgttcttattttttcatttttattttatcttaagaatggcctgtcataggcctcattattatggtaggcactattattactattattatcatcatcactatcattatcactttttattctctctagtgattaaccagtcatcactggcctagcttgcatggtggtttaatgcttttcaaacaacttttcaaccaccatttacctctactttagctactagtaccatccctattttgcacatgtggaagtgtaggttcagagatgccaagtcacttgccccaggttgcacagcttggggatggcaggatccacactctgctcccgagcactaggaaaagcaccatgatagcctgtgacatgaagccctctacagactcaagtttcaggggtggttttaaacatgtcttctggctggacacggtggctcatgcctgtaattccagcactatgcgagaccgaggtgggcagatcacgaggtcaagagatcaagaccatcctggccaacatggtgaaaccccatctctattaaaaacacaaaaattagctgagtgtggtggtgcaagcctgtaccgtgcagctactcaggaggctgaggcaggagaatcacttgaacccaggaggtggaggttgcagtgagccgagattgcgccactgcactccagcctggtgacagagcgagactccgtctcaaaaaaaaaaaaaaaaaaaagaaaagaaaagaaaaaaaagtcttctgcaggccatgggggacatggtcttcattttataggtgaacagactgagatacaggaggagtcacttgcctagggccaaacagctcgttcctcttcaggccttcccggtcctgggagcgagtgtttctctttgccttgggaggctttgcagcttgtgctgcgcagctgatagcactgcaacccctgaacatgcacacacacacaaggtgcacacaggcatgcgcatggcggggaggtgtgggtgcactttccagcttccctgccgtgcctcgttctgcagggcaaggccgagaaacagcgggcagcctgtgtgatatggggacagacatgttctcagatcttggccatggtttctaattccctggcaccagaagccctgctgggtgatcaaagctgagtgcccctaacagaaagcagagaggcacatgggaatgacaggtggtgaggtgaagggaacacgggcgtggcatcaaacaggatggacagagtggttggttggctgatctaagtgtggaggaggttgtaaactattcatttaaatgaatatatttattcagcacctactataccaaccttagaaaacttcatactttctgtttttttctcttctttttttgtttttcttttcttttctttctttttttttgagacagagtctggctgtgtcgcccaggcaggagtgcagtggcgcgatatccactcactgcaacctccgcctcctgggttcaagtgattgtcctgcctcagccccccgagtaggtgagactacaggtgcacaccgccatgcccagttaattttttgtattttattggagctggggtttcaccgtgttgcccaggctggtctcgaactcctgagctcaggcatccgcctgctttggcctcccaaagtgctgggattacaggcatgagccaccatgcccggcccatgctttctgttttatttgatcccctttttggggaagacagggcaggttgaaaggtctgctttccaggggaggaaactgaggctcagagaggagaaagtcaggcgccagaggtagatgagagccaggatttgacccagtgatttaggattccaagtccaaggctcaaagtgtgacttgacagctgcaatctgggatctggatgtgtgccttctgtggctcggtgactccagaatttttccaacatctggttgtacggaataacaatagtagcacgaatgatcccatagctgacagccacgggagccatgtgccaggcctggttctaagcacatgtcatatttgaactcacagagtcctcctagctcactgtgaagtggatactatcgaaggggagtcttaagggtttcagtcagttgtcacggtcacagcaccaagatgggaacccagcaggtggcctgggtcctcatggtttgctgctgttctgtgctgccccttagcggggtggggtggggtggggtaggtgggctcaggcctgcagagcttctgtgtggctctaagggagaaagagcagaagggagatttgggatgtcttctgagtgctagccacgtgagtgcattttaccaagcgaactgatgactatcagtcccctgattgcttcctgtcttatgtttttatcttatccacgcatttagtgggcatttataaaggaattctggtattctaaatattctacactctggggatataaaagttaaaagacccaggctgggcgcggtggctcacgcctgtaatcccaacactttgggaggccaaggcgggcggattacgaggtcaagagatcgagatcagcctggccaacatggtgaaaacccatctctactaaaaatacaaaaattagctgcacgtggtggcacgtgcctatagtcccagctactcggtaggctaaggcaagagaatcgcttgaacccgggaggcagaggttgcagttagccgagatggcgccactctactccagcctggcaacagcgcgagactctgtctcaggaaaaaaaaaaaaaaaaaaaaaaaagacccagtgcctacccttaaaggagctcttcttattgaaactctttaaggaaaggaggcaggaaacagacatctttaatgggccagaggctgatttaggctgttcagacattgttaagctgctcagcatctgaagttcaaagaggctgagaacaaaccggttaggaaatggcagaagggggttgggacctaggtgagcagcccgtcaggagcccctgggtggcttgcactcctagccccaagtgcaatatacaggtgaggcgcctgcagaattttcattaggctgagttcatttctggaagcagggaattggcatccacttaaccatccctaatgcctgccttttcatgtatgtctgcacttacttctggccttccccggatgcagtatgtgattcctggaaggggtctcctgtacgtcgtagttttgtcatcttcaggcaacccaggatgacatgatttctggaaatttccctgatttctttctgcttcactctccctcttttgctagaagggatcggcttaggcagccattgtggtgttcattcaacatgtccagtacagcctgttactgcagtttccaagttggagggtccgtgagtctactcccttttttgaacagaggggtacatggggaagctgagcctctgatgaatgggttgatttgtcccaggtcacacagcttgagggtggcagaagccagatctcaggtcacagagtggctctcctccatttgcctccctggtcttgcctcctggaggcctgtagataggagacacccttcctggaaagacaacagcttggggacattacagataaggctgggcgggtgtgcctagctagcccagaataaaaggatcaccgagagaagttaggaatcgaccttccttgaggtgggttctgcagataaagatgcttttgaagttcagttggtgggagataggatctttgtggccttctggatggatgcaccacgatagggaaatcagcaagctgaagatagggaaagtgaacacttatcactgaaggcctctgcagggtttgctttgaggtacttccttcctgtcaaccctgttctggagtctgtctccatttttcagacacaaaaactgaggcatagataactgttttctgttttttgtggggagagagtattattgtttcaatttcctggacacttcaaaacatagggtatttctcattatgcaatagtttaattgagcacatactgcaggccaggcatggtgctgcatgcattctggaagtacaggaatgagttggaagtgctctttttccttagagattttttgttctcttgtgtgtgtgtttgggggtggggggggcgggcgggcacgaataggggaggaatttagatgagaaatcagataatcacagccaaggtgcctgcctggggacacagggtgccataggcacacagaagggcccagggtgtggacttagggtggtcaggggaaggaaggagtttgcccagagaagaggcaggagggagacaggaaaggtaagcagaggccagatcctagaaagaccattttgactttgtgctgagggcgatggtctcatgatgcagattttaagcagaggtgagagagggagagattagcatttcagaaagcatggcctctgccataggaagacaagatcagagggaggtccaagctggtggccagtggtgacggggcctgagctggaggagacagggatgcactggagacccaagagagaagtccctgaacgcggtgcacgaagagcctctggggttacaggaaggaaggggtaaaatgttcttttctgtgtccagcttaggccactgaatagattcggtgctgtgtgttgtactaggaaatgcggaggtgatggggattgtttgggctggagtctggaggggctgtgccccaccccaagctgggtgagcatctaaggtaagtgagggctgtgcccaagactgcatgagcaaatccaggttctcctaccagcaagctgccttgaagactctgaggctggaaatgtataaccttgtccgtaccactgagcacctgttacccatacacattactgttctccaaaccacggaacaacttgaaggattgttttgccagactaaaaagtgaagaaagcactggtttccttccatggtgttcctctttaaaccacaccttctcaaccttgtttagggagtggggatggccttcaggagctccagaggccccccctgcccgagtctgactcctggtttctggcttcaacaatgactaacctgtaacttcacattttggtctataaagtgggtagaaatgtagcacctctgcattctccaggtttgttgtgaggacgaaggagataatgaatgtagaatttttttttttgagacggagtctcgctctgtcgcctaggctggagtgcagtggcgcgatctcgcctcactgcaacctccgcctctggggttcaagcgattctcctgcctcagcctcccaagtagctgggcctgcaggggcactcccagctaatttttatattttcagtacagacggggtttcaccatgttggccaggatggtctcaatctcttgatctcgtgatccacctgccttggcctcccaaagtgctgggattacaggcgtgagccaccgctcccggccatgaatgtagaattctgagcccagggctggctcactgggagtgggccacacatttagggggttgttgttgtacacatgatcatcggtggcactgctttgcagcctaatggtttttgacacatgtgttccttcttaatccttaagccagcaccttgagttgggtgtgatcaactcattgaattttttaacttcagctgtgacattatagatcatctagctctgctgtgaccttattttgtagatgacagggctaggggttaccatccctcttaaggcctagggcctgggtgttctcacacccaggttgcggtttttgtccttgtcttctggaggttcgtctgcattttatttttttttgttgacgatttgttgacgaggctggagtgcgggggtgctatctcggctcactgcagcctctgcctcctgggttcaagtgattctgctgtctcagcctcccgagtagctgggattacaggggcacaccactgcacctggctaatttttgtatttttagtagagacggggtttcaccgtgttggccaggctggtctcaaacacctgacctcaggtgatcgcccacctcggcctcccaaagtgctgggattacaggcatgagcctccatgcctggcctcatctgcattttagggtccctgttttacaaaggagcagtccctattttacttgcagatgggcagtagtgtcagatcctcactggggtggtcagggaagaggaggtgtttggaagagggccccaatggacctctggcctgcgggattgagatcgggctggccagctctcctctctttcctcaacagagtctgggtctcaccctgcccagcagctttctcttcttcctagaagtgcccaagacaggatcttttcagttctgagatcttccacccctcgcacggcagccttcctgcccctgcccaggctgacttcacaccatgctctgttatcccaggtcctaggctcgcatcggccacttgccaccatgttggtgactgcctgccctctaccttggatggtgcggtccacggggcaggactggggtttgccatttgtgtgtccctggtgcttctctcagtgtctgacacctggtgagatttgccacctgtttggtgcatgggtgagtgtggttgtttacactagcgttgttattggaaatcactcaattcttgttctcacccactcctgcctcctctgagaaaaagtgtggcagaaaagttccctgaactactaacacagggggatttagcactcttagatatttttaacttttccatagaaaggcagcaccccccacccccctccaccctttttttgaagcagcagcatttacaaatattgaaaccaactttgtacatctccactctgacttctgggcctatttaataaatattcactcaaacatgtactatgtgtcaggcatgatttttggcacttgggaaacatcagggaatgatgtttggggaggaagctgatctagctggggcccaggtggggttggaatggaggaatggagtcctgccctaaatccagcatggcctttgtcctgcgtgccttgggacctggtcctggtggttccctccacttctctgattcttggtttgaatatatattgactgaagagttggaatagaaatatcttcgtattctgttttcagttctaggatcgtttattcgtccagtaacgtttgtcaggggttgaatgtcgagtggagaatggctgaatttgcactgtgagggaactcacagctggagggagatccccacagggactgcgaaggcttattgcagatgaaggagtgccatgacgacgatgacccccaggagcgtccttccaggacaagcagatgggttcagggaaggctgggcaaagaggggcaagtcagccatgcctggagaggagcagcatctgctgggagtcctgttttgacagttgtcattcccagatgttcggtggtgtgttccctgcagcaggcctgcatgcacctggatgtcagagtgggaggccattagctcactggttcagaaatagttcctggttatgcctgtcttgtggtggcccattctcagcttggcggatacagcagcgaccaaccgaagccaccagtgggagcagaactggaggatggaggtcctcggaagggttctagccacactgggcttcagaccctccagagtcaaagcctggcttccttctcctgctggaggcaaaggcccttattgtttttttgtggctgcagtaacaaatttcgacagatttggtagcttaaaacaacagaaatttattgtcttacagttctggaggccagaagtctgaaatcaaggtgtcagcgaggttgacaccctctgaggtgctaagggacaccctttccttgcctcttccagctgcttgtggcactggatgttgctcggcttgtggcagaatcattccaatctctgctcttgtctccacgtaccttctctatgtccgtctctcctcatgttttagggcctccaatgatctcatctcaagattattatttttaaacaactttatttaattttattattattttattgatttattttaagaatggggttttaccatgttccccttgcagctctcctactcttgagctcaagccattgtactgcctcagcctcccacagcatgggattacaggcgtgagcccccactcctatccaagattcttaacttcattacatcagcaaaagcccttttcccaaataaggtcataggcaccagattctaagggcaatatcttttttcggtgggtgaagacagcattcaacccacactagtaggccccagcacttctggggaaagccaaggtttagacctcatatccagatgctcttttctgtggttttgtcactttttcttatcttatatgagaaatatatacatattttaaaaaggtaattaaaattttgttgatataatttcactttcacattgagtaaaagctgcaagaagagtacaaagaactccctcatatactttacccaagttcaccaatgaaaaaatgttgccccctaagtgggtataatgtacacattttctcacagccagttggcagattcatcagagcctcaggctccccctacccctcacagcgtcagacagagagtttaccatggggctggacagttatgattggtttctcaggcagctgctcactctaaggcttgctgtaggctctggcgttacatctgtcactgggaatgtggcatcgtcctggcacagtcacagagaggccaaagacacagctctgttcaccccccatttaaagccaaatggccatcctgggtcctgggggacccttccttgttctctccactctgcccttggatgtgtcagttgcaggcacttcagatgcagtagagttatttagagaaggcggctccctgcaccgcctgctgccttttggtccattttgagctgggtgtccgagcctctgccctacatctaggaactaacagagtcaggtgttgggtgcagaacagagattggcaggagatgagcaggctgttcagagtccgccaggagctctgtgcttgaagctctgaagagcttccatcctaccttcctgatgatgcagactttaggtgagggggagaggcaaggaggttacaggatttaccttttggaaagactactttgatatgaatgcagaatcagggatggaaaaccagtgaaagagaatgtcacaataaatagtataattgaaagtccagttttagaggttttgccagaggcacatggagggggtagcttgcttggtttgcattaaattaaattgcattacttagagtccctataaatgctggtggatcaatgtagctgatggtttcataacaaaacaagaatgataataacagcgtctaagagaatgcaaacgttaatagtacagtgttgtttttgatcctgccactgtatggtattgaatttacctgggttatggagtctcataattgtaccaaaagctgtggaaagagtcagggagagtatttttgcccccattgtggggatgaggaagctagaggtgacctgaattgctgaggttcatgcacctagtaagtaacagagctgcacttggaccctgagtcttagaaaaaaccccacactagttcttttgctgatttctgagctatgcccatttctctcactatggaattgttttccactatacctctaggaagctaaactgggacataactggggcacaagatgggggatggagcttgcccctcttctcagcagccagataaggccttgggagcagtgaagagctttctgtaacctgaactgcctgacatccttgcccttagccacgtggggctgttgaacacttgacctggggctgtagcagctgagggactgcaatttttgtgtgaattaatttcaacagacttaaatttaaatagccctccctatgtagccagtggccaccccattggacagcatatgtcagcgctgtaaaagtcaagtgtgagccacaatgggacataggaaggacttttcaggaaaccatttgactgttgggattctcctttcatcttttaggggtatggtggggagtacctgctgacggggatattagaatgcctttctttttttcttcccttgatgtgccgagactccatgccccctgtcacgggtatcccagagctatggctagtgggtttgctggctgagatgggtcctgagccctaggcccctttgccccagaaaggaaaatcccgaggaggcagctgatgctagccctggaagactttaattcgagggtggcacacctgacaacgccttgggtaatgagtgtttgtttctggaggctcatgggacacccaccccagggctgattgcaggttggatgctgtttggtgagaatggatgcatacccacccgctgatgacaaagggacaggtcagaaggacagggcctttctttgaatggaaaacctgacccgggatctctcctggaagatgaagaatgaactgggcagtgaagtggggagaaggagaggttaacttctggggggcttagagaagaggggggaaggaggagaggagcctgggattagtcccacgaaggctgcgctcttgtttgcccaagtctcctcctgtgtgggacacaaagtgggcttgtaatacaatactggctcaaaggaagaaaaacggcagaggctagcactggggccaccctgagcaagtggtgtgttcatctgtgcatgttctggacagtaccacgaggtcagtaaatgcttctgcctggcatctaccacaaagctcattccagagggtgctctgtggccctgccaagaataaggcctcgtcaggaaaggctcaccctgtattttcccagcctactttgagccatctcctgaataaaggacagcttgcctgggcagtaccgctcctgccacaaagacggaaaggaaaagtatggcaagtgctttaagactccttttaatgtcagctttctacatccagataaggagaagagctcacgatggtcctgtaacttgccagacatctcacaggagattcattgctgagtctctgagcacacacaggctccctttacagactggaaaagtctttctggtcagtttgcctccactgacatttattgagcgcctgtagtatgtgcttggatgctgccttgagagggcgctttgggtttgaaggctccggaaacgtatgactttggagcactcattcctattcggtgctgacctttgttcacatttgtgctcagccaacaatcctgtgtaggagagtggagcctgacaaatgtttatggaaggtctgcctggctgactccatacacagattgcatagggttttccaaatggcagctggggagaagttctggatctgtcagaactgattgggagaacctgcaaaacaggcaggggtgtatacgtcccttttccaaagtgaccctcctgcctggcttttgggaacaggatctgtcctcgatggtccctcactaactgcctggcttcctaactgttgcaggtctggggatgtctgttgttaagacaccatgcatctggatgcctgttgagtgtagagtgctggctcagctgtagggtggggtgggatggggggtggtttgaaacctctttcaaaaataccattagggagacaccaagacagcactgacgtggatgcagaacgtaagtgctcttggagatgaggtcagcacatgaagcttctctgattttacagttgccaccagggacgcaggattatgttcctgttaactgaagacacaatgagaggcctggcttaggcaaaagctggccagtagggtgtatcagggaggccctaaaagggttagtacagtgggtgaattgtatcccctaaatagatatgttcaggtcctaacccctgtgcccttgaacgtgaccttagttggaaggatctttgagggcgtaataaagttatggtgaggtcatcttggggtatggtgagctcttaatccaatgaaggatgtttttctaagagaaaggacacgtggatacagacacactctgggaggaaggccatgtgatgatggaggtggagattagagggatacagcaccaagtcaagggaggccatggattcctggcagccaccagaagccaggagaggcaaggaagggtttcccctcagaggcttcacagacagcacggccctgctgtccccttgattttggacttgcagcctccagaacagtgagagaaaacatttctgttgtttcaagccacctattttgcgaccatttgtaccctgagaatctaatacagaagggaatctcatcctatcttgaggtgatggctttcctagactccatttagagcaaggaattgcatgtttataagcgaactttgacacttgcctctgctgatatggctgggaatcctctctttcattcttcattattaatgggtatttattatgtcataggacttgtcattaaatctgctgaaatctggtaatccaagcctccaacccatagtttgcatcaaccaggtggcgacccccaggctctgctggtttccattcctttatcttgattccattcctttatcttgattctccctggccgagagcttttctgacccacctaaaatctgttcatttcagaccccggcctttccaggatgccttttggagcccctgctggccaccacatatcatgttctgaagttctacagccctctgagttggacactgaccatctgggggctcgagtcatcctcagattggtatgcagccattcaaacattcctgtttgtttcctgtgagtcagcattgtgctgggcttccaaggaatctgcagtcctcttcactgcctcttcctgagtactcactgtgttccaggcttctctcagcccttcctgggtacagtgctaggaagtaaagagtcatatccactccagtaaatgattgctgagtggatgaatatagctattttcaccaccaagataaagatgggaaagtgagactcagaaataagaaacttgcctaaggtctacacagtttaccagtgcaagtgctgggattgaaccctggcctgtctgacatagaggccactattggcccaggacaaaagcttgtctgcagaggacagagcaggagcagcgctgtccatccagtctgggcgatattctttgcagtgggcccaggggtgataggaacttgttgcatggatgaagtggaacttttcttcccagaaaagaagacaagaagacagggctctgacacccatggtctccagcagccctttttgcctggagcaagtatgcccaacccccctttggctcttgaataagaaggaaaggccttaccatatgagcaggaattgtgcatccaggcatgtggcttactcacctttcctgctatgcctaaccttctcttctcctttctctgtctcctcagaccctcagggggcacacatttcagcataagctacagagttttgtccgcattcacattcctctccatctgccatgatttgttttttttttttttttttttttttttgagatagagtcttactctgtcacccaggctggagtgcagtggcgcaatctcagctcactgcaagctctgcctcccaggctcacgccattcacctgcctcagcctcccgagtagctgggactacaggcgcccgccaccatgcctggctaattttttttgtatttttaatagagatagggtttcaccgtgttagccaggatggtcttgatcttctggcctcgtgatccgcccgcctcggcctcccaaaatgctgggattacaggcatgagcaaccacgcccagccgacttgtttttttactagccgtcaatctccaaccctctgtcacagcctaacaggtgccagggggaagacttaggactggggtctcatcgttggttatgggcactttagggttaaataaagctatgtaagacacctccccaaaaaataaaaacaaaaactaaagaccaccaaagaaagtaggaaacctcaaaaaactgagaatcactattaccttaaagcccaagtgctctaggaggaggcaaaagaaaatgaaaacagagcaggttatgactcagctaactgatgtcatggctgttacatgtcccatctcatgtcatctaaatcaggggccagcaaactgacaggctatcagtttttgtaaataaaattgtattggcacatagccatgtcaattcttctatgtgctatcagtgctgcttaggtaccattataacagcagagtctggtcctgacagagaccctgtggcctgcaaaaagcctaaaatagtttctgtctaacccttaaagaaaaagattgccagccccggttctaaactgcacttctgatttctaactagtcggagctatttttttatggagggcagacagtttctcatttgctctgcatagcaggccttggcagccgagggccagggaggagcttgcccagatcatgcagccagtccctacacagctggcattcacctccaggtctgcctgaccctgaagcctgcaccctgatcccctgctcctctgcctccatcccctgctgggcctctgcaggagacggtccaggcccacactgcttagagaggtttccaagagtacatgatctgttagggattgtttgtgacagttagctttcaggtgagagctcttgagaagaccgcctatatctcttcccatgcaatagctccagccccctgccctgcactggcatagagcaggggcccaataatattttttgattaaaggaaggaatcaatgaagagggcagccctcaagccagggcactgcagtgtagcatagagcagcccagcctctggaacccatgccaggccacgagttccagtctgctatgaccttggacaaggtagactacctctctgggcctcgcttttctcatccgtaaaatggggataaggacagcatcaaccccaaatgcccactgtgaggttacaggagctactgcaggttgtgtgcatggaacattcttagcatatctgtcaccaccgggacagaaacgggctgttattatcgaggcttcaggctgtttactgaggattctttagaaatggagaaaggaagagtagaatgctggtcttcggacagtccggccaagtgagactgtcaggcagatgactgtggtgaagatggcccagcaagcccctcctctactcagatcgcccttggaaaagccagtctgagaattgctgtcctggtctcttcactggggctgggaaaggcaaggcatctggcctcagcctccctggacacctgctcctgaggagcctgcagattcctcaggaactactgctgcactccagtgttgggatggcagcagcaagaccttcaagctgcatgctggggcgaagttctgccccaggggcttgtgttcaccccaagactgtcagtgcgccacccatattggtcaggtgcttcccagtggcctccgtggggcaggccactccagccggccagctttcttgctttgcagaaagtcactgggctgagcagcaggcagggagttggggagccccttgccatttatttgctggtcactcacagggtgttcgatggtttcaattggagctgttgaactgtggcctaagtcaattatcactgggttgctcctgcttgagttagatgtgccccaacccagtggcacagtggaatcagctttaaaaatagctgtgcgttgggagaccgaggtggtcggatcacaaggtcaggagttcaagaccagcctgaccaacatggtgcaaccctgtctctactaaaaatacaaaatattagctgggtgtggtggcaggcacctgtaatcccagctactcaagaggctaaggcaggaggatcacttgaacccaggaggcagaggttgcagtaagccgagatcccgctattgcactctaccctgggcaacagtgcaagactctgtctcaaaaaaaataataataaataaatagaaatagctttgccagggttccgctcccagagaagctgatgacataattgctctgggaaggactggggcatctgtgcttcttgaagctcccaggtgatcctaatgtcagccaagtttgagctgtatattaaaaaaaatttttgattaaaacaaatttttagagagagagtctcattctgtcacacaggttggagtgcagtgatgtaatcatagctcactataacctcgaactactggcttcaagcaatcctcccgagtagctaggactacaggttcatgccacaatgtccagttaagtttttatatatgtatatattttttgtagagatggagttttgctatgttgcccaggctggtcttgaactccaagcaatcctcctgccttgacctcccaaagtgccaggattacaggtgtgggccaccatgcctggctgttcagctgcatttagtcatttacctgtgtgccctcccttgccatgtgtgcacacctggtacctgaagacctgggagacgaatcaatgacaggggtacataggaaataagaataatggagagagccaccagttagtgagccgcgactactgccaggagctacactaagtactcaccatgctgctaggaggaaagttctgaaatgtccccattttatggatgtgaatactgaggtcatgggggtaaaataacatgcccaaaggcacagagctggtactgttggagtcagaactagacttaggtcccctgtgattccaaagtgctacctttgccttggccacccctgcttggactttcagtgaggacaactgtgtgttgggattgtggtccacactggaaatcccaactaggtcccacctgatggaaaactaaagttcctcattacttctagtgccagtgtagaagctgacccaagttgcctttttgaaaaaaaaaaaaagaaggccaaacacggtggctcacacctgtaatcccagcactttgggagtctgaggtgggtggatcaacgaggtcaggagatcgagaccatcctggctaacatggtgaaaccccatctctactaaaaatacaaaaaaattagccgggcgtggtggtggatgcctgtagtcccagctactcgggaggctgaggcaggagaatggcgtgaacccgggaggaggagcttgcagtgagccgagatcgcaccactgcactccagcctggggacagagcgagactccgtctcagaaaaaaaaaaaaagaagacatagtttaggaaattcagtatttatttcttggcctctcagcagggctttatattttcgaagggtgggcacttaaattacacagattgggtttttctgttcctctttgaacactgggctgtgtgaggaggaggaggaagaagactgaatcttacagagctgagatgatcagatactgccggatgtgccatggggcctggagagctgacgttgctaatatatcaccccattggtgcctacagtttccattctctgattagagatcatatttctttgacttgatgctcaaatgcctctgagtttgatcctttctcatatcctgaattctatttccagttccccagagttttatcctaattttatccattattgaagttttcccaaaaaaagtcagcatcatcatcatcatcatcatcattattattaatttttcttttgagatggagtctcactctcacccaggctggagggcagtggcacaatcttgattcactgcaacctctttctctcgggttcaagcaattcacctgcttcagccacctgagtagctgggactacaggtgcgcactgctacacggctctaacttttgtattttttagtagagatggggttttaccgtgttggccaggctagtctcaaattcatgacctcaaatgatccacctgcctcggcctcccaaagtgctgggattacaggtgcgagccactgcacccagcccatcatcattattgatgtcatttattacacagcattgtatttccaaagaatagatacgggtgagaaaacaaaatcagtaactcttccttgactaatcagattgttttcagatatctgatatgttttgtctttacattaattaatgattttatatagtcataggtgtagggaatagtttgtagtcacttttttttaatcctaaagcggaaacatttttattataatatatcctaaacatttgatgtaccctaaatattttttcattttattaaagcagcttacaaatgatcatttttagagagtatataatgcttcatcaagtggacaagtcatattctaaatcagttctctgttgttaaaaattaaagtgcctagtagtttgccgttacacttctaagggtgccatgagcatcttcgtgcatataacctttttcttcttggaaaatcttttggacagattctcagcaggattattgagtcaaagggcacagttttatgactcttgtcccacattgccaaattactttcaaataaggttgtttatgctgcttccatcaacatgtggacatgccagtttcaccacaacctcatcaacactgggtattattagcttaaaaaaattatcattcaatggatgcagaatgatctcttgttagatttatatatttttttatccttagtgaggccaattttcttttttgcctctgtgtgtttaccaactctctttgggaatgctgacattggctgctcctccagccaagttcgttactttccatgtggatgccttcaagttgagccagttgcaacgcagccttgacttaaaatgagcgagcttcaacattgagcctttgtatgaaattcagcttagcacactggcccctgagtttgaaggctgagattgcaacaccctgctcttcacgtcgtggggttctgcatgaaatcactgaactggccttatggtctttatgacttcaaacttaacagttgtccccctagatttgtcttatgagctaggcagggtttttcttcagaaagctttgagatacagctccttcaactatttttcggtttcctagcttgaaaaacgaagagaagaaaagtccctgtgtgttcatgttgtctctttatttgtggggctgttgtgtttctagatggttttttctggttttctcttgctgcttcactcaccacatcctgtggagctggaggcttctctagccctgtttgtctctgcctgtctgacattgagtgcctggagccctccctagctctccagctggaaccttcctctgtaggaaggctgaggctagcagggagaagccaggatggattttaaagagccttgttgtctctaaggaagagtggagcttacatctttgggtttgcagaaatgcccacattcaactcagggggaataaaaggatgggagttagaatttcaacttgcagttgcagaatctcagagttaaaagaaacctcagaggtcatctcttccaacccttctccagagcagctttaattgcctgtgtgggagattcagggccagcagctgcagcttccctttccctgcctctgacttgccaggtgagtttagatgagttccttgctttcttgagtgtttattattattactaataaacaagaggatgaatatttgaagttcttctgctgtcttaaagccctcaaactccactggctactgaaatcttatatgcaagctttatacctgtaacttgttaaaggagagctgctttgataaaaatagggttatagtcctcctgctgaacctcccatctccacctggcccccagaagtcactcaggaggctctcttgaccccctagggatttgtggagtacagttggaaagggtggcactgtgacctatggttataataacaccggcacctacttattgaacattaaccaggcatcaggggcttggcacaggtcatgttcagttctgacagacactttgggggctctgtatccttatccccatatcatatatcaggtctgagcctcagggaggtgctcgttgctctgccacacagaggtcacacaggaaggaagtggtggagactcagttccagcccaggtagctcagcagcaaggcctgtctgcttcagctctgagctttactgcctctttgtgacttgtgaccttcaacctgacacacagcatcccagccttccctggagtttggttttttgagttgtcatcccacctgccatctctgacagccccagtatttagtgttttaggtgctcccagatccacgatgtgtagtaataggctaaaggcatcagtgttctctagaatacttcgtaccacttagcaaatagcctctgtgacgccactggttttgtgattttcccaagcaaactttactatccctttcttattgtcctcatcacttactcttgtttgcacaaagcccaggctctaatttattccccttgtccttaatcctctcatctctttctccaggtatcaccctcagaaataaggatgtgcagtaggtctggtgggcatctgaatgaggatggcccccagggtgtgtacatttcctggggggaaactgaagctggagtctgggcttctcaagtgtgggttctgcccctgaagctgttttctcacaatggaggctccaggtacttcctaagcccccatctgctgcaggagatacctgaagaaactgtggacagttcaaaggttggattatttaagaaatcttggctgggcatggtggttcacacctgtaatcccagcacttttgggaggctgaggtgggcggatcacttgagatcaggagttcgagaccagcctggccaacatggtgaaaccccatctctactaaaaatacaaaaaagttagcctggcatggtggcacatgcctgtaaccccagctactcgggaggctgaggctggagaatttcttggacccaggaggtggaggtttcagtgagccgagatcatgcctccacactccagcctcggcaacgaagccagactctgtgtcaaaaaaaagataccttgtatcagttctgacacttgcattactagctgtcacccaacaccttagttccataagcttgaaggcttcttatcactataggattaagtctgtaaaccgcagttgtaagttcggtgccttctgtcaactgttcatctcccctggttgcaggcatgttctcacccacgtccgtggtgatgggtgttaggtgacagcatgcttccccatgcattgctgggctatcctagtgacagtgttatatttaccccagcatctgatgagcagagcagagtcagggcttatgtgctaatgtcttgttgctcttctcttctcttgcatgcttacttccacactgtcacttctttcaagctgctgatcacaagttacgtcttacaggaagttctccatgagtagcttacttctctttctctttttttttaagagatagggtcttgctctgtcacccaggctggagtgcagtggtgcaatcatagtttactgcagcctcaaattcctgggctcaagcaatccttctgcctcagcctccctgagtagctgggattataggtgtgtaccaccatacctggctaatttaaaaaaaaatttttttttgtagagacagtatctcactatgttgcccaggctgatctcaaattcctggcttcaagtggtcctcctgctttggcctcccaatgcacattcctgagccaccacatccagccttagttgtcatgtttttgtttattattattatttattattattattattaaacggagtctcgctctgttgcccaggctggagtgcagaggcggcacaatttcggctcactacaacttctgcctcctgggttccagtgattctcctgcctcagcctcttgagtagctgggattacaggcacgtgccaccacacctggctaatttttttgtggttttagtagagatgaggtttcaccatattgtccaggctggtctagaactcgtgaaaacaggtgatttgccctccttagcctcccaaagtgctgggattacaggtgtgaatcaccgcacccggaccattattattataattttttttggagacaaggttttgctttgttgcctaggctggaatgcagtggcagaaacataactcagtgtattcttgaactcctagacttaagctgccttgctaatgtatttacgtgtgtgtctgtgtttgtaggtctcactatgttgcccaggctgatctcaaactcctggcctcaagtgacccttccgccttggcggttgccatttttagcattattgttatttggacattgtgattaatactttacacaaatgacacaatttaacctgtaccaaataatcatctttcatttattgtctaacaataaactcaaccaaatgtgtaagttcatctatctatttgtccatctggtcatcatctaatcacccaacagaagttttaccaaactccttttttatattaggtgctaggtgaacaaagttgaagaaaatgggtctctaactcaatgagctgggattcatccacgcattcaaacgatcacaagtgtttgcacactgctcactacccttgcttgttgatgccagccttgagtccaggctttccatccttgtcagcaaggtgttcccacaaagtagctcccatttgctatgatatgtttgcccttctggtcctggaaccttcatcttggtgacacaaggcctgagcatctgtcatataaacctttgcgatgcaggctgtgttctctaggaaacagacgctaagatgtagattagcaagtaggatgtttattatgggattcctttgggatcaacagctgtgaaactgaaggagaagaaaccatagttgggcagagggagaagtggagctgtaacaatgtcccaacaaaggccaatgccagaggagcctgggagctagactgatccttcagaattgtcctgaattgaggtgagggttgatcagtcatttcatgtgcccccgaccccaccacccaaaggatgcctaatcttgaacaaggtgattgtattcggccaaggcagttcccagagagggctgatagctgatggtcatctgccagcactttagtaactgctttagaagaagcctggatggagaaacatctgctttgtttttttgttgtggtggtggtttgttttcagtgaaagggtcttgctctgtcacccaggttggagtgtattggcatgatcatagcccactacagccttgatctcctgggctcaggcgatccttccacctcagcctcccaagtagttagacctacaggtccataccacagcatccggctaatttttaaaatatttttgtagagatggggtctcactgtgctccccaggctggtcttgagctcctggcattaagcgatcttcctgcctcgacctcctgaagcgctgggattataggtgtgaaccactgtgcctggccaaatatctgctttgcttaccattttatccccagtatctagtacataaaagcacacagtattggggggaatggaattacctaagctttacggaagcactgtgagtaattcatttagcaaatatgtatatctattatgttcctatgacatgtcagtcacgattactacccttacggaggttatagtctagggggtttgggctgagcggtggctcaacactgacttcctggaagaggcaacctgcatactgggggcgtgacttcctggacgatgggctctgggccagcgttgggctcagtgtttcctgggttccctagaaggtggcttattgagctggagacttgaatggatatgggatgttttctcagggagggggctctctgttgcagcccacctctgggcgcacctgtccaccataggaaattccctgcttcacttaccttcattgacgtttgaactcccaggagcctggaacttccccaggtgccccattggcttggtgactttacatcattacatcagttgagtaattgaagaatggaggaaccattcttttgagctaagtggaaaaatatattttctcctctgtgagtcaccaaaaactacagcttcttttttttttttttttttttgtttgagacagagtctcgctctgttgcccaggatatagtgcagtggtgcaatcttggttcactgcaattttcaccccctgggttcaagtgattccttgcctcagcctcttgagtaggtgggattacgggcatccaccacaacacccagctaatttttgtatttttagtagagatggggtttcaccatgttggccaggctggtcttgaacttcagacctcaagagatccactgccttgtcctctcaaagtgctgggattatagacgtgagctaccgcgcccaggcttagagcccagcttatacccagttacttagcttctgtgtgtgtgtgtgtttgtaaatgaactattatatttcaggaagttcctagcagggaggatgagatggaatcagtgaattttagatctcaaggagaactagagattgcttggtccaacctctttcctctgcaagagggcccttgtggggaagggactggccaaggctacccaaagagcttggagagaggtgcagggcatgtgaccatgtgcaaagcatttgccagtagagttcggcattttttcctggcgcgttcacctcctgacagggcaccaggaaggtgctgcacagcctggcatgtggtgggtggtgtttatctgcacaagtcacccaagtgatcagaacgcttttacggaaaacaatggctttgatgttctgggtgacaagaccaaagcatgctggcgggaagggaggtttttggggttagagaaatgaaaactatttacatttagggctgacttaataacttaacacctctgaagtgggaggatgtttttgagggaaagttgaatgtaagtgtagtacaaaaaggaaagtttgaggtagaagactaggagtggaaatacttctaatggctcagggaaaacgtcctggtaaggttgaacttccagatgcctcctttcttcccacacccccactgcatcctctgtttctacggtgagatttgcatggcactttacagtttccaaagcatttcctcacatattatcttcttcagtcctcccaggaggtggtgccaccaaaggctgtctgaccacacctgcggcttttggagggagcttggcttggaacccagggttctctgagtcaaaatccttttttcctgggacagtggtggtcctcacattcccttcaagactatagactttagaagcccagtctctggcgctagacttccttccttcacctaccaggcttctccctctgcagaggtcttgggcgccttttgtgaccattctgtgacgtggtttcttgaaatgtaagatggggataatgtgagcacctacccaccttcttgggttgttgtagggatgaaaacatcttcacagttcctggcacctattggagttggataacgatgttaggattacttgaggctggctttcctaccttgttttaacagcagctctagagtttcagaaacataaggactggacttttggtgatcaaatctaaacactctccagtaaaatcagtgatgctgctgactctgagtctttaatcattctagtctcttcaccctctgaaaacaagaggatgtgtagcatagtgagcaacagctgtgtgccggggactcagcattaagtagcatgggattactcatgacttcgcactcatggcagcctcacaggtaactttgtcaatttctttttttccttttatattaaaaaaacaaaatggctgggttcagtggctcatgcctgtgatctcagcactttgggaggcaggggagggaggatggcttgagctcaagagttccagaccagcctgggcaacacagtgagactctgcctctacaaaaataattaattaattaattaattaattaataaaataaatgaatcaattaaaagaattaagaaaaacaaaacaaaactttttgaatcagtaaagcatttacaagacacaaaatccaaaaggtatacaaagttttccaatgaagactgccaaccctcatgtccccagacccctgtttctcctccctgggacacagttgttgcaggtttcttgctccttcttcctgaaagagtctgtgcattattgaaaagaagatgtgtgtccatgagtacatctacagacgagtgttgagcacctgttgtgcacagtggtgggggcagtgtgatgggagtacacagggcagggagacacgggtctgggctcccctgaagtttgcagccgtattaagggctcggccttacagtgcgtggggcctcggcttcagaggaagggctgatcttggggctggctgctgcttgacttggagtacctgcctccctctggcctcctgttgaggcagcctggggtcaaatcccagctcacctatgtgccaggctgctggatggctcggatgtggcctaattatttcctgatggccctgccagcctggccatgggctgtaggaacagtagtagccatccatttttctttcttcttcttggacggaggtggtggttcaaatgaaatttcagccttaccctttgtagttttctacgtaataaatcctaacatctgtgattaaggtgacataggtttttttgagaaaggctttgatttcttgcttgcatggatggttaatactccaggctcttcagggtgattctcgccctcttgttctgtagcttgtggtccttatttattttaatataatttaaaacttgcagaaaaaaattatgaacatatgaagaactactgcacacccagatcatcagttgttaactcacactccaccccaccaccaaatacgctattttttcctgatccatttgagtaagttgtagacatgccctttcatccctaaatattcagtgtgtgctccccaaggataacgacattcttttacataacgactgtataattatcaaactcaggaaatttagcattgctgcaattgtattatccaatcctcaggccacacacaatttgatcagtagtcccaataatgtcccttttgactattttttcccaattatggatcattattgcatttagtggctgtgtctcatgttccccagtcatacttgactttgattttttttttttttttttttgatatagagtctcactctgtggtccaggctgaagtacagtggcatgatcccaggtcactgcaacccccacctcccgggttcaagtgatcctcctgcctcagcctcccgagtagctggtattacaggcgtgtgccacaaagcctggctaagttttgtatttttagtagagacggggtttcaccatgttggccaggttggtctcgaactcctgacctcaagtgatccactcactttggcctttcaacgtgctgggattacaggcgagagtcaccgcacccggacgactctgacatttttgaagagtccaggtaagttgttttatagaaacactcctcagtttgggttgagactgttatttttgaaagctcatactgcaccacttgctttaattctgtaatcctcaatggtcccctatggctgctgatcacgtccgcgtctctgtagataagaaaacggagccatcgggaagtagagtggtttgtcaatagtcacattcccagcaagtggcagagctaggattcaaatccagactatctgtcctgaaacctaatttgcctaccaggcaacaggaataaggacaacaattagaccctgagaataacaaagtgtttatcaagcacccactctgagccagaggttgtgttgagcactctgcagacactgcagtacaatactcccatccatcccaccccagtccaggagcagctgttttatgttgttgttgttttgagacagagttttgctctgtcgcccaggctggagtgctgtggtacaatctcagctcactgcaacctctgcctcccaggttcaaacaattctcctgcctcagccacccaagcagttgggattacaggcatacgccaccatgcccagctaatttttgtatttttagtggagacaggggtctcgccatgttggccaggctggtttctttcttttcttttctttctttctttctttctttctttctttctttctttctttctttctttctttctttctttctttctttctttctttctttctctttctctttctttctttctttccccttccttccttccttcctccctccttccttcctttctttctttctctttccttccttccttccttccttccttccttccttccttcctttccttctttttttttttgacagattctcactctgtcgccgaggctggagtgtagtggcgtgatctcggctcactgtaacctctgctgcctagcttcaagtgattctcctgcctcaactccccgagtagctgggattacaggtgcctgccactgcccctggctaatttttgtagttttagcagagacagggtttcaccatcttggccaggctggttttgaactcctgacctcatgatcctcccctctcggcctcccaaagtgttgggattacaggcgtgagccaccgcgcccagccttccaggctggtttcaatcttctggcctcaaacgatcttcctgcctaagcctcccaaagagctgggattacaggtgtgagccactgtgcccggctgagtagctgctttttttttttttttaatcctcgatttacagatgaagaccagagaagctaggctgacttcccatgttgacacagcaactaactggtggggatcagctcagagctgggcagactatgcacttcccaccctgccctgcaccccatgctcggcttgctggatttgatagaatctagcaagcgtgggggccaggctctgctgactccctgtgagaagcagtgtctgtttctgtgtccttttctggggccttctccagagggaaggaacatatcccaaagctggagcttgcactcaggagcttcccaggggaaactgctccactctctgccatctacagctcttgcaggtaccatagtctacctccatgatctatttgcagtgggcgatggtgttttgatgatttccacatcatgaacccaagtgctgttgctgatttcgaagcttgttcactgtctcctgccaagtggccaagggctcctaccctagcccttggtggctgctcctggctgccatctgcccacccagttggccccactgcctgggccacgttctggtggcatccaagaactggtagcagagatggtgattagtcaatgtgtgttataccctgggtctctccatctttccaacagagacctgccttacatgtaggactgcctccccttgttcaggttacctagcccttgtgcaattcaccttctgattggagaaggaagacaatacggccctgcctctcggcctgtagagaggaatggatgatgtgaaactgtggcatgcttgatattctgctggcagagaggagaacagatgttaacacagagcacacctctgccccgaacctcctgggagccttggaggtcctgagtcagcctgtccttggcactcaggctcttcagacgtcaaagcacagcgttgggcccagcatgaccttctgcggtcccaggagacatcagggaagtgttgtcagtgtccttagaaagcccatggcttgctcggccacatcaggtgcagggacctcagtcaaccacacagcaggtagatatccttgagaactgtgtcaggtgggaggatagccagagggtctgggggcagccacctgacccttcagtcccaggatctagcacctcccatcagaccttcctcttcactccctgtttctcccaccaattattggcattggcatatttctgagcaagttctctccttgtggcctgtcactctgtgggtgggaagtgaccccctgctgagcaggttcagtgttttgaggtggggctatgaccttctgctttgcaccgggctctaaacaccctggcctgcccaggattctttgcagctcctgggagaagcttagaaattttaatttccttaatttccatggaacattgctttgtgtgtgtggctaaaaacattaattaaaaacattaatcagtttggctgccttggaaagaggttcttttttctgcaggagccaacgtgctgggttattgcaaccccatctccccagccccttacaaggaggaggggacaggacatcagcttgcaaaccaacacttcagccctgtatttgtggatttgtctcttggtgtcaggcagactccttagctcctctgaactttagtttccacatctgtaaaatgggaagaaaggttatgtgtctcctgatttcttggggactctgtgtgtgttcagtgaggtgccaggaggacagtccttagtgaaatgtcctctacagaatttgctagtaaaggcgctgttgttataattagctggatttccctggtagtttacagactgcctcttctgcgcactgtctcatttaatcctgtcagcgcacctggcagacgggtagtgtttgaatccactctttttcacagatgagtacactggaaagggagggttacagccaggcctggagctgagaacctttgatggaagccccaggctttggcccaatctcattgccttcatttgctcccttggccccatgtgctgagtccctacactaagttacagtggtgagatagaaagaggggaggccttttcatttcctcctgggaggagaggaagaagttaagtctctagcatttgcctaagtagtgctaataaaagctgacatttctatgggcttataatatccagagacaagtgctaaactctgcaaagattctcacttaacaccaggaacaagcctctaagatgagaaactgaggctcagagagctcaagtttgagtacttgttcagggtcctaaaaagcctctttaagtagtagaactgggacaccaacccaggaagcctgagaagagcccaccgtcaaccaagaggctgtgcctctgccctttttgggtaacgaagcaaattcattttgacaataaggctaaaagtgctttcctggtcacaatgcctgaggcgtgtgggaggctgctcactggggagcccagaggcgctgaggacagcatctttctgcgtgcctagctagtcaaggggacttttcagagtaagggggaattcactctgtgctgctgggaactggactctgagtgcaggatgcgttaagcctgcactgaatgggaggaggcgaggactctgaggcttgcagaaccactgcagatctgtccgtgataccaacacatctaaggaaggaatatgacaaccagagtgcctcagagaagacaattatggccaagttgttccttggggagagatgaggaaatcaaagtggggaatacaagccacctgcccgccgttcttgcctgtggggcaaggatgtttcaccagctattccagagttgagagcaaattccccttcagaacttttcagcgttctttattctgagtttgtgctgactaagcttcatgtcattcatgatttggctgccagtgaggatggtgggggggcctgaaaagggaaaagggcaccgtactgtaaatgtatgaatggggttttctgtgggggccacaccggagcatcacagttctttgaaggacaggagagaaggtcagtgcctggatccccaggctaagtaccaggcgctgctttaggatagcctagaagggtggcccctgggcctcattctccacactgtcccaccccttttgaccacctcatctagccatcttgatgatcagttaagataagaatctctagtgaggctacatttttttgtttcctgaataatgcatgatgtccactgaacacatgttactagatgacagtgttgggctcagataaaacttacaacaaaattaatctgatgcagcctccatggctcacatgatccccaccatgtatgaaatgggctgggcacccagggacaggctattctcagaatggggttattgggtgtgtttcttattcctctctacctagtattcttggaagaaggtgaatgaaaatgctctagtaggggagggaaacatgattaatgggtgggggcttatgagtcagaaagacccaaccatcacttctgccctgactgcctgtgtgacttcagaaatgggggatatcaaagcctatctcataggattaaacagtttaatgtgtataaaatgcctaacacagtgcttgccacataagcattgctcattaaatgtcttctcttcttgtgctcctcattcagtgtatagtaaatgtgcagtccttatcttttaaatgaatgaaacatctcattaccaaatctattcaaggtaaacattgatattaatatgtatcctttttgtgtgtttctagaatcctgttacacctgggatttaggcactttcaatctgaaaaaatacatatcctttcagcactctggacggacttgagaactgtccttacgtgacctaaagctggagtattttgagattggagaattaaggtaagcgactttatcttcctgatccttgtgaaaccaaaaatagcttttggagttgacgacctcctgcagcacagcttgggttgtggttcttgacctctcggtgtgtcttcctgtgccgctccaatgtgttcgggaagctggctccccataacctctccccgacctggttctcagagtctagtccacttattcattgtgcctaggaagctctccctctgtccctagtggagggaggagcccaccatctcctagtgaatgcgccacttgtagcagaaggtgcaggatgctccagctgtcttgtgaaaacatgtggagacagccttggggaaaagaggaaaaggtgaggtgagggttatataatcagattgaaacacctttgggacatccagaacatgagctcttcctcctttcccagccaatccgtgcttcctcctttcacctccttgaattctatgctccttccacactaaggctgagggtgcaggaggtaaagggttagaggttaagactgagtgcttcaggtagacttgggttttcttggttttgctacttgcctcattttggacaagtcactcagcctctcaaagccttggtctcctcattagtaaaatagggatggtattagtgcctgcctcatgaagatgttgtttgtgttgagtgagatattggagcaaaacagcttagcaggctgccttgcactgaggaagaaatgctccaaaagggaagagagtttttgcaaattattcctcaattatgccatttagaattccttccatgtatcaggctattttgaagtctttcatttgctgtccccccagcctttcacctatcaccaagtcagcctgggaaacagctgagaatcaccttcccagttgtgcccagccccttacccaaagcagagttgattcccccctcccctggacggcagcgggctagtgaaggcatgtctccactataccatggctactgcactgggttgaaatgtcccttgccccttcccctgcccattccccctattgctggtgaaattgcttagagcaaggactgtcttacacatcacaggatctggcatagtgcctgaccgagggtgaaacaacaaatgaatgagtaattgaaaggagagagaaaaagagatagagaagtaaccaaaagaagaaagtttttaaaggttcagaggaaagaatgaggtcagttgcaattttttttaagtaagatgttggaaagaataaatgacatgatgaaaaggaaactgacatgattcctatcatgaatttgaaagctatgcaagggtggaaaggtgggtgagaagctgtggactggtgagaagacagagaagtcagaactgagagcatagcagagaactgtacttctgttgtgctacatatgtcatcttcatcttttgtattgtgccttaaattttcaaaagcgcatttgcgtttcaaatctgctgtgatagtcagcattcctgtggcatgcagaggtgaagagcatgaggccttgcccttcagtcaaggtggggatactggcacacataggatactacatactccctaggtgtctgtgaggatggtggaggggattttctccatgccgggaggcttcctggagcaggtgctgcctctcgtgactcttgaaagatgcttgtgaataaagcatactgggagctgagctgctgtttagtaattaaaaatcctttccattgtttagagctcagcacctttgtgcattcatattacgcattcattttcgtatcattgttgaatttctcacttctgctactgcaatgtatgtctacagctgacaagtcttccttgggagccctacgtagctcttttttttcttttctttcttttttttttttttttttttgagacggaatcttgctctgtcacccaggctggagtgcagtggcgcaatctcggctcactgtaagctccacctcccgggttcacgccattctcctgcctcagcctcttgagtagctgggactacaggtgcccaccaccacgcctggctacttttttttgtatttttattagagacggggtttcactgtgttagccaggatagtcttgatctcctgaccttgtgatctgcccgccttggcctcgtagctctttttgaccctcagggacagtcactgaattatgtcttgggagcccatgcttctgaggcaggcttagggagcaggagagcatacaggtgtagcagcctttccagctgatccccatgccctgctgcacctggagggctggaacaagctattctcatattggggaaaagggctgatgggacctcagtcatgtggcagagaatctgaaagccagaagcttggcaggtctgtctcggggtggggtgacggagagacatttccctagaattcagctgctgggagcagaaagacagagcaggggcaagtgctgggtttctgaggcccgcagtcctgagcatggcctcaggcagtctgttctatgacagaacctgaagaaaggcccaggcatttgcatctatgtgtgcagttctacttgtcctaaaggcacttctcacactgggagcctgcctgtctgtacctgtctagaaatcagcctggctgggacgcacaccaataggagggcatcctcacctttcccacccatgagtcgggactgttgcctgctgtgcagcaaaggcaccaggaacacggagtcagacacttagggtctaccccaggctccacttcccactgcctatttgactctgggcaagtcttttacagcttttcaaacttctctctttcttaaaacaaaaaaaaaaaaaaaggaaaaaaatttcttgccaggcacagtggctcacgcctgtaattccagcattttgggaggctgaggtgggctaatcacttgaggccaggagttcgagaccagcctggccaacatggtgaaaccctgtctctattaaaaatacaaagattagccaggcatggtggcacacgcctgtaatcctagctacttgggaggcttaggcacaagagtcacttgaaactgggaggcagagttgtagttagccaagattgtgccactgcactccagcctgggcaacagagcaagactctgtctcaaaacacacgtacaaatttttttcttttatttttttaaagacagggtcttagctatgtggcccaggctggcctccaatccctgggcttaagcaatcctcccacctcagtctcctgagtagctagtactataggcacacaccacacacccagccagacttcaattttcccagccacatcatggaccagaagccacttggtctggttgtgaggatgacggaaccttgcccgaggaaatgggcaatgaacaggagcctgtttgtttctccttccagctcctgacctgtctagctcctgaccctctcagtgtcattcttgctcacccctggccctgctccctggatatgcagacaggatgggcttcttccctttagaccttcactttgctcttttggactcctcttctggccttgccttcccctggtgtcatctgctggctccctgcctgatactgccacactggtcatgctggcctcctggcctttggtgacaccgcatcagcaggctcctgcttccctgtcaagggatacaagccagcaccggtctttcgccacaaggtatgtgtgtaaagattgcttcctgtacttggtgtccacaggattttaaagaactcctggcccactcggaactctacgcttgaaacagaaacatcttctcaaaacacctctggtattggcccatttctctattactgtttcttgtggtttcatactgaggtttttggtgcattgcaattgccctggagtttatttttagtaataaagacagagttcaattaatgtcaaaacatgagggtaattgcagaggaaggattagtaagtctaggggaaaatgtgcccaactttttttcttctgataacatctttcactgatcatacaccgtcacacccacagacacggagcttcctccgtgatgtctgcaatgcactaggcccagtcggggagcagtggctgcgccaccacctgaaaacgaaagcatttctgagtctctttcagtccagctcatctagcagccagccacacaggtgaccacccaccgtagctgtcactatgggtgatgattatcattatggttttgaggaaaggctgggctttagaatagtcaattcttatcctctctccggggggatttattctgtctccagaagcagcatttcactttcctgaacatcagctcttctcccctggattgcagggtctaggtcttgttctctgtctgcttccagcttttggcattttgacagcacataggacatgcttggagaacgttttcttgagttaactgaattcaggacactgacttggggctggaaaggcaaagtgaggaagaaagtattcccctttcagaagctccccagtctgccttaagaaacaaaggcagccctgtcatctgcccaggactttacagtttataaagtgatttctcatcctttctcctttcttgtattgcacaaatatcgaacgagaacctgcagtgtgccactgtgcagggtgcctagaataaaggagaaaagccactgtgctttctctgaaggaatcacagggagtgaagctagcttcatggatgccagaatttcacagatgaagggactggaggcttggagcaattgcattgcttgagatcccccctgctcatggatggtggctcccaaatcaggacatgagtcttctgaatcccttaaacctgccctgtgcctgcctgttctcccagcacattctctgtactctcttgtgctgctcctcaccccctctccaactgtctctccttctccaccattgtcctctgcccactcctagtcccttctttcagctctgtttcttctgaaaatgaggatctttctctctacagtgcctcttgtgggacgggttctgctgatgggggctgtgtttgggatctcgcctggaaacacgatctctccaactttccctgggagcagagccttgggtctcactgaacccacctccccagcaccttgtgtggtgactggcaggaggtagccattccctcctgtcctctctgcccttgtccactttcctgttatgagtcagttgctgagataggctatgaggagttaacagagtggataaaaaagagctttgtccttctttaaagccttcaaaatatacagatgtattagtcagggctttccagagaaacaggaccaatagaacatgaagatagatgcgtatccatgtctatatcaatatctaccttgatatttatatctatatctaggagatttatttattataaggtattggctcatgcaattatggacccagaggggtcctgtgatttgccacctgcaggctggagacctaggaaacagctgtcgtgtcacaaagggcagagggctggagaacctgtagtgtagattccagtccagattcgaaggcctgaggaccaggaatgccaagggcaggagaagatcgatgtcccagaacaagcaatcaggcagagatgaaattcaaccttcctgtgcctttctgttctattcaggccttcagtgggttgaatgaggcccaacccacattgaagaggaccatctgctttactcagtctcctggttgaagtgataatctcatctggacatactcagaaatgctgtttaaccagctctctggaaatcctgtggcccagtcaagttgacacacaaaattaaccatcacactgcagagacacagtctatcccaatacctgtatttactgggtaacgtgcatctcagctcaccaggctggtttgattgacttggcccaaagctgccctttgagtgttgagccccagctgacccctttgatccttcacagccccatcattaaaacaaggaccctgaatcaagtgactgtaagagccactcttgtcctgttctgtctgtatcctggctttgagtgtttatctaagctaagcccaattgactgttgtcattctttgtctcttccttgctcagacatcagttaggtatttattgaacactcctgtgttcacagcatccggctcctgggattagagacagctcttgactcctggttttgctctttgaaacctattggactgcttttcttttaagatacaccccccacattataggaatctatccatttctttgttcatttctttaattgtgcattatatcagtccgtcagtcagttttcctcctgaaatatgctaagtattgagaattataatagattctattaagcaccgctaataaagtactatccttatagtagtagtagtgtttgcggtgatggtcgtgttagtactagtagtaatcaagatggccatgaagagactgcttttaatctaccagtaatcatggtaaaaatagtaatagctcaaatgtattattcatggtgtttcaagcactttacattatatgatgtcatttactcttcacaacctgccaggaaatggaaatgattacgtaatatactccagtttgcaaatgaaggaatcttcctgcggaacgtatgtgaagcgcatattggtgctctgggcttttgcataatttcaaatgtcctttttttttttaaacttaaggctaatgtttagaagcttttgctaatgagaggaccatttgctaaatcggtataagtgctacacatttgggtatctccatcccaacatacctcttattgccattccccaaagcagacaccttctcctccctccctcaaggacctctgagcttgcactccaattcctctcccacactcacctttctcctttctgttcctcttgggatccaggtttatttgaggagataggaaaagctcctgatccagcaggttttattcttaaatttgtaacaaagtaaatcacagaacctccacccagcatccaggcctctggttctctccctccttcccaggtataggccggctttcagaaaccctgcaccacatagaccctgggcctgaattgctgtgagtaataatgactctgctggtaatttgtgtccttctgcttggaactgtttcctttttagtttggtcaccctcccagagctggtttcaatgggggcatacccattatgggatgcagggcatcctgcatcctgaggaattttttttcctccaaaaatgaaaccttgaaatgaggacattgtcctgtccacggactgcacaacaacactgagcctcaaggactcatactggcatttttcttcttttgcagagtgtgggcaccctggcttcaagctcacgagaaaccaggtcgggatttaaacaatgttgggttaaagcaaagtttcataaagacagaatcaagaaaaaaagaaagagaaaccaatctaagtgccatcctccctgagttgcatcttacctgagtcttcagccgccgccccctgctgctgtgggaggaaacgggaaagtgactggccatggggacaggggtcgggggtgtgagggttagtggtagcagggaggtagcacttctgtgaagccggaaaggagacctgaacctggctctctgctttgctgcttgccagccctctggctgggaagaaggctcttggctcttgtgagcctcggtttcctctgcagagtggcctgttctgaggacaggctgacattgctgtccatcagtcttccaggaccctgaggatttcagctctacccatgggcactgaactggaacattcactggtcatttgctttcgttttttttttttgtttgtttgttttttgatacagagtttcactcttgttgcctagggtggagtacaatggcgtgatctcagctcaccacaagctctgcctcccggggtcaagcgattctccccagtagctgagattacaggcatgcgccaccacgtccggctaattttgtatttttagtagtgatggggtttctccgtgttggtcaggctggtctcgaactcctgacctcaggtgatccgtctgcctcagcctcccaaagtgctgggattacaggagtgagccaccgagcctggccgcttccggtctttggatttgattttcctcaagtgtaattgaaagcaggggcctggatggccgccatagtccctcccagcttcgacattacacattcctgccaatccatttttcaggctgataacattgttcagagtttaatgggagcagggtaagatagtcaccgtgtggagcaaaaattgaaggaaatattccagatgtcatgattttttacctgtagcccctctgctgccacacccttgtgcacatcctccagacacttttaaagaataaactctattttcagaagagttttagatttacaggagaattgtgaaaacagttcaaaaagttctcatataccctgctcccagttttccctgttactaacgctttgcattagtgtggcacatttgccacaattaatggaccaatattgatacattattatttactgaagttgaaacattactttagtttttacctggtccaggatcccatctgggatcccacatcacatttagtgatcatgtcttcttagattgccctgggctgtgccgctttctcagactctcctggtttgtgatgacattgacagtcttgagttttgatgaccagttttgactggtcaggtatttcatagaacgtacctctgtgagggttgtctgattcttcttcttattagattgggattatggaggaaggccacagaggtaaagttccgcttttatgaaatcaagggtaggcaccatcagcatgacctatcactgatgttgactttgattacctggctgctgtagtggttgtcaggtttgtccactttaaagatacttttgtgtttttgttctttcttaactccctttttatattaaactcttcagaaggaagtcactgtgcatagccatcccctaagaagagggcattcctgctcttccttctccatggctagaggatctacatgaactatttagattttttctacctgggagatttaactcctctctcctatttatttatttatatatcagcatggacttgcaggtatttatttgataatttttaatttatttgagttataatccaataatatggttttattttgttgctcatggtttttcttccttggctattgggaactcttcagttacttcctgtgcccatttgacatactttcttattatgggtctttctttcttccttttctttccttctttctttctctctctctctctctctctcttccttccttcccttcctccctccctcttttcttttcttttttcttttctttccttccttcctccctccctcactccctccttccttcctttttcttccttttttccttccttccttccctcccttcctcttttctttcttctttctttctttctttccttcctttctccttccttccttccttttcttcctttcttttcctaccttccttttccttccttcctttcttccttcctttcctccttcctcttctcctcctccccttccttccttccttccttccttccttccctccctccctctctctctctctctctctttttttggtgcatccatactttctggcactataagatgcttagggcttatcttgtatatttccagccccagttatagaatcagccatttcttcaaggatcccctgtcattttactggagaaaggacttagaatccaagatctgggtgctagatgtgcttgaggtgttgtttcctccagatcttctcaactgacagagcagtgaaatatatgtgtgtagggaggatggggagaacaatttttttaacacatatgaatacttacctggcaggggagataccatgatcacaaaggtggtttccccagggtgaggcttatccattgcactcccgatgtgctgacccctgtgattcccccaaatgtgggagacttgactgcataatttgtggtaatgggggactgcatttacacttttccctgtaaaaatttttaaaaataaataaatacataaataaataaatgtgtgtatatgaatccatgtgcatgcacgtatgtgtaaatatttctccaggtatccatcttatctatgttaagctaactatgagtttatactgctgtctccaactctaattcattaccacatttcacccattttttttttttttgaaatggattctcacactttcgcccaagctggagtgcagtggtgtgatctcgtctcactgcaacctcgctctcccaggttcaagcgatcctcctgcgtcagcctcccgagtagctgggattacaggtgcacaccaccacacctggctaatttttgtatttttagtagaaacggggtttcaccatgttggccaggctggtctcgacctcctgacctcaggtgatccacccacttcagcctcccgaagtgctggggttacaggcgtgagtcaccacgcccggcccccatccacttttaacaaacttgttttctttttgcccacattgactgacaaaagaaggtaatgaacagagatgttggaaagttcacgtggggcaagaggagtgggctgagaacattggacttttccctatggtcaatgtggcctcattcaacaaaaatcaagatgagtcagatgcatgtagaaagagactccgaaatgtgtcctgcctagatgtttgcaaaccgggactctgtgttatgctcacaggcctttgaatgtgtctctccctgggcttcatgtgcccttgctggtttctggactgtcctgttctgctcctgtcctcctactgacagcctttcctgctttcctttccctcccatgccactcccactccatacaacctcttcccctgcacactgctcctagaaccccttggttagccccatcagggatgtccctgctttcctgggacccgaggcacacagaatgaggatgaaacagttgacgtatcatgtagtatcccccacctggcttccttctcagccaggcgtcccaaactcaattgtctgcagaggccaggcaggcaacaaaaataagtgatgtgggcctcctgggcagtcaggagggcttggtgcagaactggaagcaccagaggtagcaaggaaccaggagatcaggccagcacctgctctgaatggtcaggcacctccatggttgcatagcaaatcagttgttgagaaatgttttgactatggtccttgtgtaggcccagtataaagggggaaatggccagtctgtggctgctgattatggccctgaaagtctgcaggcccagaatggccagacctggttgttcaaaggaaaactggcaggtgggaagggcggagggccttgccccttcccatttgcctcctgtgcctgacagtgtcaccgtagcaatactttcctggcagcaggactttgtcccataacaatagttgattttagtgtgtagggcttttgttgttgttgtttattccatacttggaaccagctgcgttgtgctactatcagagatgacagcccagcctggagctctgcaaggtcctccaggcttctcagttctgatcattccaccagcagatcccatcaccaaaggggtgtacttgcttcatgcagctgctgcttctcccagacctcattgtcccccttgtgccttttccatgttcaatacaggatttgttttttatctgaaattctacccgttaaaacatttggtatgtttcctcttctcttgtgaggtgtatttctgtatttcctacctttgcatcctttgctcagttcaacttgaagcaggtttccaagctcatcacttggaggcccagggcattgccactgccccccaccccaccgcctaccgcccacctgcaggtctgtgccaggaagccctgcgtgctgtctgcaccccgtttggctgcttgcccacaaccatgactgctcctgaggggctcgccagcagcactgtttcccagcctgctgtgcataaaggtgacgcttcgggttttccacagtgaacaatggttcccagagtgggcaggactccctagtgtctgcaagggtgtgtgaccatgcagggtggaaacaaccttgtcaaaataaaccagggcagtgctgaggggggaagtgaggctagctggggggaaatgtgggctgagtgcttcttggggggtttcctctgtaccggtgcccagctgcccaagggtcccagaaggcagaggctgacacacttcctgtgaccctttcagactcgccattggcccccaccagatcaggaatctgttttcccttgttgaccttgagccactcacagagtgggaaaggtttgcctatggaacgaaaacagtcctccttccatgatttcccctttgctcccatgttcatccatgtgggctgctgtaacaaaatcccataaactgggtggtttacaaacaacaaaaatttatttctcatagttctcaaagctaaaagtccaagatcaatgcgctgggagatttggtgtctggtgagaacctgcttcttggttcagtgtcttcttaccgcgtcctcacatggaggaaggggcgagaaagctttctggagcctcttttgtcaaggcactaatcccattcatgaggactcaacactcgtgactggatcgcctcccaaagcccctacctccaaatcccatcaccttgagggttaggatttcaactatgaactttggggagacaccgacattcagactgtagcagctccccagcacaatcctgctcgaccgaattcaccttcctgaccaggcacgtcaacaatctttctgtccctctgatgccagaacgttatgtttctgagggtgaaacttgagtgattaattgacagtattcctcaggaatccttgctgattgctgaatgcataaatgagtgaaagacctggataatccccaacaggcgcctgagtctcacatccgccctgggtgattccccatggccaggggcccacctcggttcccagggatccatgggcatgatcattgtgatgagccactactctccaatctggcctctgcacctgtgtgacattttcctcccattgctttacatgttactctttcttattcagtaggatgtgcagattggtcagggtgtgtattagtttcctagagctgctataacaaagtaccacaaactaggttgcccaaaacaacagaaatgtattctctcatagttgtggaagccagaagtctgaaatcaaagagttgtgagggctgtgttctccctgcagatgcccagaaaaatcctccctttctctctcccggcctctgctggaggctggccatccttggcgctctttggcttgtcattgcatcatccaagtctctgcctccatcctcctgtgtcctctcctgtgtgtttgtgtccaaatttcccttttcttagaattgcatcttctctaaaccagcatgacctcatcataacttgattacatctgcaaagacccaatttccaaataaggcacattcacaggttctgggagttaggacttcaacataacacttctggggacacagttaaacccacaacagagtataaggagaaaatgttacaacttcctttctcttcttttttttccttttcttttctttttttctcttctttctttttccttcctccctccctgtctccctccctctctgcctccctccctccctccctcttccttccttccttccttccttcctcccttcttttttctttctttttttgacggagtcctgctctttgcccaggctggagtgcagtggtgcaatctcggcttgctgcaacctccatctcccaggcaggttcaagtaattctcctgcctaagcctcccgagtagctgggactacaggcacctaccaccacaccttttttttttttagtagagacaggatttcactgtgttagacaatcctgcctccctccctccctccctttcttccttccttccttctttccttccttccttctttccctccttccttcctctcttctcctctcctctcttaccctcccctccccttctgtctcctctgctcccctgccctcccttctcctccttctccttctcctttttcttcttctctttgttgtccaggctggagtacagtggaaggatcatggcccactgtagcctagacatcccaggctgaaatgatcctctctcctcagcctcccaagtacctgggactacaggtatgtgttcccatgcctgactagtttttgtattttttgtagagacaggatttcatcatgttgcccaggctggtcttgaagatatctgcttgcctctgcctcccaaagtactgggattacgggtgtgcgccattgcgcctggcctgttgatttcttttttataaaatgtctttgttttcatccctgttattataataataatataggcattcatatgcatatgtgtaaattataagtgagttcttatatagatttgggggactattctccaacatgactgatgagggcatagtcaaaagacaaattaatcaggccaccagtctgatttatgaagcgtctctgtctttgtctatttgggctgctataacaaaatatcatagaataaagggcttagtttattttcttactgtgctagaggctgggaagtccaaggtcaaggtgtgaactgattcagtttctggtgggggctctcctcttggcttgcagatggttgccttcttctgtgtccttacatggttgtaggagcagagagggttctctggtgtttcttcttataaggacacatatcctttcagattaggacttcacccttaggacctcgtttaaccttaccaacctccataaggtttctatctccaataaagtcaccttaggggttgggacttcaacatatgaatgcagaatggatgctggcacctttcagtccacagcaggccgcaactactgtatttcattgtacaataagatccccttgactcttgtgaattataatgaacattagtctgtaaagcaggtccttgtaatccagccagtttgtatacagtaggtaatcaagaactatggatttactgggtttattgggtgggggagaagggagggctttattcaggtgccagcacttcttcacctttctctacatttgctcatcctggaggtggggttgagctgggtctgccttgtcccctcacttccctctctgccgagagagtcctgagcccacccattactggtagcaaagcccggggcacaatctccgttttcctatttgtaaaatggagctaacagtagtacccatctcatcagatggctgtagagatgaaatgagataatgtatttgtggcgttaggacaacagtggtcctgctacagggagaagcctgggccaggagatagactagtctccagataccactgaagtagcctttcgaataccaattacctgcctcactttgcagctgtgcagccctgaacaagttactttccctctctgattttccagtctttgttacctgtaaatgtaacaatgcctttctctatgttgttgcgaagtccacataaagtgacatgaaattgattataaaatacaacacaggctgggcacagtggctcacgcctgtaatcccagcactttgggaggtggaggagggcagatcacttgaggttgggagttcaagaccaacctgactaacatggagaaaccccgtctctactaaaaatacaaaattagccaggcatggtggcacatgactgtaatcccagctactcgggaggctgaggcaggagaatcgcttgaacctgggaggtggaggttgcagtgagcggagatcacaccattgcactccagcctgggcaacaagaacaaaactccatctcaaaaaaaaaaaaagttacaacacaaaggttggcaactatcactaataagtttgactgggaaacctcactactacatttgtattgtcttagaccaagcttgtgagatttttttgttatttgtttttgaagctcatcagctatcgttagtgttagtgtattttatgtgtggcccaagacaattcttcttcttccaatgtggcccagggaagccaaaagattggacacccctgtcttagacttttaaggagctgtgactgaaggatggagactgggccaggtggggcttggtgcaagtttaagctcttaggtcatttctaaatagcaaacctctcaaatagcatccaacagatatgccctagtcttgtcgtctttcccctgctatcttttgtacatgtaccttctgctgactgcagtgtgtcctggagccctgacttagttaaacctcagaacatccctctgcatccggatgcatccagtactctcggtttgtctggctcctgctgtactccctgcatctgcccagctgctgacacagccacatatggcttcctttgccccagctttcagcattctggtggcttgtagtgctgagtgctagcaaagaaagtgggtactctcacacactgctgctgaaaggtggagggtgatgaacaggaccaacagctctaaaagacgtttcaaggccaggtgtggtggctcacacccgcaatgccagcactttgggaggccaaggcaggcagattacttgaggtcaggagttcgaggccaagcagccaacaaggtgaaaccccatctctaccaaaaatacaaaaattagccagatgtggtagtgcgcgcctgtagtcccagctactcagggggctgaataaggagaatcacttgaacctgggaggcagaggttgcagtgagctgagattgcgccactgcactccagcctcagtgacagagtgagaccttgtctcaaataataataataataataataataataataataataataataataaaaagataagggaaatttgggcaggacttctccaagtttagagtatatgcaccctttggcccagcaatcccacttctcggagtctgtaccctagaaatagtgagggaagtttcaaaagatatttattcaacagcattagtaatgtatcagaaccttgaagacagcctagctggtcaacagtacaatgctcagttgccactataaagaatgagatgctgtgtccttctcagtgcctcagatcaggaggcacctggtgttggcttgtcacattactaatgatgtttacttccatcacttgattaaggtgatgtctgccagatttctctactgtaaagtttctatttttttttctgtgtaatgaataagtatcttgtcaggagatgctttggacctatgtaagtatcttgtttctcatcacactttcaccaaactaattttagcattcgtggataattcttgtctgaaacagttattactacagtgtgtgccaaacagtgattttctacttccatcattactcctacatttgtcaattaaaatgttactataaggaagatattttcttttatattgaaaaaatgcaattttttaaaaatcagtctggactcttggattctcattatattggttataacccatgactataatacattttgtgctcagatttttctagattttacattgggatgcccttcaagttgggttctatgtatttttgccattttactgttgttttttgagcactgccttaccttttgaccccacaagatattctaggctcagtgtacactttgcctggtccagccctggaatcagccattgctgctgtgctatccttgacagaactataacctgaatttaacaaggaggaaatatcaggcaaacacaaatggagtgacattctagttaacaactgatcagcactctttaaaaatgaaagacaaagaatgactgaggaatgagttcagattaaaagagacgaagggacacgctccaactgtaactgcaacgcatgactgcgggctgcgttctgcattggaaaaaagtgttactgatgaaatttgaatatcgtctctagattgagcaactaagcaataatattgtattaaattgctagattgggcaatagtattgtactaaagttaatttcctgacacagttaaataattgtactgtgtatataagatgtcaaaattgagaagttgcaaggctaaatggaatttctcagttttttaaactcttactttgtacatctgaaattattttaaaataaaaactaaaaaaaaaaaacctaaatacaaaccatgagatagatttatatgtactaatatgggatggtgtccacaatcaattggaaaagataagttgtagtaccatttgtatagaattggcccatttttgtaggagcaagacagaacaatatagtgcacatacatatttatctacacatgggagaaattctgtgaagggtatgtacttcctgttaacagacatttctgggaaatgtgtttggaaggtatgagacaccttttactttttgatgtctcctgataatgggaaaacagtaagaatgtgggttgtatgcatgagtgtgattctacacgtgtaggtttaggtttgatgtactcccatccagcttattctcttttgcattttccagcacaggcagtgctgtgcaatgtcttgcccagtggacacccacctaattttcactccacaaaccactgtcctacatctgatccttaacaaagtatgttagttgtagacacaaaggtggcctacatttcatacttgttgacagtaatgctagttgactcatcttacctttgtctgaggaggctggaaattgtttgtcctcagaaactttagggagaaatttattactaagattgtatcattttggtctccccagagaaatgaaaaattagaaattggccatgtgacaatcgttgcatttacctctttaaggagcagtgattctttaagtggtgcttgatttatctaaacccgattaattagtgaacggtcatctgtttctcccaggaatttttaatgatcattaggcttttgtagttactgtgaaattttgtttacgtggatttatttttgtgcaggattgtatacagggcagatgctccttaatttaagaagggagatgtgagaacaaaagtgtcttctcttgagtgagggcctgttatgtgccctgacttgttacaaatatcgactaatgtaaccttctctaccatgtacctttcttccaatttatcaatgaggaaactgatgcaaaaatgtatgttcccacaggctctggtgtgttcactgagttagctccagaaagaactgtccccttctcatgcctgttccctacttcttttgcagctaattctccgaaatggtttctgtcttcagctttctgggctgccccatcacctgtgttgcttctaaatgttagtttcattgctgccttctgggttcctctgcttctctctgacatgatgtctctacggatgcatctctcagtaatgattataatggtggtgatgataataaaaagagaatacacaagtgtttttatcaatccctgaccatgctgggcacaatgctaagcatgtgcaggcatgatgtctttattctgcccactcagctgatgagattgaaggggctccctgcaggttggggcctgaaaaacacagccaggtccatctaggaactagaagctatggtcaggcttacatgcttttttcatatcagtgttcatgtagatgtttaagctcttgcagtaggtttttgcaagctagtgaacgctgccaaattatgctcgccacacaattgcagccacctattcccaggcagtataaatatatggctgaactaacattaatacctatcactgttttatcaagtgacataatcaagataattatgaagtatccaaatattaattttcatagattaaaagcagataaagtattagaaatctgcttatatcattagcagaaacatttttgggggccacagggtaaggaaaagaggggaaaatattgtccttcaacaaaagtaatcatattctagtaagtataataaaagaaatgacaagcttttcagaatttccacgactaaaaattgttttagctgcagctaaaaaagcatcacataacaaaatatctcttgtttaaaatatttgctacaaaaaagtcctattctatatgtcctgcataagaacaagtatctttatataagaaatgtgtttaatagccctctttcattctttttctgaagccctccctgttaaattgcacccaaaggggaaacattaattgaactgtaaagctttttttttttctgtctaaagacattaaagacatataggtggtattaaatgaacctttaactagagctctgtgagttttcaaaatagattttatttttctttaccataggccaacagagattttgagaaacacattgaaggatctgttaacacttgatatacccaataaaagcagtggttgtgccagtgctgatctgtcttgatgtgaatgtgaacaatgggaacctgagctgagcaggtaaataatcatgtagtacagtcaccgtcttcagtgtttgagatgactagcagggtaaaccacgctgtgtctaagatgcagtgttaattctgtttgaagtaaaaatatgcaagtgtggtactggatattttggcacgcaatcttgcgaaatttctcattgatgagattctgacataggaactacatttgagtaagaatcatagctcaatacagcatgatttcaggaaagtcgactaagataaaagtgtttctgaggctgaacagcaagaatcttttgctaagagttagaatagattgacaagaacctaaaatcagaagttgcaattctgctgagatactgcttttcagttctccggtggaagcttcattggacatattgtacatcaagcctctatgtgactgattcctgcctctttatgtcttgttttagattctccatggcagtagctttaggcaacccagttttactgaatgcagcaatggtttcagtgaccattagagtccaattttaggatgatacttctccaaattgttaaaactccctggtgcttttctcttataaactgcaaaatgtcttcatatttcatcccgcttttcagttaatgctagggtgacagaaactggacctctcccaagacatgtgacagagtaatacagcagccaacttcttcgccaaattaaagttttacaagatttaacctgtcatcaagacctgggattttggtggtgagtcatcttcaaaagccaagttcggtccctggtttgccttcttttccgcacaagaacaagggttttgatggctctggtctccaggaccatctgtggctttctattagcaataatcgcacctcggtgaaacctcattggctacgatactgccactgcgcaaagctcatggctttctttaatagcaaatggcctctgacttttaagaagccatgtggctacccctcagcagacttaggagaggtcttggctattatttgttgttttataaggtgtcatcattgagcatctactctggatgaggctctgtgctgggcttgaggggtacagggaagtttcacatgtcccgtcttgttgaatcacacacacttgatctcactacaacagcagaaaacaagttaaagttccccaggggttgacacatttgcctgccgtgtttattgctgctgtgatttctgcagcatggtccaaagaaggcaatcagtcaacagtgaatgggttgagattttgtgattttggtttaggagtcttaatctctagaataaaatctaatgaaagggtggggctatgtttttctcttgccttgacttctttgactctatttgtaaattccaaatttacccaggcctctggctcattctgtcttaaggtgcggggacctctaaaatgtagatggcaacaatctttagactatatgtgtcttgatggtagggcaatcaaattgatttcctcagcatatacgagtcatgttttgtaagcatggtgggtacttagtcaatgtctcaatcagatttgcttctgtttagcaagataatcttttgtgggggagtgttatggactgaactgttttccttcttccaaacgtatatgatgaaacctacccccatgtactcagtattaagaagtggacctttgggagataattcaggttaaatgagattatgagggtggggctctcgtgatgaaattagtgccctcaaaataagagacctcagagagcttactgtctctcttctctctctgctacgtgaggacacaatgagaagggagccatccacaatgcaaggagagggccctcatcagaacagaccatactagcaccttgatcttgcacttgtagtcttcagaactgtaagaaaatgaattttctattatttaagccacccagtctggtgcagtctattattgccttccaaatggagaaatacaaggaaactagggccgtcttagcttcacagagagaagatgtggagaggagttaggaggtagagactggaccttgatggtggtgatattcaattagtgaaaggctgagaagaggtcaaatatacttcttgtggccccaaagatcagaaccaaaatggaaaggtagaaacagtaggcaaacagaaagcaacttaataaaaggaaaaggaacctgagagaatgctctgtctctgacagtggttgggatctcatcactggagatatccacacagggactgtattactactgagagggggtggggctgaaaggatccaagcattgcactgtgatgcgaccccataaggtcacttagtctttgggacttgtgagctcacagtgaatcattacaaacagaaacgattccctcttatttgtggagcacattaaaatttccaaagcatttttgtgagtacattagctcccatgatttatatcaaaacattagagttgacattcaatacacatttgctgaatgagggggatgcatgaaggagctattgtggtaccttggttggcagaagaggaatacatgggcagagtcatttctagacttgctaggaaaggccaagccaggcttggacctgggtctctactgtactctttactctactcagtcttttccaaggtggaaataatattttctctgaggctgatgtttttctgtttgttttgcattttggtaaattcatcaacatcaatatcccctttaatgctcacaaatgcccttagaaccagcttttattgttctcattttgcaaatgagaaaatggaggcttcaagagttgagtgagtttagcaaggttttcaactcttcttgggcagagcattagggttgcagacagttgggcaccctcttcaaatgaatgtgagccaacgttggccctgttgggtgtgcaaggagttcttgcagagttgatggagaccctgtttcgagtcacatgaataattaatctagggaaacagtagtcaaacagtcaactcattctttcttgcactcttgctgatcctcagcaatttctcggctgctcctcctgccagagtcctgttttgtaccttgtaaacaagtcactctaggagttcctagtcctggctgtataccatagtcacctaggggcttgcaaaatctactaatatccaccccactcccaccgtactccagagattaagatttaattgatctagagagggatctgggctttggtgttttaaaaaatctctttagatggttgagaatcaccaaatttttgttggtgtggggcaggtttgcacattcaggttcatgggttattggaatgaggcatgaaggggcctgctatgttcccagggcctgctagctctgtgccgattgcttttggttttgtagaaatgatttcattccttcttccctgaagccatcctgatttgaggtcatagtctatgggggtgccatgtggatttatactgcaactcttgtttttactagctctgtgacctcagaaaggccacccccccttccctgtgcctctgtttccatctcctctgtaacatggggataataatactagtttccttataagtctgttgtgagcattaactcttgggattatgcctgttgaatagttagggttccacaaataagtcttgcttaatggtgttgttatcattgtaatagctgcatgtgtgtgagtgtataaatgtatgtaagatatttttcctgtttttttttccccctggcagagttagccacttcttcctatgtgtaagcatatcatcactttctatttctattatggaattgtaatgtgtttttgtgtccctaacctgatatattcattccacaaatgtttattgaacacttgctgaatgctgaggaatggacaagagagacacaatctctgcctcttgagccatttgaactttgaagaggacagatgatgacaagaggaagtggaaataggctaggatgctacggagactagaacaaatggtccttattcgtaccttgctgtgggggagactctcctgacagagttagttgtgtcacctgcattctttctttcccttccacatatagtgtcctgggacttactgtgattacttatctctctatccctcaacagtaagtcctaatcattggggctaggaaatgtgccttgtcaaatgaattaatgaatgaatcacgctggaccaaaatgaacaaaaagttatttttttgactcaatttagcttaaacatcacatcctgagatgctgtgttaaatcctggagtcacaaaagacctttacagaaatctttacagatttctgggaactatagacacgtatatgaggataggtttggaccattgtagctgctgtaatagctgttgttctggtgagcagtggggacccaagtgttagtaggccctgcaataaacatgtatgggcctgagataaatgggtcagtgtctctcacgaagctctgtttcgtcaaggtgagggaatgtgtcttttttgcatttattccctcccagggtttaggtcactgcctgacacatggcaggtgcacagtggatacacagagagtggccagacagacgacatagcttttctctgtggatttatcctcatctctacaaggggggttagccagtattttgagggtctccctcaatgctcacattctagaatcctgtgatgggtgctgaaacaacgctccctcattggagctgcttgagaaggtcattcattattttgcgatatcttcagactctcatcattgctagaagctgactaattatgagaagagaagtgaaggccttgaaatgcctctctctgcacatctggcctcactgtcaaataaagtacttatttctgataagctctttggcttctgtgaagccgcctggccgtgtctggccgtgggcggtgctgataatgaaccgaacagagaacacagacttggcggggaaggtggggacccagtgggtagaaagaatgggctttttagaccatttcaaagtaacaagaaagctttgagagtgcttagtgatgtctgctaccacattcatttcctctgtttccattgaaattgaagttctagatggactgaacctgactaagaaaagggaatgtggacaggaaagctaatgacaaatgcaactggcttatttctggagtgctttgtactctcagagtcttgtgccctgaactttcttcatctggactctaggggcacttaagcaattagcatgccacaagctgggtgctgtggaaagatcatagactttagaaactgtccaagaaactagtgggactccacaccttgtgagttgtgtatccttgtcaagtttaatttaccatgttgagcctcagtttcctcacctaagagaaagaaaagagaaatagatttatttatttatttatttatttatttatttatttattatttatttatttttgagacagggtttcactctgttgcccaggctggagtacagtggtgcgatctcagctaactgcaacctctggtatctgggttcaagcgattctcgtgcctcagcctcctgagtaactgggattgcaggcgtgcaccaacacatcaggctactttttgtatttttagtagagactggttttcactatgttgaccaggctggtcttaaactcctggcctcatgtgatctgcccatctcggcctcccaaaatgctgggattacaagtatgagccactgtgcctgtctgagaagtgattgtttagttagagtaactctagatgacataacaaataaacctcagtattctagtagctcaaagacacctctttctaagtcagataatagtttgaagctgggcgcagtggctcacgtctgtaaccccagcactttgggaggccaaggtggtagatcacgaggtcaagaaatcgagaccatcctggccaacatggtgaaaccctgtctctactaaaaacaccaaaattaactggctgtggtggcatgcgcctgtagattcagctattcgggaggctgaggcaggagaatcgcttgaacctgggaggcggaggttgcagtgagccaagatcacgccactgcactccagcctggtgactgagcaagactttgtctcaaaaaaaaaaaaaaaaaaaggtttgagaagggttttcctggtcattaggtggcttttcttcattctgtgatctagagacccaggtctcttccatgttgttgttctgccatccctgggaccttgaagttactccaactggcagcggagatgaaggacaggagagaaggcacaccacttcttaaacacgtcttctggaagtaggctacaatcatttcacttgccagggataagttctagacgagctttagaagggggatggtctttgggaagccaaggtgggaggattgcttcatctcaggagttggagatcagcctgggcaacatagcgaaaccctgtctctataaaaaatacaaaaattagccacgtgtggtggcacatgcctgtggtctcagctacttaagagactgaataggaggatcaccagaatctgggaggtggagattgcggtgaaccaagatcacaccattgcactccagcctgggcaacagaccaagaccctgtctcaaaaaaaaaaaaagggggcgaggatggtaaccattctctgccataaataccttagtgttgctcaagaataagtgaggttgggtttgtgaacctacccttgcataacatgtgtcaccaactatggccttacttatttgtggattgtttgtaggtacacatggcctcacaggaccattcgtgtggtcctgaaattaatgtatccctttggaaatatgtggtagacatctctctgtgttattaaggatagatctccaccatgaatggaatggctaatgcttacagctggatcatgatttacattaactcctcccttgctggtatcttatagattgtctttggttttgttttcactacaaaggagacagcacgaattctcctacaggctcaccacacaactggtgctgtgagggagacgaagatgagtcatgcctgtactgctctttaaacactcacaattgaataagctacccaggtgacacgacatggttatcctggccagaaagccatggcttttcctaatcagagcttcagtgctgtggaaacttgaagtttggagggtctgatgtctcagtctggatgaggatgagttccctgccattcctgggttagcagctcccatcctcttagattccaagatggtggctcatgcctgtaatcccagcacttcgggaggccaaggtaagagtatggcttgagcccaggagttcaaggcaaaactgggaaacacagcaagaccctgtctcaaaagaaaaagaaaagtttccaagatggtgtagaacatcagagaggggctcttggagattatctggccatcgtcaccccacctgcttatagatggaaatgcatagactcagagaggttgggggacatatgggcagctatagaaatccagtggacctcaaatcccgacatttctaacctgaattaaattctctcacccttgtatggaggtcctagagtcctattttccaaactttgcctctgaatgtctccatgtcaaagggtttctcagtgtgccagagggcaatggagaatggagcagaaatgaccacagaagaacaggtgggaagattcctgcaacagcaaaaattctgctgcccggttcctgagacatgaagaatgtgttgtctacacaactacatggccagctgcctccttaattttttcattttgttttgtttctgagacagagtcttgctctgtagcccaggctggagtgcagtgagctcactgcagcctcaacctcctaggttcaagtgatcctcccacctcagcctcccaagcagctgggactataagtgcatgccaccaagcgctatttttttttttttttaatttttttagaggcagggatcttgctatgttgccagggctggtctcaaactcctgggctcaagttatcctcctgcctcggcctcccaaagtgctggaattataggcgtgagccatcatgcccagccctccttaattttttaacatgaattaataggacctggacacacacagcctcatttatatcggcagccatcacagcctgccacatgtcagatgaggtctctggggctctcactccttgtgtcgggggtgatgccacatgtggcccagctgtaggtcacattcagctcctgtgttcaccaggatcagatggaatgccagcacatcttaccctcctgcgccctgggagtttgtaataatctacgaatacgtagatttatttcagagaacattttccgaatcctgttgcgcatacgcacaaaaatattggctgcagtgtgtttataaccatgaaaattccaaaatagcttcaatctcctgtgagaggggagtggtggaaggccctccagcacgtgcacagaattctttcttcagccatgtaaacatgaaaataagggttaaaaatgacttcattatggggaaaagggacaggatgcaaattgttcaaatggcatgatgatattataaggaaagaaaaagatgttataaaaggtcacataaagtcacccacaggtcagcagtcatgtcatgattagctgctctgtgccagacacaggctggaaattggtagatgctctccccaggaagtgggcagcagcccctttgtgcctctgtcacctctgttaggctcctggaagcccccttcattgctgcatgtaatgacatcttcgtcaccacatgtaacagcttctttaccactatgtgtaatgccattctgtgtgcttattgggctaaacaatcacagaggaaaagagtgctggagaaatgccagggagataggtaccgaaacgttccagatggaaagtctcgtcttcaggtggccgtagcagtaaatgtcagggtcaaacagggggtgtattcttgggagagcttcagctcgtctgtgacctagtgtccagccagcttcctgggaaggaggctgcatcctgacattgaagccctgtgtgctaggatgagtgtgttacgcagagccttacaaatgagaaaatcttgcgtcctcaggacaggcagttagtgttgctgtctggaatacactggctacctccctcctccccccaccacttaaaattccctgaatccgacagtggtagggaaagggctgatcctggagaagattgttccttgataatcctagtatgattcataatggttgcagcagatgagccgcgaggtttgtggctcagtctgcagctaaggaaggctcttccctggggaggtgtgtccagcttcccggaaagacctcagctgtctagctggtctgggctgcccagttcttagcagtgcatcagcaatgagcagccgctgaccatcaggcagcgtttcccacctgccagagaacgtcagagccactgcgtctggaccagctgaaggcagccacggtgcccaggatgctgctgctgcctccaaggaaaagaactctgaaaatgaggaattacagcctggtggttttgttttatgttaattttttacatctgggagataatggaaaaaattaaaaattgctataattgcaccaatcttaaaaattaataatataaagacgggaaagtaaccaacacaagcttgaaacccatcccgccccttcttgagataatccctgttgtcagtttggtaatttatgcaaatgtagtggtgcactgttaaacttctcaagaggagaaacaaaaaccctgaattgtaggtttgtcaatttcaatggtgaaatcccaccgcagccgatttcaggcaaccaaagctttaaaaacgagttcgcaaatttcttgaatatttaacaatcagcttttgcaagtgcatacatgctcacaacgtttgcttttttgtactttgttttgagggaggcaggaaatggaaacttgcaatggtattgataagtgtgccatttttatttacggtatcacggatgtcttcctagaccagcatgtgcagattcacttagcttctctcacttgtgggatggggtttccatgaaggctcactgtgttgcttctggaaaggcagaatcggccccccaggagacaggaatggcagcagcttggcactcggaggctagctcctgcaatgctgtgcacttgcagtggacaaaaaagtaaactttggtgtttacttggagttcactctagctttggtttcttctaaatatgttcttccaatgacctgtagcctaatcaactctgctggcaacacatccctttgctctgctcaattccagtttccatcagagaatctcatttttcttttgggaaatgtttcctgattttcgtcttttccaccacccctcactgaggctgggtaaagtccttctccatgatgtttagaacccaggcctccttctgtggcagggctctctaccccttatgatttattgtgtgatgtctcaacctgtttcctgtggagaagcagagaagctctggtaaacagaatggccctctaaagatgcccatgccctaatctctgatgttatgcctatgaatgaatatgttactttatatggcaaaggggactttgcagatgtaattaaggttactaatcaattgacttctaatagggagagtatccttggttatccaggtggatccaatccaatcacacgggcccttaaaggcagaggttttctccgactgtgatcaagaaaatgccatgaaagattgtaagtgtgagaaggagttgatgtgccactgctggctctgaaatgtggggcccacttgtaggaactggagggagagactggttgctaacggtggcccctagctaacagccaacagagaaatggggaccgccggcctacagctgcagggaactgaattcagcaacatgaataagtttggaagaggatccttccagaacctcctgataggagcccagtccgctgtcaccttgaattcagcttcatgaaccaggagcagggaaaccagctgagccaacccacattctgacctaaggagcactgaggtaattatatgtgttgttttaagccactaagtttgtagtaatttgttatagtggctgtagaaaattaatacaggatcctagtgtttgggaatgcaggccccaggccccgctttttccagagcgtgtttgcactttcgcaggggaccttcaagtcccagtagtagctcactttcaggtgtctcagctcagcttgccctgctgctcctgaatgagcaggttctaacatcttccaaacacttcatctcccccacctgcctatagtcaccgcttggtggatttttaccactgcaatgtgggccttggcttcctatttcagaccccctgggatgttttggtagcttccttaggggtcttttcaactccaggccctccctctgcccaaccatccttcaaactgcctccagatgcaacttcctggagtgcggctttgcttccatcgctccctagctacagacatcctgtgggcttcctgtttctactgaatccagggcacatcccccagcctaggattcacaatctctactggggacaggggcattgcctctccagtccgattccccaggacttgtgctttttttttttttttttttttgagacggagtctagctctgttgctcaggctggagcacggtggcgcaatcttggctcactgcaagctccgcctcctgggttcacgccattctcctgcctcagcctcccgagtagctgggaccacaggcgcccgccaccatgcccggttaattttttgtatttttagtagagacagggtttcaccatgttagccaggatggtcttgatctcctgacttcgtgatccgccctcctcggcctcccaaagtgctgggattacaggcgtgagcaaccgcgcccggcctgtctgggccatctttatactcagtataatcagtccccacaaacagaaatgctgttgcagggtgagtgtgctaaaaatactcctgggatttttcaagtccttggagacatccatcttaaaatagtgcaaaaagaaccgaataaatactcatttatgtgctattttaatgaacaactgcaggcaatatgcctaatatggcagggaggtcttcagtgtcctttctccttcattcttgattagcgtctgagctcagatggcatgcatcagtatgtttgtggcattacagaggtgctgggagtgagggagagtgcaggggtagggaagcattacatgcctgtaatcccagctatttgggatgctgaggcatgagaatcgcttgaactcaagagggagaggttgcagtgagccaagatcatgccactgcaccccagcctgggccacagagcgagactctgtcccaaaaataaagaaaagtcagcttctgtgctcctgcccagaaccactgaatcagatgctgggtgtcagctctggaccctgtttggccttttctttcctatgtcaacccagcagagctgcaggccttgtgtggaggtgggttacaatgtgctctccttatccccagtaaaaccaggacattttaaggtggggacggggtgggagtggatcaattaacttggagtcttggcttgacctttaccctggatttatggggcttagaaataaagggaaagttgcattcttctctgaggaactgcttaattcatatccactctcccaaataaagctgctggttgactgcagctatttaattcagtgctatttgctttcattctgtatagggtgaggatagcttctgttggccagagcttgtgctagatctccacctgggtcaggaaggcatttccctgcgctcacaaaggccttgcacacataagatgcactgaagaattcctggcagggccaaatctggtgtccggttcactcttggccttccaagttcttgctgcctctcctttgtacccatgatatctgatggcagcagcatggaacttggtacagttgaaatagcccaagttcaaatcctgactcagatactaagctcagtaactttacgtaagtagcataattatatggatcctcccttcttcatctataaaatgatgtggtgaactgattacaggaatggccctaattcttcactcattccctgtatctcattctggactgactgtgtctcataagctgttagtaaacatgacgcaagctgagattttttttttttttttttttttaagacagagtcccgctctgtggcccaggctggagtgcagtggcctgatcttggctcactgcaaactccacctcctgggttcaagcaattctcttgcctcagcctcccatgtatctgggattacaggagtgcaccaccacacctggctaatttttgttatttttagtagagacagagtttcaccatgttggctaggctgatctcaaactcctgacctcaggtgatctgcctgccttggcctcccaaagtgctggaattataggcatgagccactgtatccggctgcaagctgagctttgaaatactgtttccatttccactgttgaatctcttttatcaccatgaaaagagatttcagggctagtcactggttccgggagaagaaagaatgacacatagaacataactcaggtgctctaatggtcccagttgacaccaacctagatcagttgacagccagccaactcctagacctccatgtgagcccagccaagatcaccaaagctacctacttgaccacgcagatatatggacacttagtgcttatgccactgagctcgttgtgcaccattgttttggtaataggtacagtgggaaactcagtaataactattactattacaatagtaataactattggattcaaatcctgccagggcatgggttggttagtgctacatgcattgcctgatacatcaactacttttggaatgactgaatggtcttataaggataaattatgtaactcttttgcacctgatttctctattcagaacatctctagtaggctgcaatcactgccactcacttgaaattctttaagagtggaaatgccatttgctggacattcagagagagagacgtgaagtagctaggttcctagttttacgtgagatgtcgattgatctacggagtaatttgggtccctggctccaaggcaagcctgttacattcttcaaggagaaaacagcttgacatcagtatcagtttgagaacacagcatgagtgaacaaaaaaaacagcggtccccatattttgggcatttgctctacgccaggcacttcttatctattctgcgtggaggaattgctctcctgatttttaaaggggacaaaacagctcagagacatcaaatagatgatcagagagcacacagctaaggaggtaacagctcaaacttctagatccagagctacctcacagcaaaggacagcctcttacaccccaccaccgtctgcagagcccacagcaggcatccaggtgaagctcctcagtttatcaatgaaggaattgcacctgtgaatggaagtggcctgccgaaggctacacggcagtgagtgtaaccagattacctgataccccttccagggcccttggtgtgacttattgagatctcatgggccagtgggtgtcactgaaattcctggataaaagttgcttgtggagggctgtcatagtggctcatgcctgtaatcccagcatttcggggagcaatttgggaggccaaggcaggtggatggtttgagcccaggaattccagatcagcctgggcaacatggtgagaccctgtttctacaaaaaaaataacggaaattagcctagtttggtggtgcatgcctgtagtcccagctgctcaggaggctaaggtgggaggatcacctgagcccaggaaggtccaggctgcagcaagccatgattgtgtcactgcactccagcctgggtgacagagtaagaccctgtctcaaaaaaaaaaagtttcccatggagacattatcagtttctaggcctccacgtgagcaccttaaaagaagcactatggtttaacaacaacaacaaaagacacaccagggaacacctgagctgctcctatgcgcctgtgctgtcttcagggaagcaagtcagcatcatgaggaggatgccttttgggaagaggcctgagggctggctagctgcaggtgtgccatctctaatcaattcattcattcattcatttatttttatagaggtggggtctcgctatgttgaccaggctgatcttaaactcctggcctcaagtgatcccatcttggcctctcaaagtgttgggattacaggcgtgagccactgtgcccagccccagacatgccatttctagacaacacctccaaggatctgaggagagaagcccctcatgctggctgccccggcatctacctatccttcgttctgcctgccagctcagagggtgggagcggtgccagggagctgtttgggctggcgcaggccaggcaggagccctacttggctagcagccccaggcacctgccacacttgtgtatttgctcagcggttcggggtacggaagcaggatgccttccgtcattgcaccctgggtgttcggggcctcgggggccagctgctgggctggcagcttctctgaggagctgtttcttgccctctttgtacccctgtctctcaactacctgtcaggcaggtaataatcccaccatcacctgatgtacccagaggagaaggcaggaggcctgcgcaatgtgcacagaacaaacactggcaaggtgcctgagagccctgcaccaggcaccttcagccctcaggggagagagtctcctgtccagctcaccccaggcacccttctccaaatgcccagtcttgcaccattcccagaccatttgggccacatctgaaagaatttgccatactgcctgcctttgattagatgttagggaagatttaaattcgtgcagaatctcaatacagctcccttcctgttggaaccatgtgacagactatttccaaggctgtttcttacaagaggatctgccttactaagtcagagcattgcaataattaacgttttgaaagctccctgatttccaaagcattttcacatacattagctcacttaaggtctcccaaaccctgtgaatggagcattctttttagccccattttacaggtgaggcaactgaggccaagagagcttgagtagctcccccagtggcttaatgtagaataagtatcagagcagagactggagcccagatcttccttatgagaatccagcctcctttttttttttttcttttgagacagactcttgctctgttgtccaggccggagtgcaatgttgtgatctcagctcactgcaacctccgcctccagggttcaagtgattctcctgccagagtagctgggattacaggtgtgcactaccacacccagctaatttttgcaattttagtagagatgaggtttcaccatgttggccaggctggtctcaaactcctgacctcaagtgatccatctgcctcagcctcccaaagtgctgggattacaggcgtgagccaccgcacccagtcccagccttctttctgattcactcttgttttgtagttgtggacatttaagaagactttttatttttttatttgtatttttttttttattcaaagggcttgtgctcaaataaagtgagagtagggagagagaaattcatgtttctctgctctgttttttgtttgggctctcatttaatctctctgacaaccttttgcagcaggtgttattctcatccatatttacacctgaggaagctgaggctcacagaggagaaatatctttccccaagccccacgtcgagcagtgggtagaaaatgagcccagatccctctgtctccatctctgcaacctgtctctctgcatgccacattggcttacgaccgagatcagctgcaccagggcaggctggagggtgaggaggctggctagacccctgggaaggcaggcagcacccagagctgttccagctctgctgatcctgttcgagaggccagaaaagttcaaatattggccttctccttatagtctcccacctaccctccctctggaagcacagaactgtagtgtgcaaagaaagaccttgtggatcctctgctcttgccctctcatttaccaaatgagaagacgctctctggggaacgtgaccggcctcattccatagaagagatggaagagtctggagcagaatctgggaccctgactcccaggcctgtgcactgaggcgttcttgtctgccacctcccagcccctctctttgccttcctcgatcttcttgagttctctaatgggtcatctgttgtgaccgttgattacaagacaccatgcatggttcccctgcttccatttatgtgtggatctccctctgttcttacataagaatctcagagatgggtcaggttgtgaccttctctttggtgctggcttgaagttgaggaaaaagccaggctccgagtcccttggatctgggtcccaaccctgcctgtgtggctctgaagtcaagtgactcctcctccccctgttgtattccccggcagcactaacagtggctccccttagctggacacctagagtgccaggctctgtgctcaggacttcactgtttgaggtccctggagagtggaacctctcacccacaaggtggtgattcccttgggagtgggcagcatgcagtcagaagggaacttgggtggggacaggcatcctatatcctgggtttacccactcctacccatgcactgatgggcttgactgcctggccaacacttactgagcatatagtgaatgacgggcactgaggctcaggggatgaagccataggctttgagtcccagagtcagtgatggaatcaccagggagcccaggcatcgtgtctatgctctgtgccatgtgacaagtctctgccttctcttcatcctgaagagaccctgggttcttgcctccctgggctgtggcaccatgcaaggtggccaaggtaggggccctggtgttctggcccccagctaggttctcagcactactgagtgctggctcatggtgagtgttcagccactgttggatgaatggagaaatgactcaatgaatttcccagaatgcacagatgctgcacctaatcccttggagtttaaccagcacaagagtttgcactttgctggccatctcctgccaaggcacagccttccctgagcctgtttcccttgtatgtggctcatacctgaggcccccagctggcatttggtcccctcctgcaggcgtaggctgcccagtgccaagtgcaccttgcatctctccccagtcctcccactgctgtctcccgcttcctgccctccgtcccgccacgggctcccgccaaaccagcccacacggcctccttttgttcagccacctcggtttcaggccaaccagtccagccaggtcccccagcctgcattgcacactcctttgaagccttgacaggcagccaaccaagctggcccgagcgcgcaaggcagggtgctggtgccggcgcgctggcagctgcttcccgcctttctggctcctgggacctggctgctcccaggcccattcacatggggacagaaatgcctggacgttctcctcggctggcatgggtattgcgtccagggccacaggctggggctgttcccacagcccagagtcctttcccaggctccctgttctccatagtgaagccctctggtttgtcccaggcagtgcatcccacagcctctgtctccacaaaggagaactggcagcaggaatagcctggctgggttctgagctctctgaggagaggcaggactgggcaaagggtaggagcactggctttggcttcagatgagtgtcgagcgcctcactctgccatctctagctagggacctatctgcttcatgcctcagttttctcttctgtaagtggggagcatagagcacccagttcaccggcacagtgaagggtgatgaatactgtaggttagcacattgcaagctaagtcttcaacaggagttgtggggagcactgttaatatgtgggggatcatcattctagtagctgaggagcatcggagcctaaaagactcgtgtgaaagaggggtctcctgttcctatttttaaatttttaaatgttattttttattattttggggacagggtcttgctctgtcacccaggctggaatgcagtgatgtgacctcagctcactgcagccttgacctcctgggctcaagcaatcctcccacctcagcctcccaagtagttgggactacaggcacataccactgcacctggctaatttttttattttttatagagatggggtcttactatgttgcccaggctggcctcaaactcctggactcaggtaatcctcccaccttagcctcccaagcagctcttgggactacagcaccaccaccatggctggctaattttttatttgattttattttttgtagagtgcagtggctctatcactgcttactgcagccttggcttcccaagctcaagcaatcctcctacctcagccttccaagtagctgggaccacaggtgcacaccaccaccctcagttaattttttgactttttttttgcaggaaacgaggtctcactatgttgcccaggctggtctcgaactcctgggctcaagcaacctgcctacctcatcctcccaatgtgctgggattacaggtgtgagccattgtgcctggcctcctattttctaaatttcaaaagtagtacatgctgactgcacaatttaagaaatttagataagtgaaagaaaacttaaaaaatacttgttgcggtcgggtgcggtggctcacgcctgtaatcccagcactttgggaggccgaggcaggtggatcatgaggttaggagttcaaggccagcctgaccaacatggtgaaacaccgtctttactaaaaatacaaaaattagctgagcgtggtggcgctaaccttagtcccagctactcgggaggctgaggcaggagaatcacttgaacccaggaggtggaggttgcagtgagccgagatcgcgccactgcactccagcctgggcaacagagggagactctgtctcaaaaacaaacaaacaaaaaaacacttgttgctgggtgctgtggcttgcgcctctaatcccagcattttgggaggttgagatgggaggattgcttgagcccagcagcttgagaccagcctgagcaacagagtgacatcttgtctttataaaaattttttttaaaaaattagctggacatggtggtgggcacctgcagtttcagctacttggtggctgaagaggaaggatcacttgagcctgggagttagaggctgcggtgagttgtgactgtgtcagtgcactccagcttgggtgacagaatgagatgccatcttaagaaaaagaaaaattaaaaaaacctttttatcctaccaacgtatatactcatgtgtgcacatgtacatatgtatgcatacccctacacacactagaattgctagtttattaccatgtgtaataatagtttatatggacataacagtgcatgcctattatattatgtacatatgtaatgcattttatatacttttcatatatatttcatttcatattaaattcttgcatatacatatatttgaaaaagtaaagaataggttcctctggttttgtaaccagcttttgtcatttaatgtaagttgaattttttttctgttagggaatttttctgcaggaaaatattttaaggccacctggtatgttataatacaaacatgttatatccatttgacagttgaggagctggaagtgctgagatgcaacataagttccccaaaattatgctacttgaggcacagctgacatccagaagcttctctgggaaggcttttggagttccccaaggcagagtcaacaagaacataagtttcttaagaacagggactgtgtgcctcacttactgtcatctccccagcatctgccacaaagtggacattctgttaatagttactgagtgaatagacacaggaagttcagtcttcttttttatctcatttcttgctcaaagctcatctcagcattgaacgtgtctttccacatggcctcctcactagcttctgtacccctcaagtccaggaccatgtcagattgtctttgaatccctcagccccagtcccaggcctgccctagagcaggtgttcagtaaatgactatcgaattgtggaaacagggatctctccatcctggattcaagacagcgccctccctatgaagcttttctgagctctttcacaccaaagttctcccaaccatcgtgttgacagctatctgcctgctgccctcagtccaggagcaacttggacatcagctctgcctgtcacactggggtcggcgcacctggcctgttccaggacagatcacaaggctgagggttaagtaacacctggagtggttaggaggctgggcacctccttgtgaatctcccgggctgcgtggcgggtggcgggtggctggcaggggagggacccttggcactgctgtggctttgtatttgctgccagcggggcctttgatgccccaggggctgctcgcccagccaagggcattgtagaacacaaaagctgcagaaagcagcacaaataaagtgaaagcgacccaggaaactgccagggagcttatcagcctgtttcctgatcataggtatggggtgtagggaggcacggggagcatttctgggcccggtgattgcctgcacgttgccagggcccctggtattgcgtacaaagcattaacctggaagctaagcaaggctcttcaccttgtaaaactgactggatgagtccaaactcttagagtttttgtgaggattagacaggtcgataagttaaagtgcctactctgtgtgtgtgcatctgataatgataacagtgacagtagtaataacggtagcagctaatactttctgagcatttcatatatgccaaacactgttttaactgatttttatattaattcatttaatcttcataatgacactaagaggtaggtagtactgttatcttcattttataaatgagaaaatcgaagctcagagatgttaagtaactttcttaagatctcacagcacatgagaagacaatccggcgtttgaacccggggctctggttgtgaaacactggtccaccttgctccccatttcttccccctagcctttggaatattgtgttcccctaattattatgataggacaaccatgtcgtgatgatgatgatgacgacgatgacagcgatggcggtggtgaaagaggaagacatcccttcatttcatgtagcaatctgcttcttgctgggatttcaaatccattttcattgttgatcctgagaacaagccttggaggcggaatcattttgaaatcccaggaaaccgggccttaagagacggctgaagacccgagcagtcattcggtggagtctgtgaggcccagagctgaggaggaggacatgggtgtagaaacggtcgcagcccacactgctgtgcctacagctctggatcctgactgtgtgagtgggcccagggctgctggaacctgtggagctatagcaagaagggtgaggaggttgccccactcctgcttccttcatgaacttcgttgttccctcaggacaggaaacttaggctgttccgttgacctctccagacagcttagtggtgatctcaagccttcttatgagatggtggatcacagctaccattcattgagttaagaccttcatttatttcatttcatctcatcagtagccctgggatatgcatattatatttccatcatggtgtaccataattgcgtcagttaatttttgccacggcaatgccaagtaacaaactgcagaatctcagtggctttcaatattaagcatttattatctacatatctggggagattggccaagcagccctgctgatcttggctggactgcctccatgtctagggtgtggctgcctggtggctgatgtgattttgctggagtggctggggtgtctccactctgccctctgtgtctttcgtctccttctgaaaccagcagactagctgggggaatgtcgttcttatggtgaaaagcacagagcaagacaagaccactcctaggtgagtaagccctttccaagcttctgctggcctctcttttgctagcactccattggctgaggcgagtgacctcaccacactgagtgtcggagtgggaaggcactgcagaggtgcatggtggagggtgagggtgcaggtagggtgaagagtcacccttcaggtaagggtgcaggtagggtgaagacctgtttgcacttgatcacaggtgatgtcatctcaactgtccctcaggcttctctgagctttgctgtcgtccttacttaaaactatttgcattgttagaaagaagaagagactagcaggcacctagcagtgactgaatacccaacaatccacttaaggagatgaatggtatgattctccgaggctctgtgggaccacggggctttatcaaggttgcctaacagagcagtggctcagccagcattgaaatgtcacctgcctggttcccatgtgtgtgtgcatgtgtgtgtgtatgtatgtgtgtgtgtgaacccaaacctgtgcccaagtcagacttatgtgactcttgcagccagttctccctcacagtgttgcttggaaggaaactggaaggaaaagaagctttaggagagagaaattgtgacctcctttccgcaggttgctatcgccacaggctttccacaagcttctccctgggcggccaccccagaggctagaacatagcagaggatttttcgtaaaatctttggagtcttcagaagaaggtcttttgagataggtcatggagaaatgaggcctttgagccataaattggccatagtgtgcaggctggggcctcaccagttcagcgaaatctccagccttgagaactgaaactgacttggggctctgattttaacaatggccttgaagtaaggcattcctccttgtgtagttggagctgcttcccctcctcctttgttccccttcaccatggcatagccccagggagtcccgatgccaaattcagtctttggcctgtatcctgaagtcaattcccttaggaatacttttcttcacttgcctgcctgaggcccctctccacacttttgcttgctttcccatgttaagaagacgtatttgaaagtgattcctgggtggccagagtcagaaggctgggcaaccatctgccttgccggccacctccccagccctgccgagctgtgagcttacaggtggtaccatctgcacttctgcacctttttttttttttttggccctgacctttggcctaataaaagcaaagtgcagagctttgaatgagggagatagaaacaagatgttctctacctcccccaccccctcttttctctcctccttctcctcctcctcttcttcctctttccttctctacacttagtctgtgccaaacataaatccagggatgtatttatttttcccagtgaactaaaggtttataaggaggatgcccttttctctgcaaggactggtattctcttcccttggaaaactcctgttcatccttctggatctgggggaagaaacccatttccctcaagactgttctcaccacctgggtggagttgctgactttccattttggaacattacacttccagggcttcgctctggtccagaatacacttactgtgctgttctagctcatctcttggtgtgcgtgtcaactgaaccatttgaaggggatgactgtggctcctttacttatctctgtgtcctctgtgcccactacagggtcaaacacagcatggaagctaaacatacatgtgcaaaatggacaaatgtaggtacaagcaggggcacccttagttcagaagggagcttgggctccagatcacttagctctaacttggaagctggaacacctggctctgttacacagacaagacctgtgtctccatatatacaatttattcctcacacttggcaaatgtgtgccgaagctgaaagagctcaaccttagagtttgacaggttcaggtttgaatccctgctctgccttttcccaagcaggggactttgagtaaatgacttcactgctgcctttgccacagtttccccatctgtaaaataaacatagaaacacttgctttgcctgatttgttgaaaagaatagagatgatgtttgcaaagtcctggcatgagcagtagctattatggctattttatttaccctgaaaagcaactgttcatagtatcacaaggcaggcaggggtagggggcaataaaagcatttgtggcaaggatccagttatttgcaggcttctcttctgtctggctttgtttactgtcatgcaggaaaagtgccttcaccagggcacagcagtaaacctgttggctactctagtcctgcctgggttcccaggaaattggcatgagaggagctgcctgctgcttgtgggcctgctatttaggctgcaatagctgtgggaacacacagggttaggaaaacaaacacatgactcattggggacttccgacctcaagccaatgaggtgctgactccttgcaatttctaagggttcccagtacatatgtatatgtctgctcagccttccttggacctgagcccatctgtctctgctctcacactttgtggggggccaagggatggaatgcttgtgttcctacccttcatccctccttctgcgtttattgagccttgctaggtgctgggaatgtgatgacgagtaagacagtgcagggtacagacaagtcaacacatgtggtctgctggacagcagccccccaagatgaccataatccctgggaccttcgactgttatctcacatggcaaaaaggactttgcagatgtgattaaattaaggatcttgagatgggaagagtgctgaattactcaggtggacccaaagcaatcacaaatagttacttattagtggttccttattagagggaggcagagggagactgaataccctagaggaggagatatgaccatggaagcagagattgtagtgatgcagccaggagccaagaaatgctggcagcctctagaagtggaagacaagaaactgattttcctttggagctccagaaggacccagccctgctgatgccttgcttttagttccttatgacttagttcagcctctgacctccagaagggtaagaggataaatttgtgttgttattagctgccaagtttgcgatgatttgttacagcagcgagaggaactaatacaatgtgtccttgcagtattctaagtgttaacaccacttccctagtgatgaaggagactgaatggctcagtggttccgaggtagatccctggagtcccagtgctttggttcaagttcacgttcaccttttgttagttaaggggccttttgccatgttacttctcaaagccccaggtttgtctgtcatctgatgtaacatcatgatgtaaaataagggtaatagtgatttccatctcatgcatggtggtgaggattgagctgtgaaatgcacttgaagatggctgtctggagcacagtatgtaccccagcaccttcctcccgtgccttacctcttgtacctcgtcatcgacaggaaggcactggatgctggagaacctctccacagggatgtcacaatgcagggcaatgtctgcagaggtgttctgggctgaggcttctggataggattgataggacatttagtagttagcagtgggaggaggcaggggtgcccgagacccagcgcttctggggggctgggcactgtgctgggccctcagtagtttagtggctattctgaaacagtcactcactcctgatcctcccgtcactgcagttcacaggcagccttagttttacctctgtaagctactcatgagcatacatcattcttttatttagtaaatgggaatcttgcccctgtcatgtacctgtcaggcattgcaggagtgagtggaagctgctgcagggttaccgcacctgggttttgccagaaaggtaatagaaggctgtcaaagcagctcctggaggacagttgagcaagtgactgttagagaaacctgaggcttcgttagggccaggacttggctgcagggtgctgttccattcctgcctgcctctgctgcattgaggatgcagcctccaggcccaccatgggtttgggctccttccctgggacatttgggatgattttgatgcataacttgctgttgagattctcaccaaatagctgcctgggcccctctcctcctgaccagtcagccaccgccactgccactgccagaggtccacagatggaagctcccccaggcagtgggaagaggcaggggtgcccgagacccagcacttctggggaagttgggcactgtgctggggccttaggccctgcagtcaccactcctctgaggggcaggagccactgggtccattttacagtctcctcacctgtctttcagttggtgatgggacatacgcccatttgttttcattttgcatgtatgttcagaggggagtaatcattatcactgcttccaattctataatttatgtgtttaatggatttttcaggtgtgggtttgggggagcttgctttgattcgctatagagaatgttcttttccccacctggaaatgcagttgtcattgttattgtgttgttgcactttgtttgcattcctgaggccgtgtcggcaacaggcttggaaagggaagtgggggacagccttgaagcatctggcctgtaagtacagtccatttggagggaggatctcaatgcattttttagcataaatacacgctaggctagctgtgcccacagacagaggaggtacccaaccctcccacgttctctgcccttgctgagaagcctgggttctgaaccccaggcctccgtgggacacagagcttctcaggagcacacgaagctcagtctctgcccctgccttccaggtaaacacaaatgctgctcgcgttggtggcttagagcccagcagcacatttagttcagtgcctttcctgggcttggtgggcaggtgagggtgcaaagtcacccttgatgaagaaccactggtgtagactagtggttcccaacatttgctataccagaaatcccttttactggttctccttccctgtgagggagtttatcaaccaaataaacttcattgttaagtatttattcctctactttcttatctaaaaatatctgccagtgggagttcctgatctgggtcaccaggctgagttgatataattctggccagtatcgaacaaagaagcttgatattttaggtgacaaccgtggtcttattggaaaggaaggtgaaatttctggtagacttcttgacccttcgaaaaatagactgaggacccccgtggaggagtcctgagattggaatcgctggtataaacttttattttgctgtttggaattaagaatttggatcaaatgttgatggaaggtttctttgagctccacatttccctgggagcctccatcctgtcttgtccccttttagcatgagcagtgtcattattcagcatgtatttagtcagtgatcgccacatgcctggcacttccctgggtgtgaggttgccgcggtgaacagcagatgcagacatggtactaatggggtctgtagccaagtgagggaggctaagaaagaaagaatgtcatttccagcagtgataagtcctaagagggaggtgcggcacgtgaatgggcttgagggtgctggcctctggagtaacaagcctctgtaaataatcaagtcacccatatcccagccctgccctgaagcacagtcttcacttggcctgtttaggatcatttcacagattcattgacagggcccagttcctgctagttgactccttggggacggaatcctctattgcttgcaaaaatatgctctgcagtaggctgtgtcttgctaattgagagggattctgagaagtggagcagccctgcctcactagattcagtaagaggaggccttataggtacgttgaatctggcctggtggacaaagcaccctgctgagagctgggcaggtcttcggaaggagatttaatgttcttcagtaggaaacatggtaattcctctctccctctccagatgtctgcaaccaagtcattataacacagaagggaccttgcagccattgtgtctttgtgctcaggtactgtctgagggagggaagggaggcagaaggaaggggagggacggatcagctccatttgctgagccaacctactcagcaccaggtgcccctcctcttggccactggaaggctttctttcttctggccacaatcaaacaccgtttcttctttctgccttggttccctgtgagtcaatgactgttgccgtgggaaatagtagctgcttggcaggggagttcatgaaggttgcagagcacctgctcaggttcttgcctcgcctcccttccccctttcctccctcctcccacctttccttacctggcagctacctaattcttctctttcaaaatacagttcagagaacaatccacaccagctggttggggaatcatccaaagagacaatttctaccctgtgcccacctctcctctagttaacacctttcagtgttccctcccttcctgttgtccttaagttaatgccctaaagtcatggcccttgctcagcctctaaggccctggtgggtgctgcttccccttgtagctgggtgggtttcaggaaatgccccatctggtcatgagagataggcagccatacctcaggggagatggtggctggggagacagtctagccacaaagagcaaaaaagatagggatgagatggctcagagggagtcttggtaaggactttggctctttctctgttgagatgggaccatcggaaactttttggcaggttctgatttgcattttaatgagatccttctggctgctgtgttgaaagtggactggaagtggcaaagatggaaagacagaccaatcaggaggctattgtggtaatccagggtattgcagtaatcctggcctggtggaagcagaggagattgtgagacatgatcagattcagaatatatctcaaaggtaggatttgctggtggattggctatggggtgccgtaagaaatatgatcccgattgttgattatcctgtgcaactacagaatgaagtttccatttattgatatgggccaatcctcagggtgagcaggagtgcctatttgtttttttgtggatagaggtggaattgttatgttagagatgttggtcagacatccaagtggagacagtaaggaggcagctgcatgtacagatccagagtgtccacttggccaggccatggtactcagacatgtgatcaaataccagttgagatgtcacatggagtacgttttgaatgaggttaacatttaaatcagtagactttgaggaaaggacattaccctccacaatgtgaatgggcctcatccaatagttgaaggctttaagagtaaaaagactgaggaaatgggaagtgggaattctgaccccacattgcctttggactcaagccgcagtatcagctcttcctaggggctccagcttgctggcctgccctgcagagtttggacttgccagcccccataatcacacgagccaactccttaaaatctctctctttctgtctctctcttcaacatacacacatcctactgattctgtttttctggaaaatcctaacacatggaagaaagggataaatttggatatccaaaatttatgcaaaaatggatattctgatttgtatttgggacttaagttatttaagccttaaatatgagcgtgatcatcaagagacaattgtgggcagagaggagccagtccatggggccgcacagcacagattaagagattcagaaattatgtgtgtatgtttgtgtgtgttatatgtgtttgggtgtgagtgcttgtgtgtgtgtatgtgtttttgtgcttttgtgtgtgtgtgcttgtgtttgagtgcttctgtgtgttgtttgtgcttgtgtgtttgtgtatgtacatttgtgcttgtgtatttgtatgtgtattgtttacgtgcatgtgtttgtgtgtatatgtttgtgcatgtgtgcatatgtgtgtgtgcttgtatatgtgtgtgttttctgcttgggtgtgtttgtgtgcatatgtttgtgtgtgcttgtgtgtgtttatgcttttgtgtttctgtgtgctttgtgctcgtgtgtgttgagtgcctgtgtgtttgtgtgttttgtgcttgtgtgtatttgtgcatatgtttgtgtgtgcttgtgtgtgattgtgtgtatatgtttgtgcatgtgtgtgcatgtgtgtttctgcttgtatgtgtgtttctgcatgtgtttgtgttttgtgcttgtgttcgtgtgtttgcatgtgtgtttgtgtgtgtgcatgtgtgtgtgttgtttgtgtgtgtgtttgtgcatgtgtgtgcatctgtgtgtttatgcttgtatgtttgtgttgtgctcatgtttgtgcatgtgtgtgcatctgtgtttatgcttgtatgtgttgtgctcatgtgttgtttgtgtttgtgtgcatatgtgtatgtgtgtgtttgtgtgcatgtgtgtttgtgctcgtgtgtttgtgtgcatgtgtatgtgtttggcgtgtatatgtgtttggtgtgtgtgcctggtgcgtatgtgtttggtatgtgtgtgtgtgtgtatgcatgtgtgttgtgtacgtgtgtgtgcttggtgaatgtatgtgtgtattttgtgtgtgtgtttgtgtgtgtttgcgtgtgtgtacatgtgtttggtgtgtgtgtgtgtgttgtgtgcatgtgtggtgaatgtgtgtgtattttgtgagtgcgtgttgttcgtgtgtgtttgtgtgtgtgttgttcgtgtgtgcatgtgtttagtatgtgtgtgtttgtattggttgctgagcacttgctatgtgtcaagcatcccctattactagatgcagcctctccttaaaacagtttggatgtcatcatggagagccatctatctccttactttttctggaagtttgggaagggattctcatgggccacctatgtatttgactgatgctttgcagttcctgtatcacagtccctccagtgttctgggcagcagactggcatccagccattccttctcctgtgtcagaaattgattattctggcatcttccttccatgccattttcagttcccctaacctccagtctcttgaagccatttagcatctcttggtactgagtaatcccgtttattaaagcatgtgaagcttccttaatggcaagtgttggtacaaatagttttgcagccccaagggacagggtcatttgaactcggtgactggaaaaatggttggtgtgaataatgtgaagtgcaggaccatggtgatgaatttccttcaccctctttgttccttgttttctttgtaaggcagaatgtttaacccatattttccaagaactgtgtaggtgggttgctggggacaattgatttttagagaagtattatttctctggatgtagaaaccaagaagcaaagaataatattgagcaagagtcctcctgatgaccaggcctgggctaattatggcgatagtgttgcaatgtgtttggaccatcatacagtataagaacaccacttccccccaagatgtgcaggacacaggatactccccagggccttgctctagccccatgtcacccaatgtcaagtggatcagctactttctaagactgtaattggtcctgaagaagaaggagtggagcctggcaggaggaagggacacaggtctttgtgtgaggaatactaactggtaatggtagttctggtactgccctggcttgctgtgtgagccttctcacctgtatgagcagtgggatcaccatctatgaggagattggactaggtggtttattttattttattttattttattttattttattttattttattttaagagagatcttgctctgtcacccaggctggagtgcagtggcacaatcttggctcactgcaacctctgcctcctgggttcaggcaattctcatgcctcagcctcccaagtagctgggattacaggcttgcaccaccacacctggctaatttttgtatttttagtagagacagggtttcaccatgttggccaggctggtctcgaactcctggcctcaggtgatccgcctgcctcagcctcccaaagtgctaggatcacaggcgtgagccactgtgctcagccttggactaggtgctttctaaggagtggggatgggtcaatgggagggtgccttccctaaataaaggggccagccctccattagcatccacttaatgttgtattgtgggagggtgcattcagtgctgccaaattaatttttggactttgaatataatgaaaatttctgaattttggatgtaggcaataacttcaaaaatatttgaaacaccctgtgggttagatctgtagctggataaagccccctaggacttcacgttgcaactcagcattcctgaattgctctccatggcttctcacaggctgggggtcaggaggtgagggaagctcttttgatttgttttgttttgaaatcagtgtaagtatcttcaaggaactaagagaacaaaatcagactggaagctgggtcacaagatgctgttgcctagagacttagacagagggcatggcattcgctcgctcatagaaggagatggcctacggcaggagcctcagcagcccatccccctgggattgatccctgtgtcctccacctgctgtctctggctctgtggactccatggcattcagagctgggggaaatcaagtatttcaacatcttaattttttcagtcgataattatattttggagatctttgtgtgtccgtatgtgtgtgtacacatacattattttttaactgctatatagtattattttcccaaactatttcctacacacacacacacacacacacacacacacatacacaaggaggccaaacatcttgtcttttttttttttttttttttaaagacagggtcttgctctgtcatccaggctggagtgcagtggtgcaatcacggcagccttgacctcctgagctcaagtggtcctcctgcctcagcctcccaagtagctgggactacagacatgcaccatcacacccggttaatttttttattattatttatttatttttttttttttttgtagagaaggggtctcactatgttgctcaggctggtgtcaacctcctggtctcaagtgatcctgctgcccaggctcccaaagtgttgagactacaggtatgagtcaccgcacctagccccaaacatcttattggacaagcctttcttggccactctatgcagacagcacccacctcgcacctccatctcccctttttttttctatcttaattgatcaccatagcacctatcatcatctgacccagcatatagttacttgtttatttgtttgttgacagtctgacacccccaacccctcatgaaccccaggaatgcagagacttctgttaattttattaagtgctttattccctggaaaatggtaagtgcctactaaatatttgttaaatgcataagtctctattttggagatgacctccacacccagcctcaggcacagagatgtaaagtaacttactcaaaatcacccagctactgacaggcaaatctgggcccagagcccatgctctaatctaaatcattactacctccctgctggtaacaaacaaaacctcagcacagtgcctgcaacacagtaaggactcagtaaatgttaaataaaggtaataatgcttataacaaccatctttgcccccagaaagatccttaccttgaggagatagcaaggatttgagatgttcaatataaaataccaagtatggtgcctgtgcatagttggccatcaatgagtggtggctatttactattatacttgttattttattatactttagcacattgtgttgtacttaaataccacttgtttgccctacttatctttgtccctcctgagggtgcggagtgagccttattcattccagcattcctacaatcttgtacatccatacaattcttgatatgtagttgacatacactactgtaaggtacatgaatgagtaagtagataaaggaatgaacaaatggaccagtggtttgttggggccactctggccagtggtttggggacatgcttcctggagtcttatcccctcttgtcagattcaggtttaggacaacggtacagttgttccattgttcccagataacatatcctatcttaacgtctttgctggggcagcccttggacacaccctgagctcctgccctatcactggccccacttgtaccccttgtgggcaggcaccacggcagcctgctctgaagggagctttcatgtggccgaccaactctactccttgactcctcccttctctcattgaaaaaaaatgtttaaggggacatttctctctcctaaactttttatgttccattgaagacctggaaaacatgttaaataaaaatgctttgccacagctgacctatgtcttctggcttgtaccccacaacatcttatctaatgggtaagtcagttcttatctttatttcactactgaagaaactgatgcataagtgttatatgctttttaagttacgtagtattagtgaaagagcctagggccagaaccagctgtctgcacgcaacccaatgctttttccacaagagttacccacatggctgtatttgttggtattttctacccttacctgcttccagaagactttggaagggtgtgttacaaaagcagtgatccagggcaactttcaagtctgttagctccttgtgacaaccgagctgccctgtaaggcgtaatgaggagcggcttcataatgagctgaagtagttctgcagatgacactgctcaaggatggggatgctttcctctctgccatgttttcctttcctgttggatttgactcttagatcagttgttctaagactgggttgaagcttggaattgcctagaggattttttaaatcctgctgctagtaccccagctgcaaagattttgattttgtctgaaatgggacctgggcatttggatttataacatctccccaggtgattctattatgcagtggagtttgaggaccacagtcttagagcatccctgttatagggattctggggactaacaagaagctacagaccccaaactatttcagatgtagttccagccctcctaagcaagtgttagctcgaaccttctcactcttgctcagattcatagctgctcacctttcagaagaaatgacaatgctgaaagaggaaaccaaggggacaagagagatggcagccatcccaacagctgtcttgtgttgtgcccctactgtgtgccagacactgtcctaagcactttacttatattaactcatccagctcacaaccaacaaaatggccctaagaggcctctgctgatatccccgttttccaaatgagaaaactgtccacggggtcggtcagtaacttgttcaacctgggaatggcagagctgggatctgaagtccgggagcctggctccgtaggcctctgtttaagccactgcatctgttgccttgtggaatgttcttagaactgtaggatactggttcccacatggccgagagtcttctctcactagttcgtgctccatggtgatggagaagcatagttctaatctgtcattctgttgctctggagcctacacagccccccatcgcatctggagggagaagcccagctccttagcacagcacctgagaaataccctttacagtctggccactggctgaacattctttcactctccatgccacactgctctgtgagtaccatctgaaggtcctctcccttttctctgtcttctaaatgttcactcttcaatatctaactcaaatatcctcttctctaacttgtccaggaagaatgagtaaggccctttcctttgttccccaggctcttagtttctccatctctaatcacgtagattacagccctttctttggttttctccaggggaccaaggagtggggctctgcctttctcatgtctgctctgccttcacggtcccccacagtgtcttcagtggatggccaacctctcatgaacaggatgtcctcttgtctgaggttctactttgttccagccatggagtcatactctctttatcttttgactatccaaaggtgttctgttggacgactgatgccttcctccaaggtactttgggctcccaagtgtgcagttgacatttgctgtgccttctccaccaggctttagtttttgatgtatgctgagcttcagtggagatttgctagccttgggctttctgtgttcttgaatctctcagagtccagaagaaaaggaaagctgacactttctaggaatgacctgtgagaagagaggttggtgtcttgctgctaagttccgcttgattctgaactaagtcaccatgggccagaggaggcagggataagaggagtggtttcttggccaccagaatggaaacgtttttgttttcttgtgtgcttttgtggaaatggtggcagttgctcactaaagagaactaaaacccttttactagagccccaccaggtctgaagaggatgggcgcgtgggagccattatcttgtaaaggacgctattgagaccttgctactgctgcagtgaagagcacaggaaaagccaagcttaaaaaacactgggcgaatcctaagaacttttcatgcagaaacacatgcatgatgagaagagaatcttcattacaacattgtttgacacagaaaaacgagactcagcttaaatgctcattagttagtgattggttgattaagttgtgataaaatggaacactaatacagctgtttaaaaaattagtaaaaaaaaatcagtatgtgagatgatgcacctgttaattaactcaacttagccattccacaatgtatacatcattcaaaacttcacatcatatattataaatatatacaatttttatttgtgaattaaaaattaatctaaaaaaattagtggctatatgaagtaattgggaacaatcttgaagctatattaactaccaaagagcaaagtcaaccttaacaatgctgactttttaaagaatagtgcctagaacactgtgtggagtatgctaacagctacacactaatgcacagccaccaaccccagatcagttacgtgaacttctgcattcacaaacacacttaacacactctgtggctattgcctctttactgacctgtaagtcagttctagaagacagacgatccatgaaggcaggtcctagcctgcccatttgcattggtatctccaaggccaagctagagaaggcacacaataggctttccactaatatttgtgaatgaatgaatgaacagagagaggagttttctttccacagtttccttctacctgctactccttgagcatatgaggctggaatctaagccctgaggtcactcactgctctcctgggtactatccctggcctcccgtccttttccttgagcttctgtgctctgcaaggctttctcattatcctttaggctacagagaaacaaggagacgggagagccttgaaatggaccttcaagattacaatgtgtagctgacattgtcagttaagttgggcagatctgacttcgctgattaagtggatgtatgagccgatcctccccagaagctgggatcagcttccccatctgatggtgagtcagacctgctggggtttgggtcctcgctccagcatggctgcctgtgtgaccttggccactttacttaaccttgctgaatctcaatttcctgatctgtaaaggaagctaaaaatgcctctcttgaggttgtagtgaggattaaatgtgatagcataagtgaaagtgccctttgaagaaagaggaaggcgaaagcgcttattgtgtcaggagaaatgtgtggagagccccctgttgttctcaggtgtctcatccttcccagggaaaaatccccatgccaagtcagaagaggttataatttggctcttactcttttattcaggcacttctttcggctgcccagggttttcagcttaagcaaataaattacccttctccactggactctgtgttctgcagccagccatatgtttaagcttgatagagatttttatctggcttggtaatattacccagcaagggatgacatttcttatcagaggccctgaggaatcagagataggagccctttctttttcctggccgccaggcctccatgtgcagggctggcagggaggctgggaggggctggctgggtctggtagtgggcatcagctggccctcatttcttaagacagcacttctgttagctgacctacacagaagcaggtcatttcgagatgtttgcgtcttggagccactgatagaagcagggcaagggagagtgaatgaggaaggaaggcgggagtgtgatgacgcatgcccagctttgcgcggaggcagagcacttgcctgtgtggggccctgcccttctcttgagaggcaggcgggccctagctgcagcgtcaaggtctggggattctgtggctctgtagggtgaagggcactggagacctaccaggggctgggccattggagtggtgggtgctggggagcttccgtgggcccctccaggtccactccttgctcttctctgccttgttttgtgcccagaaggctgacctgtgtggatgcattatcagggtggatgcaacacagggctgccatgctctctggtatcagtttggaaggcactggcaggatgggaaggcaggcggggagtgaggtcagggggcctatccttccactgcctccctgctgctccctgactgattcaggtaaggtttacaccggggctctaggtttgaattttgattctggcatgtacttgctgtgtgatattaggcaagtggtggaacctctctgtgcgtccgacttctcatctatagtaacgcttttgcattccattgatctctttgcctctcatttgccctgaatgctgaaggaaaggacactgctgtatcccctgagggactgtctgagcccaaagtacactggggacaagggcttcagggtgggcaaggagatgaccgatgatcacgtgatttggaactatagcctccattggagacacgtgctctgggctctttccctcctgagttttgggaagtcctggcctgtgcagcctaattctcaagtactaatcttgcaatcataagaagaggaaggagaagtggttttccctctccctggacccattccagccagcagttcctgactttgcttccttcctgttggtgcccactctgtttccttccatcccttccccaacctctcccatcccatgcctcatgttgggcaacttgagtttaactgtctcttcttccagtggccaagtccaaattctgaaagcacagttctgaccatgtccctgtccaactcaaaaacagtagctccgtgtcacccacaggcttgaagtcagacctctcagggggcattaagtccaccgcaacatcactccagcctgtgaataaagactgaatgcctccgagcctcttatgtggggaatcagttctggtaaacaggtctcacttcttgtcttttaaacactacttgctttccttgacgtctgtgctttgatcccattgttttttctcccttggatgcctgagagatccatgggctctggcttcagagagtgctgggttcagacctcagctccaacagttgctggctctgtgaccctaggaatgtcacctcaccactccaagcctctgtatccttgacattaacctgggctgatagttcctacctgcagggttcttgtgagaagaacctgtctaaaggctcctactggggcttgacttgtcagataaatgaatggggttttccctaaccttctaattgactaccccactgattattcaaactccacctgtcctcaagttccattccatcattcacttcctctgtgggtttttctgccacaaagtcatcttcctctgtttgaaagactcttagttcctcatgtatgacagcaagagtggacctcatctctttctttttgtgtctgacttcccagcacagtctcaatttcttcagggcattgactgtggtgtaagattctcagcttgagcactggaaccatttatgggacgattgagtattcaactccaagagaatgaaagagagtcacttgttctttcattgaacgaaattgattgagtgcacatgatatgttgtgtctgtgcttcacactggagttgtaaggatgcataaaatgaagattctgtcttcacatagcctatcatccagtgaggaggttgcattattgggaatctgtgccaagcctggattgcataagacataggtagctgagaacctggtgctgactggggactgggggaagttctgtgcccaaggagaggaggactcttcccttcagatggatgcccataattttatctttaacttttaagaatttggctttaatgtgcctcaatgaagacctccttatgtttaataaattacaaattatttggacttcatggattgagatgtttattttcctctccagatttggagagttctatgtatttttttctttaaataaactttctatcaccttctcctctgcttttattcctcctcttgagttcccataatgtgtatttcagttcacttgatggtgtcccataagtcccataggttttctttttcatttttttttctttttattcttctgactaatttcaaatggcctgtctttgacctcattgattccatcttctggtcgatcaagtctgctgctgaagttccttatagaatttttcagttcagtcattttgctttaccaccagaatttctgtttgggtctttttttatggtttatctctctttgttgaacttctactttgtttatgtattgtttttctgattttgttgtttatgttctctttaagttgagtttcttcaagacaattattttgaattctttgtcagacaatgtataggtctcaatttctttaggattggttactggtgctttagtttgttttttagtcatgtttccttgtctatttgtaacccttggggtcttgtgttgatgtctacatattttaagaagtagagatctcttttattctttaccaattagctttggccaagaaagctgttcaccagtcaagatattttgggtggattggctggcagggtctgagggcaagtttactgctggaattcttaagcgggctggcctggtgcctgagtccatgggtacaggcctagattctgggtccctgggggccagactggcactgagatacagtgggatggctttattgactgtgttcatgtctgtagcatgcgtctgtgaaggccaacctggtactaggatctacactgatgttgggtgcttacttcactctccttcctccacatgaagggtttctctcttcatgctgcactgtgctgtcttgggggaagggtgatgtgagtgatgtgaaactcttattcctacccttttcaatgcatcttttattatttctatgctccacccagctgctgtaattgctcatctggatttcttagctcttgtgaaggtatatttttcatgggtggttgttcaaattgctgtttctatgaagggatagacactggagactactattctgccatcttgctcacattactcttctcttcatagtattatttaaaatgatacatttagttttgtttatttcacatctgtattccttcactagattgggatcctgtaaggggaagaatgaggtcaattgtgtttaccacagtcataacaataaaaaccagtgctgttgtcacactatgtgcagggcacagttttaagttctttatgtttaccaaattattttatcctcattagacccaactgagatatactgtcacttcattttacagatgaagaaaccaaggcacacaaaggctaagtaatgtggtctagctctcctatgaagacagtagatggtaaaaccaggattttaaacctcacagtggctccaggatttgtgtatctaaccactctgccagacctttctagtgctttcttctagtaaccaccccagcaaagatgctcagcaaatgggtggtgcatgaaacaaagggtcattatcctatttcttgggtaagttctcactgcagtttgtgctctgggcacagagttaacagcatagtaaagaggaggggacctggatctaggaatttaacacagctagattgagatctgagctcactcatcactaagtgactatgagcaaagtgtttaacttcattaagtcttggttttgttagatcaacatggaagaaatgcattaataatttcctattaatcttacattaatggtggaaaaaatgagagtatagattatagtgggtgctcagacagtgtcatctgccatcttggagggctatatatacatatatatatacacacacacacacatatatatgtattttatatatattgtatatataatacctatatatgtgtattttatatatatgggtattatatatataggtattaatatatataggtattattatcagctttagctttttcatccatgagatgagaatttgatgtagtcctgcctgatgtccacacaggctcctcagaatggctttgttttactagagatgttacccctaggaaacaagctcaatcccttgcccctcagtggactagaggcagcatgtttatgagacaggaaaggatgtgagtgatgtgagtttcttagctggctttggaacagaacagaggctctttacgatgatgccagtgctcctaattaattatcataacaagtctcctgttctcagcatctgtcagcaggtacagctgcaccagcacagtggactggctgagcaaccagaagggttggggcaaggccaggccagggcagccagcctgtatctccaagtgcccagctggttccgtccttgtatctgacagggccctctgatcttcctgcatacaatggattgcagggaaaaagaaacttcctggcctgattgacacaaatttgtaggaaacagctgcctttagtggggacaaaaaagcaaaatccagtgtgagtgataacctcttgccagtctgggttctgggttgcatatctgctggtgactataggaggtggtgggaggatgtgaattcctacaaatgctaagttagcatccagtgtgtgacaacagggtgagaatctcctattggttctcccaacaaataggaagagaagagcctgagttttgggggttcccaagtttttgaggtttcaccagtgacttactttattgccaccaggaagtgcatgatgcactctgtaccccactttctttgtagtggcaaaatgggatttgttagatttttttcccacagttgaaaggaggttgctatggcaatgacctgtgcctaagatgaagttgaagagaagtatggaaagaacttgacagttctttgcagaacagcaagctt

SEQ ID NO: 48 - DNA, 120697 bp, Homo sapiens
gaattccacttacgggtatgactgtggggtatatgctgtacccattgaattcccagagggatttgttaagtggttgtgttgctgttttgcctggttaagagtggcttattcttgttgcctcatctatcttgagtgcagaatttttgcataaacggcttctcttgaaaaatagaagtccgtttttgttttgttttgttttttttctgattaactttccttttcctctgtcttaaacaccttcccccgcccctcgccacctccatgctgtgtttctgtggctggagcttttctgcactggaaaggaggagttctcccctctgttctgacatatctgatccccactagtttatatgattgctggtctgaaaacctggtgaattctcactgcccacatcaaatcaattccctgttctttagttgttttttttttccgcctcctgagcggtaggcaggcactctggctggattctggagcctgtgtttgccatgcctgggccttctgcctgcccaagatggacacgtttctctggcagctttgtcaagagatctcctggactataagacaccctgttctttcctcctgtttgtgtgagtggccctgcatttgggcagagtattggcagaatatctgggggaagtggaagactttggatagttgccggtccaggtcgtctggagaggcagtggcaggcctgctgatggctgcccctttgctatttgttttatatcaggtggcccttctggatgtgtggcctttttattttgcatttcctttcatagttggctgcagacataagattcttctttttctcttgttttgcttttttttttttttttttgagacagagtttcactcttgttgcccaggctggagtaaaatggctggatttcagctcactgcaacttccgcctcccaggttcaagcgattctcctgcctcagcctcccaagtagctaggattacaggcatgcatcaccacacccagctaattttgtatttttagtagagacggagtttctccagattggtcaggctggtcttgaactcccagcctcaggtgatccgcccgccttggcctcccaaaatgctgggaggcctcccaagttgctgggattacaggcatggaccaccatgcctggctaattttgtatttttagtagagacggagtttctccagattggtcaagctggtctcgaacatctgacctcaggtgatctgccctcctcggcctcccaaagtactgggattacaggtgccacagtacccggccttgttttgctttttattgtttcctgatgcaggtttgtgatctctttgagggatcaggaccacaccccccaccccaatttatattcccagtgtccatggtgggaccctgactgaggatgggaacagagcaacaatctggaatcatttggaccattgagtcctgtggacagtcacttcaatatcatccctagagagtctcagaaattcaaggccttttggaatgctgccaaaatgggtcctttggcaggagccccctttgtctcttctgttttctgacctcaaataatctaaggaactaataacggtaataaataacaattaataataagaacaataatagtgcatgtataacatggacattgtttatcacgcaaagcatgttcttcaccttctactccctacaactccatgaggcatttataatgaaatgtctagcaatggtagacttcttgttgtggggcagggttggttctaacacttcaaattatatgatctcatttaactttcctataaaataggatgattattgttgtggttttgcagatgaggaacccacagcccagagaggttaaaaatatcctcccaggtcacacagcttgggagaggcagagctgtagagatttggaccacagtcttcgacttcttagtgtgactctcagaagttagaggataatgaggttaagaacaagcaaagggccgggcgcggtggctcacacctgtaatcccagcactttgggaggctgaggcaggtggatcacctgaggtcaggagttcgagaccagcctggccaacatggtgaaacccggtctctactacaaatacaaaaaattagccgggcatggtggcgcacacttgtaattccagctacttgggagtctgaggcaggagaattgcttgaacccgggaggcggaggttgccgggagccgagatcgcaccattgtattccagcctgggcaacaagagcaaaactcagtctcaaaaaaaaaacaacaagaaaagggtataccccttggccttgagcaggagaacacagtgtgtcccccaccctcaccgtgcaccttaggcacaaacagaaagctgaacatcttgcatgaagatacctcatgctctgcctgccgaccttttctgcagccacggagcagtcagagacaaaggggccaagaggccttaggtgagggctgccatgctggaaagtttgggctgtgggtgtgggcaggagtcatgggtagaggtcagaacccttagtcttggctgggtgcagtagctcacacccgtaatcccagcactttgggaggctgaggccggtagattacctgaggtcaggagttcaagaccagcctggccagcatggtgaaaccctgtctctactaaaaatacaaaaaaaaaaaaaaaaaaaaaattagcccggcgtggtggcacacgcctgtagtcctagctactcgggaggctgaggtaggaagatctcttgaacccgggagacggagtttgcagtgagctgagattgccagtgcactcctgcctgggagatagagtaagactttgtctcaaaaaacaaacaaccgcctcggtctttgtgcaaaatctataatcatttgcaagaggctgcaatcaggtatagcactggattttgtgaccaaaactaggtttcaggatttaattaaaaacaaaaacaatgtcaggtcataaaacacaagacatatacatgatgtggaaatggtcttattcattttttaattgcgaaattccgaactatctgttttttttttcctttatcttttcctttttgtgtgtgtgtggagttaggtggggggggaggtatggcatattgttttgtttatctgcctctttattatcactgactgtgaaattcttgagaacaggggcgtctaagtgcccaacacagccctggtactttgttgaatcaggtggctgtcaagagctgctgcttcagcccggcatggtggcttatgcctataatttttgcactttgagaggctgaggcaggaggattgcttgagctgagaagtttgagaccagcctgggcagcagagtgagactctgtctctgtaaaaaataataaaataaaaattaaaaaataaagaaagaactgctttgtcttcaaggaaacaagatacacagtcaacagtcattatctttttagatatgagacagcttgacatggtgtggaagtggggggcttgcctgtagggaaagtatgctgatgaaaaagaaggaaaacagacagtagcaggaggcagtggggatgtgtcagggagctgaggagtgtagatctggttacttttgggcaagttacttctctaagcttcagtttcctcatctataaaatggtttgctgtgatgacgaaagagatgatgaacagaatgtgtctggcagaggacctgggctcataagtgagcacacagtaaaaggtagctaatatcattactgttccaattattgagctttattacttcctgtggctgcatgaagtagtggtttctgaatagaaaggcaacattctagttgcctagatcttaagatggcagtgacttcactgtagttctctgcaagcatcagaaacaagccctggcttatgtaagttagaaacagatgagaaagtaaataaagctgcagaagtgggtctcaggaaggacaggaatcaaagggctgtccctcggatgtcagactgcctttgcaagttacttcaggtcactgtgcctccatttcctcagctgctgagcaggggaggagaatcacttctccctccctgggatggtgcagagcacttagcagagcacttagcacagaggaataagcccttcagtaaaacatttgagtaaagcaattattatttattattcttcagggctctttttttttctggtgcattagccctaacattgactacttggttcaagagtgatggatgcattcatttcctgagcagttgctgtatgcctggcaccgttttagctgctggcgatccagcagggagcagaagagacaaaaatccctgccctcctgaagcttctgtcctagtggatgtcacacagtagtggggcaggctggtccccagagacagctgggggacagatggaggcagtgcaggcaaaagctaactcctgtgcaaagtctccccggccccactgtgttaacagtaaagtgcttagcagaggctcccacacatagtagttactatgtagtggtagttgctatgtttattattattatattattctcctccctcataaaatggcagcctccctttcttccattccccttcctgagttattttttctcgatagggcttatcttcctagtataccatatgtctctcttctcccactaaattgtaacccattcatttttccaggatatatttgttgggtgtctactctgtgcctggcattgctgtagatgttggggatgcagaaaggaagaaaaaggacagatttccatgctagagcttaggttacagctgggttagacagataaggaacagcagacataataaagaaggacatgaattgtgtattcaagattatgaagtgctgtgggaacaggcctagcagggtcagtgtctggagggctggggcgtggtgctgtgtggttaagttgtccggtcagagtcagggcaggctccatggaggagctgacgttaacctccacctgaagtaggggaaggacaggcgtttcaggctctgggaagagctaggacagaggtggaggcagaagtgagcctgtgggggtgaggagcagccaggagaagcgtgagatgagaatggcgtgagcaagggaggtaggagaacccgagcagcatgcagtgtgcagcctcacagagagcctgcagggcattccaaagattctgtcttttactctgtaaaatggggagcccttgcggtgttttttgtttttgttttttgtttgttatgaggcagagtcttgctctgttgcccaggctggagtgcagtggggagatcttggttcactgcaacctctgcctcctgggtttaagcaatccttacacctcagcctcctgagtagctgggattacaggtgcgtgccaccacgcctggctaatgtttttatttttgtagagatggggtttcaccatgttggccaggcaggtctcaaactcctgaactcaagtgatccacccacctcagcctcccaaagtgttgggattacaggtgtgaaccactgtgactggcttccttgcagtgttctaaaaaggaaagtaatttgatctgacttggcttttgaaacggtcagtctggctgctgtgttgagaagaaactaaatcagggtcaggagctagagcaccaggacaaacatgcacagagcgttaagtgccaggtccaggctggcagtggtggatggggccacaggaatggacttctaggctgttcactgttgtatccccagcatcttaaactgtgctctccatatggtagctgtgagccctatgtgggtattgagcacttgaaaggaaattgatatgtactgtgtgttaaacacacattggatttcagagacttagtgagaagagtaagatatctcattatttatttatttatttatttatttatttatttatttatttactgagacagagtctcacctgttgcccagcctggagtgcagtggcatgatctcggctcattgcaacttccgcctcccgggttcaagcgattctcctgcctcagcctcccaagtagctgggattacaggtgcccaccaccacacctggctaattttgtatttttagtagatatggggtttcactatgttggccaggctggtcttgaacttctgacctcaggtgatccatcccactcagctttccaaagtgctggaattacaggtgtgagccactgcaccaggcctatttgtttatttatatgagacacggtctcactctgtcacccaggctggaatgcagtgatgtgttcatagatcattatagcctcgacctcccaggctcaggtgatcctcccacctcagcctcctgggcagctgggaccacaggtctgtgtcaccacgcccagctaatttttttgtatttttggtaaagctggggtctccctgtgttgcccaggctggtcttgagctcctgggctccagcaatctgccttcctcagcctcctatagttctagggttacaggcgtgagccactgcaccctgccaagttatctcatgaaccaattctttgatgttaattacatattgaactgataatgttttggatatattgggttaaattattaaaattaatttcatctgttttttctaactttatggctactagaaaatctaaaattacatgtgggttgaatcatattttcgctggatggaacaatgccttggacgaggtcagcatttagtgaatcaaatgtgtgggtgaggcacaggtgttctgccgtgaatgagaaaccgttgccatcttcgggaagtttccagtgtgggagggaggcacactgcagatgtaactgctaggagagaaagaaggcaggttgaaatgggaccacagccaaccaggcctgctgtagcccagaagctggaagagactcgcccaggagggaaggaagacactggggtgttgggtctcagtctgggtcttggtgacagcagtgggctggcagtgcagaggttcaaggccttggactgcaagtccactaaggtggctggtggtgtgggtggaggtggaaaaggcaggtggggcgagggtgaggggcaggacatcctggagagcctgaataaccaggtataagtgatttctttttctttctttctttctttttttttttttttttttttaagacggagtctccttctgtcgcccaggctggagtgcagtggcgagatctcggctcactgcaagctccgcctcccgggttcacgccattctcctgcctcagcctcccgagtagctgggactacaggcacccgcccaccacgcccggctaagtttttgtatttttagtagagacgaggtttcaccatgttagccaggatggtttcgatctcctgacctcgtgatccgcccgccttggcctcccaaagtgctgggattacaggcgtgagccgccgcgcccagccccaggcggaaattatttcaactgggtcctgagaactgggcacttttcaaggattgtcagcaaggagcaacttcccaaatatacatctaaaaagatgacaaactcatgtggaatgtggatttaaggaggaaggtacttgacttaagaattccaggattttggtggaagaaggaaatatgggccaggcactgtggcttatgcctgtaatcccatcactttgggagatagaggtgggaggattagttgagcccatctgagaccagcctgggcaacatagtgagatcctgtctctacagtttttttttttttttgagacggaatcttgctctgtcatcaaggctggagtgcagtggtgagatctcagctcactgcaacctccgcctcctgggttcaagcgattctcctgcctcagccttccgagtagctggagttacagccttgtgccaccatgcttggctaatttttgtatttttagcagagacggggtttcaccatgttggtcaggctgatctcgaactcctgaccttgtgatctgcctgcctcggcctcccaaagtgctgggattacaggcatgagccactgcacctggcctcaaaaattcttatttttaattaactgggcttggtggcatgtacctgtagttccatctttggtggcacgcacctgtattcccatctacttgggaggctgaggcaggaagcttgctcgaacccagaagtttgaggctgcagtgagttatgattacaccactgtactccagtctgggtgacagaatgagaccctgtctctaaaataaataaataaatttttaaaagctgggaggtggggttggtaaattcataaaaaataatatttcttgagttgaatacaaacaatacaatcactgttttttctttgccttgttttatttttacttatttatttatttttgcagacattgggcctcactcctaggctggtctttaactcccggcttcaagtgaccctcccactttggcctcccaaagtgttgagattacaggtgtgagccactgtgcccaggctgtggttttttattttttaattttttatttttttgtattataatcatagtgtatatgttgcatcctgattttttttttttttttttttgagacagcatctcattctgttatccaggctggagtgcagtggcacaatctcagctcactgcaacctctacctcccaggttcaagcgattcttctgccttggcctccgagtagctgggatgccaccgtgcccggctaaattttttttctttctttctttttctttttttttttgtatttttagttcagacagggtttcaccatgttggccaggctggtcttgaactcctgacctcaagtgatcccacctcggcttcccaaagtgctgggattacagcgtgagccaccacatctggacacatcctgatttttttcttagttgctattaggacacaggcatttttgaatattatatgcactttgtccatgtcttttttttttttttttttttgagacggagtttcactcttgttgcccaggctggagggcaatggcgcgatctcggctcactgcaacctctgcctcccgggttcaagtgattctcctgcctcagcctcctgggtagctggcattacaggcgctcaccaccacgcccggctaattttgtgtttttagtagagacggggtttctccacgttggtcaggctggtctcgaactcctgacctcaggtgatccacccgccttggcctcccaaagtgctgggattacaggagtgagccactgtgcccagccgtccatgtcatttttattgggtagatatttctgttcagtgactgtttcgttgcttactttatcattcctttgatttggatgcttagcttcataacagcctgtttatatagattatgttttctatttttcagttaattaaaaaaaaaacaaattctcagtcctaggattattgtgcataatgtctgaattttttagaatttcaggtaaatattgtggttcatgagatttgcacagaagctgaatttgctgctttctggtgaggcacgtgatgttttttgctgtccgtgatgcactaacatgtcattaacatgtatgtacagtgttatatgctcgcacatgtttatgtgcagcctatgcacctgtattggatttttcttcactctcatttattggcaggtatttgtggaatgcctgtggtgtgccaagttctgcttgaggccttgggtattcagtagtgatcaaagtagatcaactagtaccagttcttaagaggcttattgttaagtgggggaaacaagcaaatagacaaagaaaaaataacattattgtaaggaatatgaaataatatgtactagaataatatgaagggatggttattgtgaggtaagggggttcatactgaaatactgtctgaggaatcaggatttgagtgagacacgaagactcagtagaagttaaccagaagaacaaagtgttagcagaaaagacaagattgatcaatatgactacatattaaagaaaaaggcacatctaagcaacaaaaactgcaatggtattaaaagccaaatacaagacttagaagatatttgcaatatttataacacattacaaaacactaatatctagaatgtatgcagaattcccaaaagtcaacaacaaaaagacaaacagccttatagcaaagtgggtgaaagataggaccatgcagtgctcatagaaagcaaagtagatggctgggcaccgtggctcatgcctataatcccagcactttggaaggctgaggcgggcggatcacaaggtcaggcgttcgagaccatcctggccaacatggtaaaacctcatttctactaaaaatacaaaaattagctgggtgtggtggcgtgtgcctgtagtcccagctacttgggaggctgaggcaggagaatcgcttgaacctgggaggcataggttgcagtgaacccagatcttgccactgcatgccagcctggacacagagaacgactccgtctaaaaaattaaaaaaaaaagcaaagtggatgataaatgtgaaaagattctgaattttgctaacaaagtcaggttttggagatctaatttctagtcagtaaaattcatcctttctaggatacaatgctaagagttttgataaatgcatagaactgtgttacactgttgtgtaattaccacaatcatggcttagaacatttccatcgttcacccagattccctcctgtcccttcacagccagtctccttctccacccccagctttaaccaacccctgagttgtttgctgaccttacagtgttgcctttttcagagtgtcctataaatggattcatacagtgtgtagtctctcggatttgtcttctttcacctggcataatgcattcgggacccttccatgttgttctatgcatcaggggtttggtagtttttattgctgactgggactctgttgtatggatataccactgtttgtttatctgttctccatttgaagagcatctgggtgtttccacaagatacatgtttcatgctttacaacgtgccagaaataggatgtctgactcaagtgttgacaaggcacagggtgttcagcagctccgctagtgagtgtgtgaggtcactttagagaccaccttgccagcaggtagtgaaattggaaacatgtgcagccccgttcctaggtaagattgagaattcacagttcgtgctgtatgttacttaaggatatttagagatgaaagtgaaggtttaaaaaatgggctggaaagatctatatcaaactcactgtcatcatctggggagagaaggggagtgggctgattgtgaaggtcaaagcctactttaactttgcctttattgctttttttaaattcaattaattaatttacttgtggggacagaatctcactctgtcaaggttgctggagtgtgagtggtgtgatcgtggctcactgcagcctctactttccaggctcaagtgattctcctgcctcagcctccggagtagctgggactacaggtgtgagccaccatgcctgtattttttgtagagatgagatctcactatattgcccaggctggtcttgaactcctggcctcaagccatcctcctgcccagttctcccaaagtgctgggattacagggaggacccagtgtctggcctatctttaatgctttttttgaaaagaaggtggatacctacacatatcacttacacagtttgaaaatatgtagaaaagaaaaaaagtttgaaaatacatatgacaagatgttcatggttgtcaattctaggttctttgaatttttctttttttctttttttttttgagacggagtctcgctctgtcacccaggctgggagtgcagtggcgccatctcggctcaccgcaagctccgcctcccaggttcacgccattctcctgcctcagcctcccgagtagctgggactacagatgcctgctaccacgcccggttaattgttttgtatttttagtagagacggggtttcactgtgttagccaggatggtctcgatctcctgacctcatgagccacccgcctcagcctcccacagtgttaggattacagacgtgagccaccgggcccggctgagacagtcttgctctgtcacccaggctggaatgtagtgaagcaatctcggttcactgcaacctccacctcctgggttcaagcaattctggttcctcagcctcccgagtatttgggacttcaggcacaacccccgtctggctaatttttgtattttttttagtagagacagggtttcaccatgttggccaggctggtctcaaactcctgacctctggtgatctacctgcctcagcctcccaaagtgctgggattacaggcgtgagccacggcgtccagcctgttctttaaatttctttcaaaacagtttagggaagggatatcctaggtaaagataatagcatgtgtgaaggccctgaggctgcaaaacttttggtgtgttcagagtgtcaaaagattcgtgtggctggaaaggagtgaacgtccagggtccagatgaacaggtgtttggtcatggagggccttaagtgcttttttaagtctttgggggtggctaagctgggtggttcctgatttgattgacctttttgttgggtagatggtggatcaacggaagcaggtggcccatttggggactgaattacagcaatccaagagagagctggactcggctctagcagtggagaggaagagaagaggatgagtttggtatttattttggagacagaaaggacttcttgggaccaggcgtggtggctcatgcctgtaatcccagcactttggcaggctgaggcgggcagatcacttgaggtcaggagttcaggaccagcctggccaacatggtgaaaccccatctctactaaaaatacaaaaattagccaggagtggtggcaggtgcctgtaatccgagctacttgggaagctgaggcaggaaaatagcttgaacccgggaggcggaggttgcagtgagctgagattgagccattgtattccagcctgggcaacaaagtgagattccatctcaaaaaaaaaaaaaaaaaaaaaaaaaagaaagaaaaaaaagaaaaagaaaaggacttcttggagggcaaagtttgagggaagagttagctagctagagaccttccaaactgtgctcaggcatttggattttaccctgtgggtgatagggaactattgaaagttttcatttttttctttttggagacagagtcttgctctgttgcttcaggcaggagtgcagtgagccatagtggctcattgcagcctggaccccctgtgctcaagcaatcctcccacctcagcctccagagtagctgggactacaggtgcatggcaccacccccagctaatgttttgtttttaattttttataaagatagggtctcactttgttgtccaggcttaaaactcctggctttaagcgatcctcccatcttgacctcccaaagtgttggaattacaggaatgagccatcatgctcggctctatggaaggttttgaggtggggcagggatgagattagagtgatgtgcctttgccagagagatttgtccagaggaagggtgaccagcctggagtctctttggaatgttctaggtaatgtagcagagattgtgtcagttaccctctggtgggatgcttggcttttcccattttttcaaaaggaaatgggaaaaggaaaaggtcctctgtatggaaagtccccaggaatttataggagagtggctaacgaagacagagttcccttccggcatttattgtgactgagtttgttccatagttttagtcccacttaggtcatgattcatcccactgggccagcagcagcattgggatcacgtcagccaatcttcgcacttagagattttgaagagagatatctcctatccatgtggtacattgcttttcacaaaacaaaagagttcattttgtcggtgaaaagccctggccagacccagccggtggagaccagtagcttcctctggcaggctgggcttcctatggtcattgcagtccctccccatttataaggctgccttccctgagaacacctgggacagatgccccccagaagcatgccctctggaaagggagaggagcaggagggggcttcaggcatgctgggcctggggggccaccccctggcctttgctaagttcctggctggtctgagccctcttctttcctctccccaggccttgcaaaggccatatctcttccttttcatgactctggaaattccatacatactttctgcattaggaagacattctctgcatgctgatctcgttaaaaaggaaaagccaaggagcatcctgcacctccctcctgtaagcgagctttgcaaatggtaaactagatcctgaaaggcaaccacttaaaagcttttaatggcttcccattattagcttgagtgcctggtgcgtcagaggctctcagtgagcgtgtattgaattgctgaatgcatggtggccctgggcgaggaatctggccctcactgtcccaaggctgagtgcctttgccctgtggaggaaagcactgccttggggtcagaaataaggattggcaggattgcctggggttagaaatagtgatcatgggatcagaggcagcaggtgaatgtggggtgtgaatatttttgaaggcttggaatgaaatgattcttccagactttagaggatttgtgtctgcagattcttctctaaggtttgtgtctcacatagtgagagaatcagccagccagggaaatgggacaggattttgtctctttccccatttcctcttctaatgaactcctacctatgctttatgactgcattaaggggtcacctcctccaggaagcattccctcatctccttacgctggttctgagtgtgtcgttcctgcttgatcccctcccagcaccatgtgtgtgagttctcacagctcacaccccatagtattactatgttgtttctacagtgggttcctgtcaggggttccaaacttagctgtttaggaggatgagtagattgtacaaccacaccaggcgggcctgatcaaatacagtaagaagtgtccggattggcaaaccagcgggtccctcttctagatgttatcagagagatactgttagagagaggttgctagatgttaatagaggctgctgttagattccagctccctcctcccctggtcccttttctctcctcatgccaaaagatagacccagtgttgccagagcttccacttttaaaagagaagccttttaaaatataaactctcctgatttttaaatgttttcagttaagtttttaaaggaacattcataggccaaaccaaatacctgtgggccgtatgtggcccccggggccagcagtttgcagctccttggttataggtgcctctaacccattgcacaagctccctcaggcatttcatgtctttcctttccattccccctgggcctagcagggagctggcatgtcacagtgggtgctccctaattattggttattgacttgaatgctagactgagcaagcacctccctgctcacagggtgttaacatttttccctcagaactgtttgtatgtaatgctattctgaattgcttcagttccttacatactttagtgatagtctgtatgtgcctggaaaagtcatcattccttagattctagacaactctgttcttctgttcttttcctttttcctttctctctccgtcccctcaacatatgtttttgttttttgttttttgccagttcttttgtatctggccggttaacacagggcttcataacatggggtcggctgttattaagcaacagtggtttccggtagctcactgactttgccctctctgctggtaagccattgctgatttccatcagggtaacaagcatgattttcagatttaccttcatttgcagtgaacaattatagcaaaattgcttaaagaaatgaaccttcaggtgtggcggctcgtgcctgtaatcccagcactttgggaggccgaggcgggaggatcacttgagcccaggaggtctctaggctgcagtaagctgtagttgcaccactgcactccagcctgggtgacagggtgagacatcgtctcaaaagaaaagaaaggaaaagaaaagaaaagaaaaggaggggaggagaggggaggggaggggaagagggagagagggagggagggagggacggaggaaggaggaaaggcaggaaggcaggaaggcaggaaggaaggaaggcaggaaggcaggaaggcaggaaggaaggaaggaaggaaggaagagaatgaaaggctgggcgtggtagctcttgcctgttgtagtcctggcactttgggaggctgagatgggaggaattggaaaccagcctgggcaacataatgagacttcatctctacaaaacaaatttttttttaattagccagtggcatgcacctgtggtcccaggaggccaaagctggaggattgcttgaggatgggaagttgaggctgcagtgacctatgttcccaccactgtactccagccagagtcacagaacaagaccttgtcaaaaaaagaaaagaaagaaaaggagagagggagggaaggaaggaagaaaaaaaagaaggaaagggagagaggaaggaaggaaggaagggaagggaagggaaggaagggagggaagggaggaaggtaggaaaatggaaggaagggagggaaggagggaagaaaagaaagaaggaaggaaaaaaccggtcggctatcttgacgaaaaaagtctcagtccactccattttgtgcagcatttcccgtcttgttatctttctggaaaaactcagtaagtctctggctgggaattatagaagcttaatatgcacttgtaactgtgtcaggctctcacagggaacaaacaagaggaactatagatttttatagtctgcaagagcccagtccatgcatttaggaggcacagagtgagagaaagagcattgacaatgataatatagcattaatataggtacaatctggagtaatgttatctagtactactaatagcgatattaaaatggcattatatagatattaagccctgacttcgtgccggtttgaacttttcctgtattaattcatgtgaatcaattttgagactctgtctcaaaaaaaatatatgtatataatatatacaaatatatataatatatacaaatatatataatatacaaatatatatatataatatatacaaatatataatatacaaatatatataatatatacaaatatatatatataatatatagatgtcatggtgatgggaagactgggggaggagaggagcagtttaatcccaggatcccatggagaggaaacttgtaggtctcttacccagtgtcttctcctgctctctggctctgatttctgaactaagaaaagtgtgcaaacatcatctgctctcctggttgtatttgtaaatgcctcccctagacccagctctactttaggccacgtgagtgacagtgaccacatcagtcagggattctcctactgtccctgacccatgtccgcttttgtctcctcccactctaataacagaccgtgtggcttgaacctcagccctgctgccaagtagctgtgtgagcttcagagcctggtgcctcagttccctcatctgtaaaatgggaatacaaatggtccctgtgtgtttgggtattcaagaaaattaagtgagttgctgcacacctcacctctggctccttcaacaaaaacatggtcaccctcaaaccaaacgtgaacaggagggtggtgacgcaaaccacatggaaacgagaggcagacccaggctggagtgcaattgcacgatctcggctcactgcaccctctgccttccaggttcaagcaattcttctgcctcagccttctgagtagctgggattacaggcacctgctgccaagtctggctaatttttgtatttttaatagagacggggtttcgctatgttggccaggctggtctcgaactcctgatctcaggtgatccacccgccttgacctcccaaagtgctgggattacaggcatgaaccaccgcccccggccgcagatgggaaattatttttgcactttcagttgtcctaaatctagagttttcctttatccagacagctggtgaaagtggacgtgagaatagagagatttcctggtggggaagacctccatcctccttctccagccccttcctcattattcccaagaaaagagcttctgggtttctgggagaggctgagcaggtggagacacctgggccatatctgggtctctccagaatccaggagcctgcctgacgcgtcagccggggagggtttctgtgtgaagtcggcttgagtgagccagcctttcatgcatccttgtctttatttcttccccagctcaggaggggctgagttgtgtcttaatgagcagttccagctgcacgctgggcatctcctaatttactctcatttatttagctcctgctgcatgctgggcaatgctctaagtgctctgcaggttttggctaatttaatctccctagcaaaccctttgaggggactgacaggatgaccatcctcattttacagatgttgggattgaggcacagacagtttatttttaatttttatgtgtaaaatgtttttactgtggtaaaatttacataataaaatttgccattgtaaccatttctaactgtacaattcagtggcattaaggccattggtattgttgtgtaaccatcaccgctaatctaaccatctccggaacatttttcatcattccaaactgaaactctgcactcattaaacacttactctcctctccccctcccctcatcccctggtatccacagtttctatgaatctaactaccctaagcatccgtataggtggaatcatagtattcatccttttgtgactggctcattacacttggtgtaaacttttttttattttttatttttttttgagacagaatcttgttctgttgcccaggctggagtgcagtggcacaatttcagctcaccacaacctctgcctcccaattcaagagattctcctgcctcagcctccctagtagctgggattatagtcgtgcaccaccacgcgtggctaatttttgtattttttagtagagacggggcttcgccatgttggccaggctggtctcaaactcctgacctcaggtgatccaccctcctcggcctccctaagtgctgggattacaggcatgagccaccgtgccccaccttagtgtaatctttcaaaggtatatctccgttgtagcctgtgtcacaattttatgcccttttaagactgaatgagtttttaaattcattcccatttaactctttgttttgttgcctgtgcttttggtgtgaggcacagacattttaagaaacttagccaaggccattcaaccagaagtggcagagcctggatcttgaccacatggctttgctgctcccagagtcttgaccctgtgctggggctgacttctgcttttacatgagttcttgtcagtgctttcggcagcttgatcaggtagatgctgcttttccactttgcaaatatggaagggagcacccagctctcttgggcatggcagaaattcatcaggggcggaggaggcacagggtacccacccaaaaaatcccaacatattgaatcaccttccaataatctatagcatcatttatgttatgctgcccacaacataaatggctagcaaataatttggatgcgacagaattggtgaatgaatttaatgtagcttcaacctgaagaccattatacactattaatacctacaaaattatagatgtaaggctgggtgtggtggctcatgcctgtaattccagcactttgggaggccaaggtgggcagataatgagttcaggagttcgagaccagcctggccaacatagtgaaaccccgtctctactaaaaatacaaaaattagctgggcttggtggcacatgcctgtagtcccagctactcagcaggctgagggaggagaatctcttgaacccgggaggcggaggttatggtgagctgagatcacgccactgcactccagcctaggcaacagagtgagactccgtctcaacacaaacaaaattatagatgtcacctacaggccagttgggaggcatattggtaagtaaatacccatgacctctccaccctgcctaggatccaaactatgaacactgatggttgactctaactccatattcttttcagttttctcccatgcctaccccctgcccccgagcattctccctcattggtggccctgattttctttttgttgagataggatctcactatgttgcccaggctggtcccaaactcctgggctcgagagatcctcttatctcggcctctcaaagtgttgagattacaggcgtgagccgctatgccaggccaactcttatcttgaatgttgatgtttatcatgtcatggatgaaaaaaaaaaaacccatgcgtattcttttttttttcttttttttttgagatggtgtttcgctcttgtcacccaggatggggatggagtgcaatagcatgatctcggctaactgtaacctccacctcctgggttcaagcgattctcctgcctcagtctcctgagtagctgggattacgggcactcgccaccatgcctggctaatttttgtatttttagtagagatgaggtttcaccatgttggccaggctggtcttgaacacctgacctcaggtgatccacccgcctcggcctcccgtttgtattcttaaatagtgtattgtttcctttacttcctttagagctttacagaaattccatgctgccttcagcttcctttgccgctctgcatcatgttggtaagtctctgctgatgcctgctgctgtagcttatttttcactgtgataatctgttccattgtgtgaactgaccacagttgattgatctgttctccaaggacatgtgagttgttcgcaggtgtccccccaccccctcccgatacaaacagtgctgctgtggacatttcatacatctggttgcctatgtcagaatttccagggtatacagctaggacgcagtactgctgttggattttcctgggattgtagactctcaaatttggaatggacttctatggccaagtagttcaccttcagcaatcatctcaaaagaaatgctcttggtgtgatggttgagagcgctgttctggaataggagagacacagacctgctgggcctttgcctcattttattacttagttcattatgcaatgaacttaacatctgtctacctcagtagtttccctgtctgtgaattgagtctgttacatatatatatatctatttaaatatatatatctatttaatatatattaaataatatatatttaaatagatatatatatattacagactcaatttaacccttagggaaatatatatatatatatgtgtgtgtgtgtgtgtatatacatatatatttaaatagatatatctatttaaatatatatatatatatatacacacacacacacatatatatatatatttccctaagggttaaataagatagagacctggtatggtggctcatgcctgtaattccagcactttgggaggctgaggcaggagagtcacttgagctcaggagtgggaaaccagcctgggcaacatagttggaccctgtctctacaaaaatgaaaaataaaaaaaaaaaaattagctgggtgtggtggcatgtgcctgcagtcccagctactagaggctgagatgggagaattgcttgagcctgggaggtcgatgctgcagtgagctgcaacagagtgacaccttgtctcagaaaaaatagagagagaaagatccggcatgtgtagagattaactcggagcctggaaataataaacacagagtaagtgctccctgctgttcgccttgttcctgttggtgtttaaagatcacttacacttgcagaggcagaactgatgcccaggagaggggcagtaactagcagaagggaaacagcccgggtccagtttacttcccctcaacgtgggccaaggacgccaggcaggatcatagtccggctggattgtggctttcctcaaggtgatcttgacttgcccaggtgggatttcacccccacttccttccaggcttcccattttagacttgaaatgtaggcctgttggggcctcctccagtagatgtgtgcccttgagcttggatacccccctgccaagatacgcctttcaaaaacagataaacttatcgcaactgaatagaaggggctcccaaggggtcccaccctgctccggaagtctcagtgaggaatcaatagctgttaattcctgtgctgccccctgcctgacattccatccacacttgaggcccagattgtaagaagggagagcaggcaggtctctcttccaggagagggacccggttcatcagcaggatttattcattcatgtattacgtcaggctcagcgcctgggctttttataaatgagggctctgctggcgttctgtgttattcagatattcggtgagagaccaccagaagccacaaaaaattgctgacatctgttggaaggcaatcatgcataatggataagggtgcactctgcagttccagcagcattgatttgaattccccctctgccgcttcaaaactctgagatctcagcgagttgcttaccctctagagcctccacgtcctcatctataaaactagaaaataagtggtactcactagatccttaccttgttgtgagagtagaatgacgtgcatgtagagctttcccagagctggcatgtggtaggtgctcaataaacgctggttattctctctctctctctcactctgttgcctaggctggagtgcagtggcgtgatcatagctcacaacagcctctgtctgccaggctcaagggatactcctgcctcagcctcctgagtagctgggacttgcaggcaagtgctaccgctcctagctaatttgttttattcttagtacagatggggtcttgctatgtggtccctgctggagtgctggttgctctctaactggctgcgagccccggggtaggcacactggtactggggctatagcaaaatccgtgctcggtaaatcatcattgaaggagcaagggtgctttacagttgtagaatctcatagtacacgttactttggtttttctcttcccagctctggagtcctgggatccaagtgtgagccccatgtctgcaaaatgaggctagtcacttgaatcctcttggatcttgctttcctcatctgttagtgagcttgtagatagctctgactgtcaccaggctttgctctgagcactctgcatctgtattcaacctgtatacttaatcttcacaacagttgaggtggttgatccatagtaatttctcgttgtacaaacggagaaactgaggcagagagataagtgtcttcccaaggttaacagctaaccagtagcagggcacgctgggatttgaaagactctctatgtgtcctaactggtatgctctcctgtctagaggtgatctcttcctccagggttccaggtagattggttgagatgtgcaatgcggaagagcctcgggataagtcggctaatgacaccctcaggctacccagccctcgggagctcacagcagagcagttggggatgccttgcaaggttacctgtgccagagttcctggggtacatattaaataggtaggacccaatactactttgcattttcctggaatcctagactcttaacattggaaaggatttctttgccaagtaattcgccctcatcattaacctctaagaaatgcagaggtggaattagaaggtgcgtgtctctttcttttgcaccacagattctatcgagtctcatctggcagcttcaaggatcatccgcattctttcatcttcatggaatgtcactagattgagatgattctaagggtgaggtcaagcatttggagtttggaactctgccttttgtagagatgctcccgtgggacttgccctgcacccagttcagcttgcttgggatgcatctgctgagcctggaagagaagtatgggttcaaggccagcggtccagcactcccacagacctgatctgtaatagggaagggttgcctctgtgtgggttgggagtttaatcagcaagagtggattagcagcaggctcattctgtttactccagtaggtcacggggccaagggcaaacatacacccctcccagcccagaaactgatagctgcaaagttgcacacccttctccccaaattgacaaatatggttttcattgttggagtaataaattatgctttttaaggataaaaatgttgcccagctgttgagtggtttaaacttccagatgttcctctgctcagtaatcagagcaggatgcatgatgggatctctttaaaagttgatgaacagaatggttcattaaatttcaacaatgtgcctggaatgccaaggggaggtgtagcatctccctcgagggaaggaggtacacatttcctagggtgcttgggtgaagaattagcaagcagtaactgaagaccagttactggtcaggcagggaagcccaagttctggcccctgctgactgtgtgactttgggctgagcagttggcctctctgagtcttaggttttgttttttttttttcttttgtgtttttgagatagagtctcgctttgtcgcccaggctggaatgcagtggcgcgatcttggctcactgcaacctctgcctcccaggttcaagtggttctcatgcttcagcctcccgagtagctggattacagacatgcaccaccatgcctaactaatttttgtatttttagtagagttggggttttaccatgttggccaggctggtcttaaagtcctggcctcaagtgatccgcccgccttggtctcccaaagtgttgggattacagacatgagccactgcgccgagcctgagcctcagtttctgatacttgcaactgggagcatgttttgagagctagagaaagtattgttgtcttgtgtaacatgaaaaaagctgtgcggatactagctaagatcaatgaaaggttatcaaactcaatctgatggtgaaagaagatacagagatcaagcccgtccgcatttttaacgtggggacactgaggcccaggaaacttggggcttcttcaagtagtagctaggcctgtgctgtcccatatggtagccgctagccactagccgcatgtggctattgagcagtcgaaatgtgcgaaaattcaaattaaaatatgttgtatatgtaaattgcacaatggattataagactcagtttaaaaaaaagaaaaaattcataacaacttttgaaatattgattacatgttgagatgataagatttcgatatactaagttaaataaaacattaaaaatgaatttcacctttggtttctgcttagtattttttaatgtagcaactagaaaattaaaaattactgccgggtgcggtggctcacgcctgtaatcccagcactttgggaggctgaggtgggctgatcacgaggtcagaagatcgagaccatcctggctaacacggtgaaacctcatctctactaaaaatacacaaaaaattagctgggcatggtggtgggcgcctgtagtcccagctactggggaggctgaggcaggagaatggcgtgaatccgggaggcggagcttgcagtgagctgagatcgcaccactgaactccagcctgggcgacagagggtctctgtctcaaaaaaaaaaaagaaagaaaattaacaattacatgtgtagtttgcattatatttccactgggcagtgctatgctaaactgtgacacaaacggtggactttagagttgtgcagggtacaatctgcacggccatatgtggcaggcctaccaggtgtggatgaggctgtctgggttcgaatcctggctctaccagtaatcagttgtgtggtattgactaaattgtttaaactctcagagcttcagttgttctatctgtaaaatgagtattgcaatagtgcatgcttcatagagctgttgtaaggattaaatgaattagtgcatataaagtgcctagaatagtgtctggcccgttttaagagctcagtgagtcttggttgttgtagttgttactttagtggttgttttttagaacctgaggacacaaggatggaaagactcagtctgtctgtggcaaaccacgaaaggaaagattaaacaattcaatgcaggctgggtgcagtgggtcacacttgtaatcccagcactttgggaggccaagacgagcggatagttgagatcagaagttcttgaccagcctggccagcatggtgaaatcccatatctactaaaaatacaaaaattagccagacgtagtggcgagtgcctgtagtcccagctactcgggagactgaggcacaagaattgcttgaacctgggaggtggaggttgcagtgagctgagatcacgctactgcactccagcctgggcgacagagcaggactctgtctcagaaaagaaagaaagaaaaaataaattcaatgcagtgattattagaggggtaagtccatcgggacaaatcagggggcattcccactgaggcaggacttgagatgaatctcggaagcagaaatgctgagcttgttgggctggccagagataagaaggacattgtgggcgggagaaacagcacctacagggctgagatggatgaaagctcagttcagtctgggaactgcagaaactcagtttgcctgagcaaactgcaatgtggcaagtgggaaatgaacccaagctaaaagaggacagcagctgggtgtaaattttgtcctgtaacccatggagagccaagaaggattttgagccagggagtgacatgattggatttcatgatcagatcattctaactgctttgaggaggttgtcttggaaggaaagcaagagtctttggcaagaagatcaagagaagaaagattgctatttccaaagctcaagtagtgtatttttcattgttgttgttaaagttcaaaagtctttatattgaaagtggcacgtatgctatgatctcacacctgtaatcccttcccagtttatctgcatgagaaaagcgcttggaatggtgcatatctaaaggtggtttctgctcaatggggatgtggattcttgtgtcaggttgttggggaggctttaggctgtggctgccagcccatcccactgacagccaacttcatatggatgcagagctttttaaccatatcaaagagaaggataggagcttaaaatatgaaactcctgcttttgatatgcttaaattctgggtctgatatctttttgaaagaattaggtttttaattgaaatagcacatgcatatatttaacatcaaatgggtaaggcttttatggaaaatccagattcccctgccctttttctgcctgtccttagccctgtttcccagagtgaatcagggacaggtcagtacctctaaagaataagctcatgttgctccttgtctgttgacttagacttctggaccctcagcaatgtcccgggactcacactgggggaggcagggagaccagcatgccccctcttgccacttgtacttcccattttccccctggcaaggtgtggaacatttatactcccacgcccacacttaagactcctgtgctttatctgcaaggttaattccaacaattgataaatggatgaacagtgtttacattaagaggcttgtcaatggccttcactgcccgtcgaagcagtcggctttgatcacatgtcctttgtgttcagctctctctttgccctcagctttctaatcgccctttaaggggctatctgaggctgggtgaggtggctcacgcctgtaatcccagcagttcaggaggctgaggcgggaggatctcttgagcccaggagttcaacactaacctgggcaacaaagcgagagcctgtctctacaaaacattaaaaaattagccatacatggtggagtgcgcctgtggtcctagctgaggtgagaggattgctcgagcccaggagtttgaggctgcagtgagctgtaattgcaccactgcattccagcctgggtgacagagtgagaccctatctcaaaaaaaaggaactatctggcttcatcctaagagtagttgcattttaaactctcagtcagcttcttttactgtaaaatgggaataataattaacagtctaaattcctaaagtgattatgaaggctgaacaggtgatgcctgttcctcaggcccctcccttggggccccttcagccccatgtgtcccaggctaatctcaaactcctgggctcaagtgatctgcctactttggcctcccgaagtgttgggattacagacacgagccaccactcccagccaggttgctattaaattttacctttttatccaggagcgtgggtcatcatttctttcaaataatgcttctatttatgagatttttctttgtagaaaatgtgggaaatgttaagagtataaggaagaaaataagtcgtgttaacgcaattgctgcatttttctttttttctttgcatatttcttttaaacttgagatcatgtaatgtcaacaagtttattggatttttctcctaatgtagtattagtatttccatgtgttgtaaagagcaagcttttaggtatcatttttaatgcaatataatgttgtaacatcctattgcaatgacagcttgtctttctcccaattttatctgcactattaggtattaagaatatttaatgtggccgggcatgaaggctcctgcctgtaatcccagcactttgggaggccgaggtgggtggaacacttgaggtcaggagttcgagaccagcttgggcaacatggtgaaaccgcatctccactcaaaatacaaaaattagctgggtgtggtgatgcatgcctctaatcccagctactcggaaggctaaggctggaaaatcatttgaacccaggaggtggaggttgcagtgagtcgagatcatgcactgcacttcagcctgggtaacagagccaaacactagctaaaaaaaaaaaaaaaaaaaaaaagaacattgtgtattttcctcttttaaataatgttgagatgagtgttttggtgtatatgtctgtgcatgtgtgcacatatgtgtgcagaaacctataggatagatttctgcaagaattatcaagtcaaaggttctagacatttttaaggctctcaatgcatgttgttcagttgtttccccatttggttacaccaagttacagtcacaaaattacaccaaatattttttcctccatggagttgctttctcatgaaattgggtttctgaggccaggaagacttgggtcttgttgaggtgaaggggataattcttcagcatttgtcactatttttcactatcattttgagtttgatttaaatagcacagtttgctgcgtggaaaatgagagtagctttgaaggggcacagctttgaagggcacacagtagatgatgacatctacttcagaactctggctgctacgtggggtacgaccatgttgcattttcaggatgctttagtggaaatcaaaagcatgggatgcgaatgcaaaaccaaagggcttaggttctgcatctgacatatgtggctagctgtatgttcctagccgcgtcactcaaccttgctcagtacataccttcttcatatggcgtgcatctcttcctcagctatatgggtgtcctcgaaaatgctgagcataagaaaagtgcatttgtatcctctttatttatttattatttatttattttttgagatggggtcttactctgttgcccaagctggagtgcagtcgcacaatcatggttcattgcagcctcaaattcctgggctcaatggattctcttgtcttagcctcctcagttgctgggactacaggagtgtgccaccatgcccagcttttttttttttttttttttttgatagtagagatgaggtcttgttatgttgcccaggccagtttcgaactccttggctcaaacaattccccctcctctgcctcccaaagtgctgggattataggcatgagctaccgctacacccagcctatcctgtttacctacaacttgccagtaaccttgggcaaattgcttggcctcaggatcttggttttgttttctgtaaaatgggaataataataataataatagtccctaattcctaaggggattgggaaggttgaacaaagtgcttccgctagattgcttgacctggtgcctaatcctggtgatttctcgtaaaaatcagttgttctcactagtggagtccaccagacctgatgattccccagcgttgagttcagccaacctgcactttagttcttcaggctggttgtatatggctggctagattcatcgtttggaatcttcagagtcagaagggacccatccaagtttgtcactcaatggatgacaaagtaaggctccagatggtgagtgtctattttggaatttcataactgtttccatttgtgtgtaaaggaggataacacacacagacttacatatacacacaagcatatttgcataggctggatttggaagggtgcacaaagaaaatggtcatagtggctgttgctaagaggccacccgggagctttctggggccaggagagaaacttagccttgactgtatgacttttttacagtcctgttggaaaattttaccatgtgtatcttttagttcttcaattaataagcaatgagttcttaaaattcaccaggtagtaaaagatctttgaaagccaatcctgcttcttaatgcaaggaaagaatccctgggagtatgcaaaatctctgttggttttgtagctgtctatctgaactcacgtgccctggatcctggccacagggctttctttttctttctttctttttctcttttttttttttttttttgagatggagttttgctcttgttgcccaggctggagtgcagtggcaccatcttggctcaccgtaatctccgcctcctgggttcgagcgattctcctgcctcagtctcccaagtagctgggattataggcatgtgccaccatgcccagctaattttgtgtttttagtagggacggggtttctccatgttggtcaggctggtctcgaacccccgacctcaggtgatctgcctgcctcaagcctccaaaagtgctgggattacaggcgtgagccaccacacccgacctagccccagggctttctaacactcacatggactgtctgctgtctcttgctggcctcccagtctgtctccagaatatgttagactgagtcctagacacttagcctctggtcccctggcagccaactgctcctctggttcaccccctggggctccctgtataggggagccatcagcctgactgagcagccctgaggctggagtttttggcttcctcctaaccagcccccttcacggtccaggagcctcccagcacagaagggagaatctgtgcagcttgttccttatcctcctttgaaccaaggcctgttccaagaactccagggcctctctgcttgcacgtcagggttgagctgctcccccaggccccatgcacggagttggcagctccctggaaaaatttccttccccctttctttctggcaaatacgatggattccctgcatggccccagaccatgagtcttgagttgagttctgcaggagcatcttgctgggtggcttcagcaggggcaggggtggaaagcctgaagtcctcctctgtcctgaaagcctttgatcttcattctggcccgaagcccctgtgccgtatttccctcagcaccgttgtaacatctggtgagccaggctgttagggccaagtgcctgctctttggagggcatctagttcaatgtgagcatttttttctacccagcgaccaattctggaaacatcaaagtgtttatgagcctactttttgtttctccattcaaaatgaaaatagctttattgatcccatggtgaggggtgggcagggtgtgtatcttcttgctgctgggatgttctactttgttggacagaaggctatgtgctttctggcaggttacacctgggtacatttcagtcaagccgagctggctctctcctcatttcattctcaaagtagatctcttgctaagggcttcttactgagtgtctagttccttgttgtacaggtgagggaaactgaggcccagagtggatgtgacgtttccgaaggagaggctctgtaaagttctgagtaggtgagacttattattagctgcaaataacaacaacaataattagaagaagaagcatcttctgccctaaatcatggggcttttatttttcagctggatggtgaagcttagtggcctctccttttctcttcttggaagcacaagccctgtgttgtttatatttctctttggccagagatgtattttgaaatttaaatgataaagcaaacaagtcctgttttcactgacgctttagaaaacttgcatgaaacctcttcacggtggttttgggagccaagcgaggccaggtttttctataaacgtggggagagggatgttgaggacagtccatcctcagagagtgaatgattgcattcatcttgattaaactcagtgaatccgtgaaaggatggtgcaggtccgcccccccagactcatccttccatgtgtgtcctcgtggccaatttgtctttgcacgggatggaaagctgacgagatggactatttttttccccttaaaaataattacatgccagatgctcgttccaagttctgtgcctccaccagttaaagatttttggatcttttgctgagaatgcttgttcagaggtaaacttgttagcatctgagacaagcataataataatgattcaggtcaggagctacaaaggactctgtgatgagcaaaaaataatgattgagcctggcgcggtggctcacgtctgtaatcccagcactttgggaagctgaggtcaggagttcgagaccagcctggccaacatagtgaaatgctgtttctactaaaaatacaaaaaattagctggacgtggtggcaggtgcctgtaatcccagctactagggaggtcgaggcaggagaatcacttgaacctgggaggcagaggttgcagtgagccaagatcacgccattgcactccagcctgggcaataagagtgagactccatctcaggggaaaaaaaatgcatattgcataaaataaaaccttatatatattcacacacatgtgtatatatgagatggggtggtcctgtacatgacagctatggttttaaggccccagtgcctttaagtttgttcttgaaatggttggtagccagttcttctctccttggcttcccagaaatcctttccaacccaagagcgtcagaggtactttaagtaagcaagactttcaggtgttgcttctctggcctccctctttcacatctattctataaaaagagggtggctgctcagcccaatgtaaagaaagcgctttctgaagttgaatgagttttacatttcagctctgccagtgtggcagtatgaacttgagaaagagacatcccctctctgacacttaatttcccatctgtaaagtgagatccacaattttacctttgcgggttggcacatggactggagacaatattggtaagatgctgtgttcatttcctagggctcacattacaaattagcaatgggctcctttcaacaacagatatttattctcttgcagttctggaggctagaaatccaaattcagggtgtcaggagggccatgctccacatgaaggctccgaaaaataatctcttcttgcctcctcttggttttggtggttgctggcaatctctggcttgtggctgcagcaatctgcctccatctttacatagccttcttccctctgtgtgtctctgaattctctcttcttgtaataatgccagtcattagatccagggcccaccctgatccagcagaacctcttctttacttaactaattacctgcaaagaccctatttccaaataaggctacattctgaggttctgaatagacatgaattcttgggagcaatcaacccagtacagatgtctggcattttattgcagacaacatctgggcagatgacagcatctggtatttttatgattgtcacttaccagaggtatggatagacatttcttgaagaagataggagcaagcctgattatttgaggaacacgagggccagatagcagaagtggagggagaggtgtggttggcttggcaggtggagaggggcagggatggaagcaaggagcttgctatgtgggggtgtgggagtggggttggggaaaccatattgctttatttcaggagagagtgatgtggcctgtgtcttggtggtagcaaagaaagcggagagaaaaacgtagattttacatttatctgggcaattgtgccaataggacttgcacacggattggatatggaggtgagaaaataagggaatcaagaatgactcctacgagtcaggctgggtggttcatgcctactatagtcctagcacgttgcggggctgtgatggttaatactgagtgtcaacttgattggattgaaggatgcaaagtgttgtttccaggtgtgtctgtgagggtgttgccaaaggagattaacatttgagtcagtgggctggggaaggcagacccacccttaagctggtgggcacaatctaatcagctgccagtgaatataaagcaggcagaaaaacatgaaaatgcaagactggcctagcctcttagcctacatctttctcccatactggatgcttcctgccctcagacatcggactccaagttcttcagttttgaggcttggactggctctccttgcccctcaaacttgcagacagactattgtgggaccttgtgatcgtataagttaatatttaataaactcctctttatatacatacgtgtgtgtgtgtgtgtgtgtgtatatatatatagataaaactcctctttatatacatacgtgtgtgtgtgtatgtatatatctatatctatatctatctctctctctctctctatatatatatatatctcctattagttctgtccctccagggaaccctgactaatacagaggctgaggcaggagggccgtttgaggtcaggagttcaagaccagtctggacaacttagagagaccttgtctctacaaaaaattaaaaaaaaaaaagaatgactcctaggtttttggcatcagcaacctggcagatgctggtgtcttcaatggacacggggaagatgggcagtagattgtgggcgcagagagttctgtgcaggcatgttaaattgcagatgcccattaatggccacaggagatgccaactaggtacttggcaaagtgagtctgggaattgagaccatcatggtaggagatagcatttggaagattttggcagaggtgggatccaaatccatgggagtggagtatagatagaaaagtggacataggactagacatggccactagtggtaggggtagaagttggggagctggaaaaggtgattacaaggagccactggtgaggcagaaaaacatgccgggagcctagagaaggaagaccttcttaaggaaggaggagagtcatcacttgcaatgttgctaagaggtcgggtagaatgagtcacacagaagtgactgttagatttggcatcaaggaggttgttgactaacttggcaagagcgcctcatgggagcaatcaagaggaagccagtgaccaatgaaggtgactgctcttgcgttctgctctctcttcattgccttttgctctttgcttaggcaaatcagtgtcttcagtaggttccttgaaggctaatgtcaccattagtatttacctacccattagctcatttgattctcaaaacaacatctttgcagaaaaggctgggcagggcaggcaggtattattcccattttacagatgagaaagccacaacttaaaaacgtcaagtgtttttttttcaggctgtttcttaaaagtaagagttatgtgtcaggcacccctcctccacccccatctcggcatacatcccagtgttttgtggtttgctacatttcttggttttcttagctagattgtgaacccagtgaagggaggatctgaatgacatctctatattcccacgcagagatagcaaatgcttgccacacttgttactttctcttgggtacccatggcaggcatcactagctgatcatgaccttctcttcctttgagcccagactcagcttagaattctacccagcattccagatagcctgtcaacctgctgacagataaggtatcatcaacaggcatttttactgtagtacttaatgtcatgcctggttcagcaagtggttttgtgactgatttagcaaataagcattctctgaaaacacagtgagtgagttctatgtcactagaggtaatcaagaagagatcaaattcatgcacatggccgggtgtggtggctcacgcctgtaatcccagcactttgggaggccaaggcgggcggatcacgaggtcaggagatagagaccatcctggctaacatggtgaaaccccatctctactaaaaatacaaaaaattagccgggcgtggtggcgggtgcctgtagtcccagctacttgggaggctgaggcaggagaatggtgtgaacccgggaggcggagcttgcagtgagctgagatcgcaccactccactccagcctgggcgacagagtgagactctgtttcaaaagaaaaaaaaaaaattcttgcacaattggataaggtaaatagaattcaggtattgggtaaaaggttatccaactctgagattatctgatattcatggagttatttaatgaacagtagtatctcttaccattctggaacaaaacaagaaacctttgagaggaatctccccccacctccccagatatataggaggggacagtgggcaacactattatggctcctttcttgttgtcttggccacttggggctctggtctcagcctttctggattgccataatctgttgggccctatggagccaaagggagtaaacagaatagtactgttctgggttgttgagggattcggtgagattccctaggtaggttttggtcaacaagcaggcatttcataatcctctctacctcctgccctgccctggggattgtgaggattgtctgcattcctctgtggaactggaatgtggctgcagtgatggtgtctgcagagatgttgaagctgctcctctctcctgccctctatcttggcctcgcccggtcctagccggggtaagtgaacatcaatcccatggacagagtcttctctgaaaactgctttatggatttttttttttttcccagacagggtcttgctctgtcgcccaggctggagtgcagtggcacaatctcactgcaacctcagcttcctgggcttaagtaatcctcccacctcagccacccgagtagttgggactacaggtgcatgctatgatgcccagctaatttttgtatctttagtagagacaaggtttcaccatgttgcccaggctggtcttgaactcctggactcaagcgatctacctgcctcagcctcccaaagtgctgggattacaagcctgccttatggatcttaatgtcttggcccgagggcattggctctgcctggctccagagggatatgaagccattcctgggggacaccattgttttctagttaatattatcagtcctgtagtccagtgattttcaaattttagtgtagtcagaatcaccagaagggcttgttgaaacccagacagctggacccctccctagagacttaggatgaggcctgagaattggatctaacaagctcacaggtgacactgaagttgacgaccttgtatctcactttaagcaaagtcttcccataggaaccattgttcctccctgcccataggtaatatcttctacttgggccctctgcttccactgtggcctgcttacaacctcacctacacttattaactagcagagttcactgagtctgcttaaaaccttaaacttcaaactataccacaaggctacagtagccaaaacagcatgatactagtaccaaaacagagatatagaccaatggaacagaatggaggcctcagaaataataccacacatctacaaccatctgaactttgacaaacctgacaaaaacaagcaatggggaaagaattccctatttaataatggtgtcaggaaaaccggctagccatatgtagaaaactgaaactggaccccttccttataccttatacaaaaattaactcaagatggattaaaggcttaaacataagacctaaaaccataaaaaccctagatgaaaacctaggcaacaccattcaggacataggcatgggcaaagacttcatgactaaaacaccaaaagcaatggcaacaaaagccagaattgacaaatgggatctaattaaactaaagggcttctgcacagcaaaagaaactactatcagagtcaacaaggaacctacagaatgggagaaaatttttgcaatctatccatctgaccaatggctaatattcagaatctacaaagaacttaaatttacaggggaaaaaacaaacaaacaaacaaacaaaaaccccatcaaaaagtgggcaaaggatgtgaacagacacttctcaaaagaagacatttatatggccaacaaacaaatgaaaaacagaaaacaaaaaacaactcatcattactggtcattagagaaatgcaatcaaaaccacaatgagataccatctcatgccagttagaatggtgatcattaaaaagtcagggaacaacagatgctggagaggatgtggagaaatagggacgcttttacactgttggtgggaatgtaaattagttcaaccattgtggaagacagtggggtgattcctcaaggatctagaaccagaaataccatttgacccagcaatccaattactgggtatatacccaaaagattataaatcattctactataaagacacatgcacatatatgtttatagcagcactttttacaatagcaaagacctggaaccaacccaaatgcccatcactgatagactggataaagaaaatgtggcacatatacaccatggaatactatgcagccataaaaaagaatgcattcatgtcctttgcagggacttggatgaagctggaaaccatcattctcagcaaattaacacaggaacgaaaaaccaaacacagcatgttctcattcagaagtgggagttgaacaatgagaacatatggacacagggaggggaacatcacacactggggcctgttgggggatggggggcaaggggagggatggcattaggagaaatacccagtgcatgcggggcttaaaacctagaagatgggttgatgggtgcagcaaaccaccatggcacacgcatatctatgtaacaaacctgcgtgttctgtacatgtatcccagaacttaaagtacaaacaaacaaacaaaaaacctccacaaaaaccctatctccaggcttcccattgtatctcctgacttttttgaaatcctgagcagcctgttcctgttgatcgagtgaatgagcattctctgaaattgcagtgagtgagttctccatcactagaggtagtcaagaagaggttggaatcacacacaattggatgaggtaaatagaattcatttgttagatagactatgcaggcctaagattgtttagtattcacggagttattttgtgaacactagtgtcttccagcctcatcaagtggtccctccctctgtagccccacatcctggtctttgatcagttccctgacacccttccctgggcaccacaggacctttgcacttgctggtcccagatcctagaatgctttttccccagcttgttgaaaagctgattctcatcctaacttcaatatcacctcctcagaccaccccttctaatagactcattccctaacctccatttctcatcactggatgctgctgaatttcactgtggcaccagtcatagtctgtaaaaaaaatttattaaattatttggctctttgattttggtgtgactcctcccctagagaaaagaaactgactttgtccttgaactctgtgttgtctgacactcagtgggtggttcatacatattctttttttaaaattaattttaatttttattttacattccgaggtacatgtgcaggatgtgcagatttgttgcataggtaaacgtgtgccatggtggtttgctgcacctatcaacccatcacctagttattaagcccagcatgcattagctattttttctatgaaaggtgagcaaatgcttgtatacaggctgcagagggttaggtcaaggctgaaccatgtagtctaaattttggagtgactgcagtgaagcccctccatggtggaagaaaatggaatgtccttgttggagctggccagaactgggcagatccagaggctggaggtaatggcaataactctgactgctaataataaaataagaacgtaaaagagtgcttacagtgtgttacaggcactgctttaagtgcattacgtcatttagtttccacagttgtctccatgttacagaggagaggactgaggcacagagtattacaataagaaacttggcccacagtcagcgagcaagaaagcctagattcatacctgggcatatggcttcagagtccacacgcttggcgcctgcactgcaccgagaggggctgctgggccgggagtcccccacctgctctctgttttcaaactccccatttcacacccatgccaggtgtgatgaaatcctctaggtgatgggcagtggacatgagtggttctggttacagttggacttcactggcctgtcccacacctgaggatatggattctagcccatgggaccataagccaggccccctgagggtctgttatttgtctgggaagtggcagcgctctttggaatcttgttcatgactgacaaacacccccacgccccttcagccataattatcacctagtccccagagaagggccatgggtgggctgactgtagagatagacgcttgggtctctggctgggaacaccacatgcaagagaagaggccatgggctcgccttccatccagctgaagtctttctggccgggctgcaggcttcatgcaacacctttcaacctgtaaaaggaaaaaagaaggccgggggtgggcctcagctgctgccactggcattgtatcactgaagcgttttttgttgttgtttttttttttttgaataccggaaattaaggggaaattcggaaacctcataatggcttcatgaaccattgcacttggaaaatgtacttttgaaaaattcccttgatttattgtttttcggaggctgtagataacattagagtatattattcctatataatttcctgagttttctatgtcaattactttgttttattaaagagaaaaaaggaactaatattgattgaggccctcctgtgtgccaggctaaatggtcatccctttcagttgttagttacaaagtgaccctatgaagcagagaagatgagtattgtttagcgatggggaaacggagccaggggaggaacttgccccagctcatggctaggatttggaattctgtcccagtgttcatactcttttgtgttgtcaggtatgatcagcctatgtactgcttccttgacttagatttttgtggggtagagaatatcagttgtagctctaaaggggtgtgattatttatgattttttttttttttttgaggcggagtttcactcttgttgcccaggccggagtgcagtggtgcaatctcggctcactgcaacctccacctcctgggttcaagtgattctcctgcctcagcctcctgaatagctgggattacaggcatgcgccaccatgcccggctaattttgtatttttagtagggatggggtttctctgtgttagtcaggctggtctcgaactcccaacctcaggtgatccacccacctcggcctcccaaagtgctggaattacaggcatgaaccactgcacctggtctcatttatgaattttaaaaatatatgtgtatatgtaatatctgattatatatcacatcacaatttgctgcagagtgaggttgtccttcctaaagtacttgtcttgcaaggctatggacagatactggtaatggaacctgtgctcagaattgttgggaatctgtagtttaaaggtttgtcatttggaggaatatcaagtaaaccctatggggtcaaaaacaaggtctagccaggtgcggtggttcatgcctgtaattccagcattttgggaggctgaggcgagtggattacctgaggtcaggagttcaagaccagcctggccaacatggtgaaaccccgtttctactaaaaatacaaaacttagctgggtgtgctggcaggcacctgtaatcccagctactcaggaagctgaaacaggagaatcacttgaactcgggaggtggaagtttcagtgagtcgagatggtgccactggactccaacctggtcaacagagtgagcctgactctgatgatagtaataaataataatggtagcttctatttattgtttactactatgtgccagacactattctaggtgcttttcatcaattagctcatttcatcttcgttataaccctatgttctaagtacagtcatgtaccacataatgatgtgtggatcagcaatggaccgtatatacaacggtggccctatgagattataatacagtatttttactgtacttcttctatgtttagatatgattagatacacaaatgctcaccattgtattaagttgactccgatgttcagtacagtaacatgccattcaggactgcagcctagaagcagtaggctgtaccatatagtccagatgtgtagtgagtaggctgtcatctagttttgtacaaactccctctgtaatgttcgcacaacgaaattgcctaacgccgcatttctcagaatgtatctctacccttaagcaacgtgtgactgtcctattatcatcaccccattttacagatgaaggagctgtggcaagaaattgactaacttggcccaaggtcacccatataataaaaggcgggctgggtgcagtggctcgtgcctgtaattccagcactttgggagtccaaggggaataggatcacttcaggagaggagtttgagaccagcctgggcaacagagggagaccctacctctaccaaaattataaaaaaattagccgggcatggtggcatagacttgtggtcccagctgcccagaaggctgaagtggaaggatggcttgagcctgggaggtcaagcctgcagtgagccgtgattgtgccactgcactccagcctgggtgagagagtgagatcctatctcaaaaataaaaaataaaaaaaaaatgaaaaaaaaaataaaaaaaaataaataaaataattaaaaaaagagctgggacttgaagccagataataaggcaggcagagggcatacgaaacacccagatgggtcatgagcccgtgcatcagtcagggtctaatggctcagctgaggaagggaggtttaaggaagagactgtggacagaggtgttagggaaggtgtcagagaaggttaaggagccaacatggatcatgggggtggtacagtgttgccagggctggggaggattggctgcagtgtggggtacccagccgctgccatgtggagagggacctgtcactcctgctgtgaactctcccttcttctgccctctgacctcctgctggtgcctcccattggctaaacacagttgatggccagtgcactggggagctgttcttggagcccacaggcatctgcttcttggcacagagcagacaatggattgagtcgggagggaggggaactagagaatacccaagtcccaatggctggagaggagtgagcaggtaaagggggtagaaggtgaagtcagagaggccggggtccacactacacagggcctttggctttcttcggaaggagcaggaagccagtggagggtttgagcagatgtgtgcatcacggccactgccatcaggagaacgtctttctctatgctaggtgtgaacagtcaccccttcctctccctttctcaggatgagtgctgaggaggaaaaggccctttcctccaatgtcttcagaggagacgtctgcccagtccagactacgtgcctcatgccagccagcctgtaaatgacaggaaagagaaaggagcagtgtctcaaaagaggatattctggaacgtttgataatcagagcccattgtaaagtcatgttttgagttacagcatttaaatctttgttccagtggaaaacttttacaggccgtcctgggcaaggcttgaatcctgtttggatctccaaaggccttaaaatagtgtgggatgccgggagactggctccaaaagggaggagacctgtgctggcagccctggccacaccttggtgggaccggctcctggccttggggaccctgccactctcctagctgtgcttccgcagagctggacacacaaaagctttcttgtctggatttgttcccctaagagggtggcaccgaactggtcctgcccatgcaggaagctggtcctgtccaaccagggaatgaaaagttggccagtatcttctcaggccacgctacagccaagtctcttttaatgagctggttctcttaggatgcccaggggagggagaacacacttgagtgggatggcgaatgaagaaggaagcggctgttcagacagcttccagttctgtcaggttctgctgctgtgaccaaggcaccaagtcatctggaaacccactgcaggcagcaacctctttttcacctttgtgtgccccaaagcttgctccgggaatcgatggtttgggaaacaatgcttgctgtctttgagtcctcagtcctgtaaaatggggaaagtatacatcagagggcatttgagagtaaggcaagaagcgcttggcatgtgcctggcacatagtacctgttcagcagattccctttcagctcagggttagatcttcatccacctcttgttggcctgaaggaaggggaggtaggtactattagccccatttattttattttatttttttatttttcttgagacagtcttgctctatcacccaggctggagtgcagtagtgccatcttggctcactgcaaccttcacctcccaggttcaagtgatcttcccgcctcagcctctcaagtagctgggattacaggcatgcaccaccacgcttggctaatttttgtatttttagtagagagggggttttgccatgttggccagtctggtcttgaactcctgacctcaagtgatctgcccacttcagcgagattataggcgtgagccaccacatgtggcttattagctccattttataggaggtgaaattagacagcaagaggctaaatgccatggctgaggtaagatctgtggtagcatccaagtcttgaccccagacttggtgtacttctcatcacagatgcaattttgtgcctcatcatctgacccaggagctacacatctgcttttttttttcttctttctgagacagtctcactctgtcacccaggctggagtgcagtggcacaatcttggctcactgcaacctctgcctcccaggttcaagtgattctcatgcctcagcctcccaagtagctgggaccacaggtgtgcgccactacccccagctaatttctgtctttttagtagagacggggtttcaccgtgttggccaggctggtcttgaactcctgaccttgtgatccaccctcctcggcctcccaaagtgcttggattacaggcgtgagccactgcgcctggctaaagttgttattttaaaattattatttatttatatttgttattatattttttatttatatatattttgttatcttatttttaaaagttgtatggcccatttaaacttttgcagaaatagttttttgaatccatggatttaatgctttcctctttaaattttttttaagtcaatttagagtttttaagacaaaaactggaaaacggctttgctcttttgtggaactgctctggattttttttttttttttaagaaagaattttgctccatcacccaggctggagtgcagaagtacaatcatatctcactgcaggtttcaactcctgggatccagtgatcctcttgcctcagcttcctgaatagctgggaatacaggtgtgcgctaccgcaccaggctattttttttttaatttaaattttttttgtagagatagggtctctctttgttgctcaggctggtcttgaactcctggcttcaagcaatcctaccacctcagcctcccagcgagttgagattaaaggtgtgagccactgtgcatggcctgtgttgaattttttgtctccccattcccaagtagcaactctggactccacagaaaggccgagtctctccaagacccagccgtcttggagggtcatctgtccactcctccaaagagggtgagacagggccaataatgaagtgatcactgtgcaccaaccctccctcttgcttcagaagagaccttttcatccctgagccaattaatcaatttcaagagatagcatctgagtgagatgggtcaccaagtcacagaggccctcagctcctgtgccggctctcaaagggggttgaatgaggtggccttaacagattgcctagtacccaacttcctagagttcgtatagtagagagcaagtagcatagggctagaaggccaggtcacaataccctctctggagtcttctgaatgtatgaccaataggcaagagccccagtttcctggtctacagaagtgacagatgggaccctacctaccacacaggttctgaggataaaaatagtgatatgggctgggcacggtggctcgtgcctgtaatctcagcactttgggaggctgaggcgggtggatcacttgaggtcaggagttcgagaccaacctgggcaacatggcaaaaccccatttctactaaaaatacaaaaattagctgagtgtgatggtgcatgcctgtaatcccagctactcaggagggaactgcttgaacccgggaggtggaggttgcggtgagctgggatcatgccactgcactccagcttgcgcaacagagcgagactctgtctcaaaaaacaaacaaacaacaaaacaggtaatatggttggaagaggtttatccttgccaagtttttgtaaatcaaacagctcttgagagatgcctgtttggctgtttttatttttttagagatggagtcttgctcagttgcccaggctggagtgcagtggcgcggtctcggctcactgtaagctccgcttcccgggttcacgccattctcctgcctcagcctcttgagtagctgggactacaggcgcccgccaccacgaccggctaatttttttttgtatttttagtggagacgcggtttcaccatgttagccaggagggtctcgatctcctgaccttgtgatccaccctctccggcctcccaaagtgctgggattacaggcgtgagccaccacgcctggcctgtttggctgtttttttaataggaggtgggaatcccttgtcttcctgggcagactagatgtgatgtgttcacagggagctttgtacagattgcttgagagaagcacctttctttccagagtggctgcttggacgatgccttccaaagctgctaagtcctgtggcaggggattgttgatattcttcatggtttctctggggagcctcctagcctctgaattattgatgcatgtctacattattattattttttttttgagacggagtcttgctctgtcacccaggctgtagtgcagtggcgcaatctcggctcactgcaagctctgcctcccgggttcatgccgttctcctgcctcagcctcctgagtagctgggactacaggcgcccaccaccatgcccggctaattttttttgtatttttagtagagttggggtttcaccgtgttagccaggatggtcttgatctcctggcatgtctacattattaaaagggtctctttgcatgagttagcagaatgtagtgccctctcgtgaatgagaaaagccgcccagtcctgattgcagcctcataatgggtctgaaatgacaagtgtgaagcagtgggcagagccaagaccacctttatttgtgcatccgtgctcttgggtgggtatgtttcacacagtttgttgtccttctgtcccttgcccatgaggccttagaaactcagcttgtctccacccattcctctacaacccacacaacaacttgtaaccttttaatcttctttgcttcctaaagatgcaactcatgccacctcccccaggaagttctccctgacttccaatctttagaataggctgccagagatccctgtgttaactgtgaacagagcccttttcatcctcttgcatcagaattcctgtctcatccactcgactgaacttcttgggtaggaatggaggtgtgttttttttttgttttgtttttgtttttttgtttgtttttaagatggagtctcactctgttgcccaggctggagtgcagtggcacgatctcggctcactgcaagctccgcctcctgggttcatgccattctcctgcctcagcctcccgagtagctggaactacaggcgcccaccaccacgcctggttaattttctgtatttttagtagagacggggtttcactgtgttagccaggatggtctcgatctcctgacctcgtgatccacctgcctcggcctcccaaagtgctgggattacaggcgtgagctaccacgcccggccggaggtgtgttttacatgcatctcactgcctgggacagcgcctggaacctagcaggtgttttatgtgtggggggtgttggttgtagtagtggggaaaggtttcttaaatgaggtgtgtttagaatttagccctttgcagggtataaaatctgagaaataaggtgtgtgttgtgacgagggatggcactgggggcctgcctaaagcactggcttcattgtgggggctgaggtggcttgtttccttggagctaatggtcagagtgaggagctggggactgagcttggatctagattattgttgcatgaatggcctaaatgaagagtgttttctcaagtccctatagaagagggagatcctcatggctttcaaggagtcatgcccaagatacaggaatggctctctggtggactggctgggacagaggggagagggtgaaagtggggaggaggaggaagtttaacagtatttgaagcatttgaaagcctagacccatcgtacgctgaaacagagaagaatggctagccaaaaatactgtgtgagtctaggaacttaagaatgctagtccttgaccccaaacatacttatatagcagactcaacattattgtcttccacctaccggatgggattatgcaagtgatatgacccagagcattctggaagccggcaggggcataaataatacattagatatgcagatgaactgcccagggtgtctctggtcttgggaagaattcttagtagacctgagataattgcagaacagagtgtcctgttttcccatccacagcctccaggcctggcgaggattttgtgttcaaaagagatttccaaggtggacatctctctgacactggcgatttttctctctcacttgaacaaaactcggcggaaaggtcactcctatttgtcttagcttctctgtcacatcccacccacactttgaaaggtctgttcttagcggggtcccaggaaggctgtgctggccctgtcagccctgagctgggtggtagtcctttatcagagatacccatgagaatcactcaccctggagcctttcccaagcacacatcgtggacccctccagggctgcacatgtgctttgtaagggctcttcaggtgactggagctttaagagctactgaactaagtggtaataaaagtgaacaaagtaaccagtctggaaatgtcagtagaatggaaagaaagaacaggtgggagagttctccattttttcacggtaagacccggttacttggcttttgttgagtccctggtgggtgtccatggtgtctttggccttatctccctactaaacaggattacctgtgtggggcacctttcctggtctcctctctctccaaggagcaggtagtacttggaggccgtggttaatcacatttcctaagtgagcttttcctttctagaatgatccttgctcttacccttgcattcctactgcatgttccctcaggctgaagccttcctttacatgtgagcattctcctggatcaactccctgatgactggagcctgtgccgtgtgtttccaagttgcacccaccacccacggagactagctcatggccgagtggcagctggtgtagctgatagctgtgtgggaaatgggtctgcacaatataaagacagctcacaggaaaggggccccaaatggtactctctttttttttgagatgttgcccaggctggagtgcagtggcgcaatctcggctcactgcaacctctgccttccggattcaagcgattctcctgcctcaccctcccaagtagctgggattacaggtgcctgccaccacacccagcaaattttttttttttttgtatttttggtagagatggggtttcgccatttgggacaggctggtcttgaactcctgtcctcaggtgatccgcccacctcggcctcccaaagtgctgggattacaagcgtgagccattgcacatggccttttttttttttttttttttttgttgttgttgttgttgttgagatggagtattgctttgttgcccaggctggagtgcagtggtgagatctcagctcactgcaacctccgcttcccaggttcaagcaattctcctgcctcagcctctggagtggctaggattataggcgcccaccaccacacctggctaatttttgtacttttagtagagacagggtttcaccatgttggccaggatagtcgaactcttggccccaaatgacactttgataagttgctctacccaatcctaaaaaaggaaatacagataaaaaataccaacgttgtataatacacatgttgttgatgcgctctgttgttggcaaaagctgtgttgctggacggaatgcaagtggatgtggccctttgggaagaattatggccttttggcattctctatccaaactacaaaagcatgtgccctttgacctggccatctcatgttgggacattgggatatttcccctacagagataacctatagatatttgtaggaaaagaacagtgcccaaggttattcatggaacatttttataaaagcaaaagactgggagtaactcaaacatctgtgagttgaagactggcaaatgatgacacattgtgctaggcaagatgcggaaaggaataaggaagtgctgtgtgcacaaacacggggagatctcaggatgtattgttgacacaaaaagcacaatgtggagcggggagtatggcatgccatcttttctgtaaaaaaaaagcatgggtgtagaggggatgtaaaaatgtgtctttgcacaaactctgttaggatgcacaggaaaccaacacaagtggtggcctgtgcgtggtgggaggagggagatgcagggaggggagactgggttagggaggaagatgcatgaagaagattttttttttcttttcagagataaggtttcactctgtggcccaggctggagtgcagtggtgtgatcatagcttgctgcaacctcagactatgaaggagactcttgattgcgtatctttgggtatcatttgaattttgaagcatgaatatattgaaatcgggagcagctcaaacattgagtatattatctatcatacatttaatttaaaaagtttataaccttgtcatgattaggctggggttatgcatttttaggagggagaccccagaggtaaaacgtcagttcttatcacatgtcaaggttatgttctattcacgcgactgatataaatcccggttgcatatccctataatacacctgaccaaagccaggtgtggtggcatgtgcctgtagtctcagctactggggaggctgaggcagggggttgcttgagcccaggaattcgaggccagcctgggcaacatagcaagacctcatctctccaaaaccacaaatttggctgggcgcagtggctcacgcctgtaatcccagcactttgggaggctgaggtgggcggatcacctgaggtcgggagttcaagaccagcctgaccaacatggagaaaccccatccctactaaaaatacaaaattagccgggcgtggtggcacatgcctgtaatcccagctacttgggaggctgaggcaggagaatcgcttgaacccgggaggcagaggttgcagtgagctgagatcgcgccattgcactccagcctgggcaacaagaccgaaactccgtctcagataaaaaacaaacaaacaaacaaaaaaggccaacaaatttgaccaatactcctcaaaactggaaaagctggtgaccaccacccctagtgctccaataaagggctgtgggaacagttgtgctcagggtggtactggtacagcctggcagaggacatgatgcttgcatagtgtggaaaggccctctgagatattgctgggccttaggggaggaggtccaggcctagagaggactgaagccctccccagggcatggtgtggaccacgctgaagggaggtggggttggagacacagctgggagtcagatcccaggggctctcctgtgtgatgctgaattgctgggaaggggatgccagctagtctctttctctgtgccaaccctgattggttgggtggctgctgagagccttatggtgccctggctcagtaggaagagtgtgtgttcatttagtgagtttgccaaagacaagggaagggggttagagagtaggtggcagataatgccggcctggggatcctggaggttttaggctggcagaccctggctgaggctgttttctgttcttttccttaggccttgggagacctttaccttttcagtgcctctaagacagggtcagagcagtttggtgacaaagtggaagtaaaccatgggtgaaaaacagctctggggaccctcataggcttccacttattgaggattaggcagaacttgcagcttggcccagctttcgaaacaaggtgttcccaggaggtggaaagactggttttcaatcagataaaggtaggatcctatgaaaaactcctagggccttgccgttcctatgaagtggtagctatcattcacactcctagttatgccatcgaggtaaaaagaggtggaataagaatcagggacacttgaaaataagaaaagagaaagactgcgtgcatgtgcatgggtgcacagcctgtacatatgtgtgtgtgtgcccctgcgtgcacgtgcatgggtgcacagcctgtacatatgtgtgtgtgtgcccctgcgtgcacgtgcgtgggtgcacagcctgtacatatgtgtgtgtgtgcccctgcgtgcacgtgcgtgggtgcacagcctgtacatatgtgtgtgtgtgcccctgcgtgcacgtgcgtgggtgcacagcctgtacatatgtgtgtgtgtgctcctgcgtgcacgtgcgtgggtgcacagcctgtacatatgtgtgtgtgtgctcctgcgtgcacgtgcgtgggtgcacagcctgtacatatgtgtgtgtgtgctcctgcgtgcacgtgcgtgggtgcacagcctgtacatatgtgtatttgtgctcctgtgtgcacgtgcatgggtgcacagcctgtacatatgtgtatgtgtgctcctgcttgcatatgcatgggtacacagcctgtaactacatgtgtgtgagcctgtgggtatgtgaggggagtgagggaccctgagggactagaaacttccttaaaggccatttgagagagtgctgctttctataccacccaccctagggcagttaggcaaaggtgtgcctccctttaagaggacctagcggtcggtctggtttacaacataggttatcagggagtagtactttggcctggaaaaggaacctttattttggaaaagatttgtaatctctgtggcttgtttgatacacattggaaacctgactggaaactcaggccaccagcatctgttgggggcacatgtttgcacttttggttatgatgccacggccctggttcaggtatcctaaagaagataattaatgatgaaaatgattggtgtagatttcataccacagagcactgtggtttgtatagtaagacacagtgatggtgtggacccatgcacagccagctttgcagatgttaagaatagcgactttgcctgacataattggtgtctgcacatgggattaaacaagtaagattgatgtgaattttattctttcattttttatgtagactcactgattgggtaactgtggaaataatgtcacagtgcctttttaagttaagaacatgtagttgtgatcaggagcggtggctcacgcctgtaatcccagcagtttgggaggctgaagtgggtggatcacctgaggtcaggagttcaagaccagcctggccaacatggcaaaaccccgcctctactaaaaatacaaaaagtaggtgggcgcctgtaattccagctactggggaggctgaggcaggagaatcacttgaacccaggagctggagattgcaatgagccaagatcgtgccatagcactccactttgggtgatagagggagactctgtctcaaaaaaaaaaattaaaaaaaaataaaaaaagataaaatgtagttatgaaaagatttctaagcatttttaagcattttatattaaaacaggaattcagaacaaatcaaaacgaaacaataaaactggggatgaaggaaactcaattttaaatataaactttggcaggtgggtggtgaatccgggtgttgtgagtcatttgctggcttgtttgtcacatggcctgctctataagtgtcaccctaattgatgtattcgtttggagtgggtgctcttctgaggtttttgtttccccctttctttggggtgcactgtgtgtgcatggtaagaacaagggccatggaattagagaatcttgagtttctaatgcaaattcagttccaagcagtgtgacctggttgtttaactcctttgagccacccccgcccatggccctcatctgtaccctgaggataatagtgtgggctttgcaggcttttggtgagcaagtgagatgatgtagcaaaacacccagcccagagcctagcaccaattggtctgtaatccatgctgcacggacacagccattctctggatgtggcctcttctgcctccactgtgaggtcagagactgagtcactgcaggagtaacctctccttggcaagcagcgggagtcatttcatcccagcctttcaggagggtgaatctgcacctggggtccagagtctcagagatgagacgtgagccaggcgctgattcatcatgatgcaggctgtggagactctagccatggtttctccatgcaggagtgaggttgggataaggggtctttctgggggctctgtgctctgtggcccctgctgctccggactggttcattggagaaacctgtcacattctctagaccggttgccacgccatgctcacagtctctgttcttgccttcctaggtgggaagtgagtgatgaccctgaagtgaggactcatctctagatctccaagggctgcagctcagccagcactttacaagggtgatctggagccaaactggcctgttggctgaccataggtgactctgggtagcccatacccaggctcagcagcagttggggagctgcctcgatttctggttacagaattcctggaactgagtcactgcagtaattgctgtgatgaattgtgtttactttgtgtgggattccaaactgtagcagcagtgactacagctggaagacagcatgatcagcagcttccaaggcagagcctggcgtcagaaagctgcattgcgctaatgctgaagcctgtgggagcctgttggagagacacttggatgtttagcgagctggtgactctccttgtcatgagtaagcttaggaccttgggcaagtcatccaaactcttctgggcaagtcattctcctgcttggatgccttgaggcagagaggcagtgaggtgaagtggtcagtgcgtcgactctgcctctagcctgctggggtttgaatccacctgtgtgatgttgtatgatattgacctttctggctctcagcatcctcttgtgtgaaataggagattttaacagtatctatttcgtagggttggtgtttgaatgagttaacatatgtaaagtgaatggtacagtgcctggcttcctggcaagattgctatcaggattaaggcaggttaagcccttggcacacactaagagctcaataaatgtgagctgatgttattggtcctttattactattcaagaagcctgcccagccctcctccctctccatccacacagcagcctggtacccgctgttctctaggttctggacacacgttatgacatgttctgatgatctggcttagacagtggggccctcgaggtaggcccagaggacttggtcctcactgcctctgtggcgccttgcactgggtccagctgacgtggagagagactcaggaaacagtggctgagtgtgactttggctggcatagtggttgctgagagaacagacaaggttctctctcacgacatacagatttcagatcagggaaagtcccagctggcataagtttatcgagcatctcccatggacaagatcagctgtgggtggagccttgaagtacatggtagaaggacagcgagtcttcccaggccagggcttcaagtgaggagacaagatatagcctcccagagaattcctataatgcaatcgtgaaagaaccatacccagcaggaggccggggaaagtgactcctgcaactctaggaaggcttcctggaagaggtggaacgtgagcagcataggattttgagagaagaaatggaatgggctgagggagattctgctggtggaggttcaggttgacctaagggctggcagcagtggaggccccccacgagtgagtttgaggggcctctttagctcagtccagttgaggcagcagagcctttccataggggtgtggtgtgacctgaatgttgggcacgtggtcgtaactgagctttaaaagtgaatgagaggagccatgcgtgatggctcgagcctgtaatcccagcactttgggagatcaaagctgggggatcacctgaggtcaggagttcgagaccaacctgggcaacatggtgaaaccctgtctgtactaaaaatacaaaaatcagttgggtgtggtggtgggtgcctgtaatcccagctactcaggaggctgaggcaggagaatcgctccaacctgggaggcagagactgtaatgagccaagattgtgctgctctactctagcctgtctcaaaacaaaaaacaagaaacaaaaacaaaacaaaacaaaaaaacactgtctcaaaaaaaaaaagtgaataaagagagaagaaaggcggggcacgatgctttttaagtctacgagcatcttatagcattgtttacatcccagcttttcactgacccttcctttacccccgcccccatcccgtggcccttgctctgtcctgccctttctgtacggcgttttctcttcccggctcctctgcccccagccccacgtgccaacttgtttcagcctggcaaggaggcctgctggtatcccagccatttcctgccccaaggccgcccaccctcctccgatctagcatggccttgccctccgtaggcaggcctcacccctgcggcagccgggaagcagggctcctgttttgcctgtttaccctggcgcagggacaggtagatcatgtagcactgctgggatgccagctgcgtaagtctccggcagtgggcacaggcggagggcagggggcattcctctgggctgactcgagcccggcctgcctggcacaagaccccctgctcctggaggcagctcaggggcttgctcatggctgccctggctctgcgctgggccgctgagtcatcgctcagcagtgaggcctctgagtcacagtgcagccctggactggacagtgagtgccttgtgggaccctcctgggctttcctgtccctcagagcatttaaaggggtcccaaattgtcatgtgaccctctctgatgccagagagacactctaggtctttcgcgccctggtcattttacagaactgtggctggatgccaggcattcagagatacattcctcaatctcggtccgccttacaggatccagcatcgaagagttcagttcaagtcagcagccgagttacaggaaagcagccagggcaatgattcagcaagtccaggcaggagtgaaccaggcaagatttcgggaggagagggctgggtcgcgtgtcctggcagggccacaggaagagcatacacatctcctgcgtcttcgtattttgtgagtgtcttgaaatgaccttgagaatctacgcaataccatgaagaagcaggagcaggaataccatttatccattggcacagggtagcatgctcagtgtgcactgaggttgtgaattcttgtcctgacccaaagatgctgatgctgtccttatacccatttcacggttgaagaaactgaaggtgtagtaggagaagatactgactcagaggcacagagttagaaagcagcatgtctgggatttgaccccagacctgtctgactcagtttactattttaaactacccgattcaagttaagtttctctcctctctctctgtctctctttctcccacgtggctgctggaatcttccctaaggaccatagctgtctgcagtgcaggaagccaactattaaggggaaacaaaagtgttcttaggagtcctgctgtcactgtggattgagccggtgaagccctgagggatttcatcgctgaggtggatggagaagcagctgggggccttggctgtaaggacccctaagggttagtgtctggagcttgggggatgggaatgggtcccggtgtgcggaaattggatggctcgctgaccccaaggggaaacccttgttgacgctgtaaagtgtcttctggccttagagaaaccctctagggttcaggttccagcttcaccctcctttagtcaggtggctttgggggggacatttctgctggccctggcagacactggactagagcagtgtttctaaagtgtagccccttctctctcccgggaagggagacaagtgggtgaggggattggaatctgcattcataacacactccccaggagagactggagagcacctttcccggtgaactcccgtcatgtcaggcctcagcagactgagcgggaacccccaccagcgaggttgctcaggacagcgtttctcttgggcctgtgtttggaacaagtatcctttgaactaatcactaacctgtgaaaatggatagacctcgtgtgaaaatgaaaatgtctggcttcccttctgaggagcggaggcatgaaaggtgtggccggtaggggtgggggccccacacctgtgcagccgccctggccagagcccacaagcagcgtcccctggtcatgccccactcccttctccataatctcgcccctccctgaccaggccacctgacgttgccatttatattcaagttcattccgttgttattcttttagaaaagagagatgagaaatatttcttgtgcctacatctttatcaaaagtagagcaagaaacttgaggactctgtttctagaaaaatgagagtgggcatccctcttctctgaaaggaagaatttccatacctgccctctacccaatgtgtagacgaaaggatgagtgtccttttggtgtgtggagagctttgatggggcatgtgatgtgtagggcttagggggtatgctggggtggctgggaaaggtggttgggtgtcctgggaaggcttttatagacactgcgtggcaggcctaggactctaagtgcttccagccagctgtacatacgtatatatttttttttcttttttttttttgagacggagtcttgctctggagtgcaatggcatgaacttggctcactgtaacctccgcctcccaggttcaagtgattctcctgtctcagcctcccaagtagctgggattacaggcacctgccaccacgcccagctaattttgtatttttgatagagacggggtttctccatgttggtcaggctggtctcgaactcccgacctcaggtgatcctcctgcctcggccttccaaagtgctgggattacaggcgtgagctaccacgcccagccccagccagctatattaactcaatggaattcttgttgaggactaaaatggagtttttgttgaagactaaataagtaaatgacagtggagtattgtcattatccccattcaatagataaggaaattaaggtttagagagtcacagtaactggtcctggctacacagccagtcaggagcaaggctaacatttaggcctagagtgctctcctaaccgctatgcctggggtgaggagggaaaccttccatccttgtgtcatcccatttgatatattagttactgaagctgaagctaaaataatccgagggctgggcgaggtggctcatgcctgtaattccagcactttgggaggccgaggcaggtggattgcttgaggtcagaagttcgagaccagcctggccaacatggcgaaaccctgtctctgctaaaaatgcaaaaattagctgagcgtggtggcaggcacctgtaatcccagctactcgagatgctgaggcaggagaattgcttgaacatgggaggaagaagttgcagtgagccaacattgtgccactgtactccaccctgggatacggagcaggactctgcctaaaaaataataataatagtaatataataataatccgagagtgcttaccatgtgcctacattgttctgggatactgagatgaataagacctcttttgggctcttgatgacttggttataagaagaggcagctcggttcccccagggactctcaacagttagggacaggctggggcatggtggctcctgcctgtaatcccagcacttttagaggctgaggcaggaggatggagtatgtccaggagtttgagactagcctggacagcatagtgaggtcccatctctacaaaaaataaaaaattagctgggcatggtggtgtgtgcctatagtcccagctactcagtaggtgaaagaggaggagatgggagaattggttgagctctggagttggaagctgcagtgtgcagtgatcacaccactgcactcagtctaggccacagagtgagactgcctcaaaaaacaaaacaaaacaaagcaaaaacaattaggtacagaaagggaggagcatccacattttctgacattgtttattgcttttttaccctcatgttctcccctctcctggcattgcctggcacttgggagaagtttcataaatattggtcgaatgaatgaatggatattaaatcatttgtgttttcttttgtgagttgaaaccgtcttcaaatgagtcttcaaagtgctctgattcgtatggtggagtgtgatgaagttaaactctgggttgagaagagaggaaatgtgagttaaggaaataaagagaatggagttgaatgttcagaatctttggagtgctgtcagggatccatgattctgaattcagttatcatctttggtgtgagaaatccccaaagattcaaacttgtcaccagaaaggtggtcttaggctgggtgtggtggctcatgcctataatcacggcactttgggaggccaaggcggctggatcatttgaggtcaggagtttaagaccagccggtccaacatggtgaaatacaacatggtgtattttgtgtctctattggaaatacaaaaattagccgggcatggtggcgggtgcctgtaatcccagctaccagggaggctgaggcaggagaatcacttgaacctgggaggcggaggttgcagtgagcggatattgtgccattgcactccagcctgggtgacagagtgagactctgtctcaaaataaataaataaataaataaataaataaataaataaataaaagatggtcttgaggtttcggtttgggcataggttaccttctgcagaatgcatgtgagtgatatggagacaagttttaacatgggcactttttgaaaacagacatcttaaatattggccaaaaggccagatgtcaaagtggactttctatttttgatggaaaatttcaagcctgttttctgtaaaggaatgattattgtacaaggatttctggaactgcaactggcccatagatggtggccattatagtagtttcctatgaaatctactaatgtacagcaagcagttctgtgactttcagtcaccacttggtttctttttttttctttttctcttgtggactacacttgaagattcttttttttttttttttttttttttttttgagacagggtcttgcttaggccggagagcagtggtgctatcatagctcattgtaaccttgagcttctgggttcaaatgattctcctgcctcagcctcctgaatagctgggactttgggtgtgtgccaccacgcttgactaatttgtttactttttgtagagacagggtcttgctatgttgcccaggctggtcttcaactccagagctcgagtgattctcccgtcttagcttcccaaagtgctgggattaccagcataagccaccacacctggcctgaaggctcgtttgtaatggcactcttaagtgagataaattgagtattttcttcctcacaaccttcttatgcttgtctgtagttggctgtctcattttggacaattttgattgtcggcttggctcttcaactgcctgtgttgttgtattcttagaacacacagaacaaccaggtctgggcttcttatcttgcgaggcaggtgaagaaagactaggaacaatgtatttgggtgcccacctcataccggccatgaccttctattgaggaacagcaggtagatgaagcagctttctcatattacgccgtggctgactccaaacttgaactctggtctctgtttttggagcttgcttccttcctacgaccctagactgctcctcctaaataattaagtggcaaacatggcacagacagtaacctcacataagaagctatgaggttaggacagaaatatccactgctggcctgcgaactattcacacaggtctgactccccgccagagtcctggctgccctggtcctgtggaatcccgtcatggcttctgtctaaacggagcaggctcagggccatgctgaacttggagaaatctgtgcaggagtcagatttgggctttagagtcacctggggttgaatctcgggcctgctatttattgaacctgtcctagcctcaatcgccttatctgtaccatggggatgataccatctaggtcgaaggtagttgcaggagattctcatgcacggaggcccttggccgtcatttgtttctttgtctctacaagcagagaggctgagtcatacagatcctgaggggagatcactttctcttccctcctttcgtgtgtcatctccacctgggtgtggtgagccccaggaataatgctgtgacatcaagccccgtgaacacctcctttcacacggaccccgtgactggctgcggctgccagcggtgatgagaactgatgacactccagggctaccaggaacggtgtgtgtgcctctgggcagggccacttcctagaaccatggggctgctctgtgaagagaaccggctcccagtgagctccaggagacgaggagcaggtcctggtggcggaggtgctggcgcaggaggccggctcctggcagaatcggcttccagctctgggcactggggtgcggtgtgggaccagcaacaggctgctcctctgccaggaaccgccagaaccaaagtcttctcgaaggcatcttcagaaggcaagcacagggctgagcactccggagaggagcctttgggggaaaactttttctcggagcttcggagctcagggagtactatgggggagattcactaggttgatgctttgctgataggcagccctgtagagaagacaaggcagctgggcatggtggctcaggcctgtaatcccagcacttcgggaggccaaggtgggcggatcacaaggtcaggagttcaagactagcctggtcaacatggtgaaaccccgtctctactaaaaatacaaaaaaattagctgggcgtggtggcacgtgcctgtaatcccagctactcggaaggctgaggcagaagaattgcttgaacccaggaggtggaggttgtagtaagtcgagatcacgccactgcactccagcctgggtgacagagcaagacccaatctcaaaaaaaaaaaaaaaaaaaaggagaagacaaggcgacaactgtgagctttctgtctcctgtggagtttagcacttggtcaggtggccatttctctccctcctactcggtgaccttctcaagggcaaggggctccttgaagagtgtctttcacattgaaacatgcacagaatggtggcttatgacccatggtagaggcgtgaacttgggatgccactgtggacgtgtccccagcctccctcctcattggtgtactgatatcgtgttgccttggacctattacctcacctcttcctggtgatttcacctcaatatcccctttctcctatgcttctgtttttccttctacccttccatgtttttttctcccaaccattcttctgtattttattccacccagccaccctttcatctaaccagccttccacctagctaggcttccaactaactatccttttttattgagacagagtttcaagtggcacagttgggccacttgtttctgatgggagccacttctcaaacaggtcgatgactaggactttggacaaaagcatgggtgcaggctgggcgccgtggctcacacctgtaatcccagcactttgggaggccaaggcgggtggatcacctgaggtcaggagtttgagaccagcctggccaacatggcaaaaccctgcctctactaaaaattgatcaaatatagatcacccgtaattatcacccatcattctgacacttagcaatagtcacccttaacatcttgttgtcttgctttcagatggttttgtttttgacatgtttttttttttaacttatattatgaccatctcctctatgtcttttaaagttttaaaaacttgttttgaatatcttttccatatttcattatgcacctgtacaggaaaggtactccataagtaggtttttcttctctgtaaaatggggaaaataagaaccccttctacatggggttgttgcgaggatgaggtgaagaaagttgtcaaagcccctcgctagtaccaggcacagagcaggtactgggcgcatgttgcctgctactggtattattgtcattgtcattgctaatcatcagccaagtcagtcctgcggggctttcagatttcctctgcttttacctgttgcaaggtataaaccttttcatgtgtctctgattgttttcttggcagagccacccacaccccaggaatttaatagggtcttgatgcattcccagcttgctgttgaggagtatttaaccagtcaccactccacaggcaatattaggggttgctgaggcagcctccaatagtgtgagcattctaattactgcagcaaactcttttaaaaaaattttaacttttctggctgggcgcgttggctcacgcctgtaatcccagcactttgggaggtcgaggtgggtggatcacttgaggtcaggagttcgagaccagcctggccaacatggtgaaaccccatctttattaaatatacaaagattagccaggcgtggtggcaggtgcctataatcccagctattcaggaggctgagacaggagaattgcttgaacccaggaggcagaggttgcagtaagctgagatcataccactgcactccagcctgaaagacagagtgagactccatctcaaaaaaaaaaaattaacttttaatttttattttttagagacagggtctcgctttttcacccaggctggattgcaatgatacgttcatagctcagttcatagttcatagcttagacctcccaagctcaagagattcttccacctcagcctcccacaggtgcacaccactatgcccagctaattttaaaatattttttgtacacatgaggtctcactatgttaccaggctggtctcaaactcctggcctcgggcaatcctggactccccagatgctggaattatgggttgagccatagcctgcagcaaactcttaaaacatgaggggaactatcttgttataaagttgcttttctttgactactggtgtggttggccagcttttcatgtttatggcttatttgtgtttgttaactggtcatttcctttggggtgttagcaatttttttctcattgatttgtaagatctgtcttgattaacttgtgaattttgcagatggtggaaccggggtgccccacagtaagtcccctttgttaggcatcctgtccctggattcgacacctccatttctatgggggacatttctttacaaatctgcatctgattgtgataccaaaccatgctttgcaagtgaatacaaggatctaccccattaatctgggcagttgctagttttatttatttatttatttatttatttatttatttatttatttatttttccgagaccgtgtcttgctctgtcacccaggctggagtgcagtggcatgatctcggctcactgcaacctccgcctcttgggttcaagcaattatcctgcttcagcctcccgagttgctgggattacaggtgtccgccactgcgccagctaattttttgcatttttagtagagatggggtttcactatgttggccaggctggtctcgaactcctgatctcatgatctttctgcctcagcctcccaaaatgctgggatgacaggcatgagccaccgtgcctggccagttgccagtttttaatgttctcaggtgagtggcatttgccaaggaacttctctcttcccttctgtcttcataaacaaaaaatcctactaacttcaggtgtcagtttaaaagtcatctcttctgggagccccaccttaaacccctaaatcagctgttggcgtcgggggtggacttctcctttgttgcaccaattgcaatttcttacttaggtgtgtgcttgtgggaacatttttgtaatatcagcttctctgctaaggacagcgatcatgtctcttttatcatttggtatgtgttgctgcagcacttagcacagtgcttagcttggaagccaaagcccagaggggtagaatgacttgcttgaggcccctcagcttggacctggcagatctgggacccggtgtctgggcccaccttcaagctggatccctcaggaccctgtgtacctgtggccagggctttgctttggtgcctggatgagagtggtaagagttgctgaggtgccaggcctttgcccccatgcccgctggcatcactgattccaggttattttggctcagcgcggatggagcgagatgtaggggaaaggttgggaccggcttccaggtgattggcacatccctgccctaaaccctgcatggctttcctgggcctgccatccaaggggaaagaagcctctttcctcacaagctgaagcttgaaaccaatcaagctccaggccagagaagctgcaggtggggtgtggtttgcagtgggggtggggcaggaaagaaaggttacgtggggtgaaggggtcaggtcaattcagtgtgggttggaatgctggggtcctgggtgagcagggatgaaggacacctggggaggggagagagcctgccggctggaactggggccctgccagtcccccgctgcatgagtctgggcatgcttccaatctctgggagcctcagcctcctgtctgtaaaatggagctaatgaggcctgccgtcagggtttgtgggcaagattcagtaactggatgcctgctcctggcccttggcaagcattcaataaatgttgatttctctcccacccctcgctccttctcttattcttttcctgttgcttttcacacggacatgtgttgaatgtggcaggatatttctttcttttttttttgagacagagtcttgctctgtcacccaggctggagtgcagtggcgcgatctcggctcactgccagctccgcctcccgggttcacgccattctcctgcctcagccccctgagtagctgggactacaggcgcccaccaccacgcccggctattttttttgtatttttagtacatatggggtttcaccatgttagccaggatggtctcgatctcctgacctcgtgatccgcccgcctcagcctcccaaagtgctgggattccaggcatgagtcactgcgcccagccaggatatttctaacacagagaaattctcagtggaggccgcgggaactagagatagaggtcctcttgcctaccaaagcaccagatggaggtgacagaggccatcttgtcctagagggacctggctaagaggatctaagaccagaactagtctgagtgcttgggattcatatggggctgtagacggcaggcctgcttgaacaccagtgttccaatcccacatctcattcttagagctgtgtggccctgggcgagtctcttgccactatttcttcatcctgaagtgggcaccacattactgcacctcaatttggacgaggattctcaggatggggaggtggttgaaatcatccaggggtcactggaatcaggatggtcctggctttttcagaaggacaaggtggtaggtgccaatctgggggctttgcagatattgaacggcagcctgaggatggggataaacctgggtgtggcagacagaattatgcttcccccaaagaggttcacatcctgatctctggaacatggggatgtcatatgccatacagagaagggaaattaaagtcacaggtggaattaaagctgaccttaaaagagggagatccttttagattatccagagggcccagtctcatcacagagtccttacaagtgggcgagagaggcagaagaagggttcagaaacatgtgaggtgacaagtaacattgctggctttgaggatggaggaaggagccatgagacaaggaataaccgtccctagaagttggaaaaggcaaggaaataggaactcccccagagcctccaggaaggaacacagtcctgctaacactcagtgagacccactttgaactttgtatgttcagaactgtatcataataaatgtgggtggatttaagcctctgagtttgtactagtttgttccggcagccctaggaagtgaatgcaatgggcgcagcatttgatggccagcctggcatccagcctgtggggagtgggagctgagggcagtccaagggaaatgtcctttgagtgtggcaccggcaggcaaacccttgtttgggtgtgatcatcagtgagttgggccactgaagctgcctggtgacctggcagggatggcttaagtaggcagggtttgcagatcagcgagataaaggggcttgcataaattcacatgcccatggcttctccctctgacagcgcagccctgcctccggctgcctggccaggatggcgtgttggtgcattagggaccccttcctctcctgccctgctgtttaaattgttggtctgttggcgttctcaggagccctttaccagtacccttaggccccagacgacctactcctcaagctgatcatatctgctggctgtgtccctgctctgggcccagcaccctcatggttttccataacacgtatcccaactcctgctgatgggaccctcgtgagctgtctgtgtagggagcatggctgcccctgggtctgctttcctgcccctgacccacaggaataggatgtggcagagtgggggccagatgacagagatgctggtgctctctgagctgaggcccactgctgacctgctggtggcttgtcctgctcttggatcataggcactgggacatcctgccttccttcagtgtcccctcccactccctctccttcagcatcagaggaatgaaggaggcctggaggagtagcccctatctaatagagacaggagtgggctgggtgagcatggggtggtcgcagggggaaggggataggagatggagagaggaacctgctatctggtgggttccaggatggtgacagacagtggcagaagcagtgcagagaccttagtttgtgctggaggttcagttaatcactggtgaaggcagacatcactgcaggagaccagactgttatgtattgtctgtgcattcatattagtacacagggaagatcttgggctccgagacctaggcagatcttgcctcccatctgccgaccctccgcagatgctacacattatgccaggtaaacacattatcaaggagccttgggccgtgttagaggaaggctccttgtgcctgtgaggagtttgcactaatgctatgtgtgtttgtgtgtaaggcttgcattcactgattcactgtagaggatgacttgaaacccaagtcatcagctgggcagtgcatgggctgctcgcctgaatggtgaagctctaccaagtggtttccacctagggcctggcttagctggcctcagatgcccttctcagttctgctcaagacctgcctgcggccttcctcgggcttgcttgcccagaatgctaggaatggccagggatactgcctgggcatgtgtttggcctcagccaaggtcaggctgtcaggaaggaagaagggggaggggcacacttgcctgggagggtggaggaggaggggtccaagccgccacagcctggcagtccttttttgtgcaaaggagacccatcagctcctctgcctggaacacccccatttactcctccgcagttagaggggtgggaggtgaggaattttgtgaggggaattatctctgatcttgatgtgcacattcctcggcagtatcccgggcttggccagcttgctgacacctggctggaataacaatgagcgatgcttctggaggatgctccgctggggagggctctgctgaaccagcacttactccctgcttttcgatcctcactctgccttcctgtctgacaaaggccgggctgttgggatggtaatgccctctgggctggccttgattgaaggtaaaaaatgaacttcgaggatagcccctgtggctgtgcagtctcattttttatgcagatatgttgggggatgcagagacatggtggcgggtggggtggggagaaggggactgggaaatctgagacctgaagctaagatctgagatgtcatcctttatggagcatctccggatgaaaatgtcccagaggccctaggtcactcaccctctgccccctaataaaatcactgttgctgcctcctgctgaatctgaagtatgccttcactgagggcaggacgtccatctcaactattatcaaaggaaaacataacaagaggcaacagcacagcccccggggcatgaggctccttcctctgtgatccctctgtccttgtctgccagtgtttttttccttgacttttaaaataatctttttcttattatgaaatagatatttattttgcttaacaaagaattctgtagtccttctagaagctaggtaactcttctaagtcctttgcaaatattaagtcatttaatttaatcctagagcagttctgcgaggtggtgggaagacctagagaggttagggtccaccttagcactagctctctgagctataaggcctcagggtctgtggcattccctactcactgaaaagaagggaatttaaaacatgagttccaccacccagaaatgaaacagtgttcatttccagaatccaggcatatggttgattttaccaatttcctgtcacttgaatcacagttttttttgtttgtttgtttttgtttgagatggagtctcactctattgcccaggttggagtacaatggtatgaacttggctcactacaaccccgacctcctgggttcaagcaattttcgtgcctcggcttccagagtagctggggttacgggtgcatgccaccacacccagctaatttttttgtatttttagtagagatgggttttcgccatgttggccaggctggtctccaactcctgacctcaggttatccaccctcagattatccaccctcctacacctcccacagtgctgggattacaggtgtgagtcactgcacctggcccacaggttttttttaatagtcctgtgtgtataattttgcatcctattatttctccttccttttaacatatatatatatatatatatatacatatatatgtacatatatatatatatgtatgtattatctctttactttttaaaagtttctcagactttaagaattacttaaaatttcccaaaacaaacccacaggcactgctgtgatcttcaggcacactttggtattcaggagttgcttctgctggaccaaagtcaataacaagtagcttaagaagctgtagatggcagagataatattgactggaggcttaggggtctggttcagggtggactcaacaattttgcaagttctatattgttaaaattacaatgaattatttataagcagttgttagtaaatcatgaagttggcattattattctttatttatttatttattttgagatggagtctcgctctgttgcccaggctgaagcgcaatggcatgagttcggctcactgcaacctccacctcccaggttccagtgattctcctgcctcagcctcctgagtagctgggattacaggcatgcaccaccacacccggctaatttttgtatttttagtagagatggagtttcatcatgttgcccaggctggtctcgaactcctgacctcaggtgatgcacccacctcctcctctcaaagtgctgggattacaggtgtgagccaccacgcttggcctattttttattattaaaaaacaaaatgatgctgatgctttcaaatatgtattgcagtcttattacttagtattgagctttgcagtgttggactaatatcacaagtcgaagggacaaagaagatggtagacaataccaactgtttcccattaggctctttccctcctcttgtttttctgagaccttaagggcctggttgtttctactgttccctgctacttcataacctgcaagcttgagaatgtttgtcatttacaaattttaccttatagtagaagaacatagtaaataattgtaccagattgagtagtgtccccccaaaattcatgcctgtatgaacttcagaacatggcattatttggacatagggtttttgtttttgtttttgttttgagatggagtctcgctctgtcactcaggaaggagtgcagtggcgtgatctcggcttactgcaacctctgcctcctgggttcaagctattctcctgcctcagccgtccgagtagctgagattacaggcacccgccaccaggcttggctattttttgtacttttagtagagacagggtgtcaccatgttggccaggctggtctcgaactcctgaccttcagtgatcctcctgtctcggcttcccaaagtgttggggttacaggcacgagccactgtgcctggtggacattgggtctttttagatgtcattacttaagatgatatcatattggattagggtgggggctaaagccaatgacccatgtcctcagaggagaagagagggacataggaaagaaggatttgtagagatacagggagaaggccatgtgaccacagaggcagagattagagtgacacagctacaagccaaggagctccaaggattgcaggaagccaccagatgccagaaagaggcaaggaaggatctttcatggagccttcagagggagcacagtcccgctgacaccttgatcttggacatctagtccccagaactgtgagagagtgcatctgctgatgtaagccacccagtttgtagcaatttgttatggctgccctcagaaactaagacagtagccaacacagaaccaaataccctttggggattgagggaagtggagcgggagaatgagcggcactccctccctttacataggactacttggtaaatatttactgaatgaaggaaagctgaagtatctgtagaactggccatttcattctgcatttagagctctgggagctcttgaaatgtctagacaaacatcctcttcagctagaggaagctccttctcccacttactagctatgagatcttgggcagatggcttaacatttctgggcctcagtgaccttacttgcaaagttgtctgggtcaaggcaatgattaaatgcgatgatgcatgtaaagccccagcatgcagcctgaaaatgtgagcccttattatttatactgtttgccaaagtggtgagtagtgttgctgaatatgccgtgtgtcctattaactctgtgacggccacagtcacgtctcctttctgcctcctcctcctcctcctctctgtccagtgactagggagggcaggaagttcagagggtgaaatgctgaattaattcctgtcctcctggtctatattccagatcaccctgtgggtgggttgaaaaccatgccctgtctacctcctctgcaaggaaaaaataaagacagagagcaaatctaaaacacgcaatgcagaggaatggttactgcctgctgtgtgcctctccagggagcaccaggaggggctgtgtgggacagggacactgcgtataagtgacactcctccacattttggcctggagttagcacatacaactgcctttttgctgacgcgatgcccaggagccctctcaggggatggcaaatctcagaataaatgtgttttttactcatggaatgcaggggaatggatatgaaaacttttgtatcaaatagacattagcgaggagagggatgcttcacatcctaggtttgtgtgatgtcggcacagctgatgaggtctttgcaaattttgctgctgaggaagggatgcgctggactcccagtgtccaggggccctctgcttgtctgtccttaggcagagtccaccagaatcgggtaaagtatgtgactgcctcttagtgtagggcatgacgtcaactgtgaggagaagagatcaagatacagctctttggtggtgttttttgacccatatccaggaactgttcccacacccagagaggaatatctgcaagttctggtgccagatgttgattcaaaaacaaaacccagcgaagcatctgtacttttttttctgattgtattagaagtacagtccacaataatatattgtacatttaaaaataactggctgagcgcagtggctcacgcctgtaatcccagcattttgggaggccaaggcaggcggatcccctgaggtcaggagttggagaccaacctggccaacatggcaaaaccccgtctccactaaaaatacaaaaaaaattagccagacgtggtgatgggcacctgtaatcccagctattctggaggctgaggcaggagaatcacttgaagccgggaggcggaggttgcagtgagctgagatcatgccattgcactccagcctgggggacaagagtgagactccgtctcaaaaaaacaaaaacaaaagaaccctcaaaaaactaaaagaggccgggtgtggtggctcatgcctgtaatcccagcacttggagaggccgaggcaggcagatcactgaggtcaggagttcaagaccagcctgggtaacatggtgaaaccttatctccactaaaaatacaaaaatagccgggcttggtggtgggtgcctgtgacccaagctactctggaggctgaggtgggagaatcgcttgaacccaggaggtggagattgcagtgagctgagattgcgccactgcactccagcctgggtggcagagagagtatccgtctcaaataaataaataagtaaataagagtttaattggattgttcgtaacacaaagaaagggtaaatgtttgaggtgatggatgccccatttaccctgaagggattattatgcattgtgtgcctctatcaaaatatctcatgtaccctataaatatatatgcctgtgtacccacaaaaattaaaaattaaataaaaagttcattaaaaataacttcaaacactacagaaatgttaaaagtagaagtgacctttccgtagaatgtcatgcctgtactttggcagagaatttcaatggaagcatccagaaaaccctggctcggaatctgagcttgattatttcagtgtttcaggtctcacatgggggacagtcttgccactgtcaaaggccatcatgagagttacagcagacttttgatgaaattatgtccacagtggtccctggtcctttgtggtttgagatatattctttgtccccacgcctgccccttgcttcagatcttctaggaatccagatacattaaagcaaagtgacgggacagccctgtccatttcctgatctgttgctgactgtaccactgagctgctctctcctactgagccccgcatggttcctcctgttttcctgccctctcacttgctggtgttggcctgctctggctgttctgcttggggttaggtgaggatatggggcagaaggcttccagcctggagcgcctatggtgtcccaagacaagggcctgcctctggcctctgggtgtgtcctcctgcgagttttagagaaatctgggcaggctcagactgaatgcctgcttctccttgcagccttctgaagattcccatgacacacacctgatttaccttcagctcttttacttgctgggtaagcacagccctggattacttggcatctggaattaactgaagggtaacactttcttaaccttatttggaaaatgaataggaaggagaccccttctaacttctggaagcacaaaagtgtgtttatccttcaggagcattcttggctgctgaaaaatcatcatggctagctttcactttcacgtattgagctagtaggtggtatcaatagtagctaatatctatttcatgtttttttgtgtaggagggacccggcgtgcaatttgcatggattgtctcattttatcctcccagcaggtaaaagagctgggagggagtaaagggagttgttaatttctgagaaggaaggtgaaacttaggaatgttaaatacccctcttggtgtacacagtatgcaatggaggcagggtgcaaatgtgctatggagatttcagagcctgggcttcccagaggaggcctttgccccacagaatctttgctccatttctccactttgctgcctctatgaatcaatgattctgtgttgtccatttttcctttgcaatcttttgccatctcttcattaaaaatggtctccatcattctggccaagcacagtgactaacatacaataggtgtgcagtaaatgtctagtggatgaatacccagtgtgaacattaattgagcaccactagctgccaagcagccaagcaccctatatctgggagatgtagaatttaaggctgtgtagtcactgtcctcaagctgctcacagctttgtgtaagacactcaagggaacatgcaaagctcagggcagctcaatttggggcgagggttatggagaaaatacagtctgcatgcttttagtacatgcagttctgcatcttggggtgcagtgctagagtgaatgacacagtagaggtgacaggcttaggatttaaatttgataatgtcatgatgccatgggagcactggagaaggggcagcagtggattcagctgagagtcgcaaggggttaatgagaagattgggaaaggctgcacagaggaggagaagggctttgtaggatgagtagaggttcaccaagggtgggtaacagttagaggaacagcaggtacagaagcccagaggagaatcagtgaatgacacatccaccatgtccagagatcagggatggttgcagctgaagctaaaagtgtaagagcttggactgtggatcttcaatcccagttcatcttattcccacccatatggctggtgctatggttttgtcacctgtaacacaagtatgagactggtaccttcctaggaggggtgttgagagtctgagccacactcaaattcttggtgtgcagtgtctctgatctgaaatgtgcaccgtgaatgttagcagtgggtattacctttggcctgattgtgaagcgggtttgagacagaagtgaagcagttcaatttgttgtgtgatcttcttcttccccaaaagaaggttttcatcctccttaaggcttttgcccacccttcccttccttcacatccctggtgggtacccttcccacctgcaggaagcctactgatctttgagttttggcctgccacctggcccttccctcgctctgcagtcttggttggcctccaggtgtgtgtgtgtgtgtgtgtgtgtgtgtgtgtgggtgtgtggccctgggctgcactgtgcctgctggagcaggtgcagttgccctttcaccatgcgtgcttctttggatgtgaccccttgggtgcctgtgtatttagagtggaggaacgtcctccactataatgatgagaagtgtcattgctagttgcactcagttttctatggtgtttgggggagaaattggggtgctggattttggttttaactctttcccaccttaaccagtgactgtggaaagttgcacatcgtccccttcctcacagctggggtctgttcttcctccgggtgttacggtttgtgagagccaggagggtacacagaggtggcctgatttctggagccatagcaagaagggagaggtgtgtgtcctctctgtctctgtctctgtctctgtctctgactctgtctgtctctgtctctgtctctctctctctctctctcttctttctccctctccctttttcacatgttgttttctgattataagaggaatacttcatcattagacatatttcgagcctccgttcctcatctatgaaataagcatagtaaaggactgaaggatttaaagggatgtggccaagtgtgcaaagtcatatgtgctcaataatttattttccttgttttcttttccatttccttcttctcctctaaggcgctccacatctccgtgatatagcgtgtactcctttcctcattttcttttctctgagacaaagggaagttcctagttctgctatttcctagttcagtgaccttggacaaggcaccctggggagccttagctgctcatatgcacaagcttctagcaactgcttccaagggaagggtggggaggaagggagaccctgagtgtttggaccccgcctgtgctcagcacagaatggagctcagtaagggcaggtcgtgggctccttcttctccctttcagcaaccatcactcgtattcttttttatctccaaggcctcatgctggaaagagattgattgctctctgagcagtaagtcctctgaaacagggtttctctggggagttctgtggcacccctgccttacctgggggacctggcaaagaggcaccctccaccccccctcaccctcagccaggtttactgaacagagttacggggttgggcctccggatctgcattggagcaagtccacaggtggtgcttaggcacactcaggtttgagagccactgacctagaggggaagactgggagaagccttttaagagaccagtactgtgacttgcaccatggagacacctggaaaacatacagtgattcacacacacgccccaaacagcagtgtgtgtgtgtgtgtgtgtgtgtgtgtgtatgtgtggtttcacacttggtttgctatgaatgctgtaatgccacccagttcccacagagctctggggactcaggttccccaagtcagggttcttttctggagtgctattctgacaggtttttatttttatttttttaattattttattttatttttattttattagtattattatatctgacaggtttttaatacagtgaatttgtatgtctcctgtgtatttattttagctgctcccttctttccccttctctccctttcctctcatctcctcccgctttcgtcctttacctttccctggatgatattagcattacccgtacactcttcccatctcctggcccctccagttctgaagggatggggactaagtgggatctgtcctctaagcaggcggaggagggaaccatgtcagctcctaggtgcccccagagcacctgctgccagttttccacaactcctgtcctccgtggcgcttgggtgacagcagagcagagccgatgtgcctgctcctggtcatgggctgttcgtgctgtcatcgctttcatttgccccatccccccaatttggacttacccagaatccttgggcaagctagatggctgccaaagtttacttagcgagatgtgcctgcgtgacttgagtagagacctgcttctgagaaagtcagaagtgcattccaaagtcaggagcgtgacctccccggaagcccagctaatccaggttttaaagaggagttggaacaaaggtggtgcttatgggatgtatggagctgtgggatgtgggagaggacaggtttagcagagtggcgtggtggaaagtttcctctcgccgaggaggacaactccccagcgcctgagacagcgggagctcagagcgcctagaatgtgcccagattctaaagtgaagcaggctgtggtgtgatgatggcccccgaggggacttgcagtcttatggacctgggttcaaggccaccctcttcagccacacaaactgggcaaggggcccgcccttttcacgctgctgtttctgtaactttcagatatgagacctgtctgtggggttgtgaggatacatggggattaagtgggaaattaaaagggttttctttgtgactggtgactgataaatgccatttcctttcatcctccttattttgacattagccccaacctctaccccgagggtctctctctctctcttcccaacttagattcctctcaggggacacatagacaacccagaaaagcagctctgatctctcgtggagcttccctgaactccacaccgcacatctactactgtttaggataacattttgacttagtccttaaacggactatttctcatagtcctgttttgtaaatgagattttaagctctttgcagacagggaccagtataaactcttgagtctctgtcaaacttagtgaactttctttccagcctgggcaacatgatgaaaacctctctctacaaaaaaaatacaaaaattagcagggcatggtggctcgcacccgtagtcccagctactctggaggctgaggtgggagaattgcttgagcctgggagtttgaggctgcagtgagccatgatcacgccactgcactccagcctgggtgacagaaccggactctgtctcaaaaaaacaacaacccccctcccccacaaaaaaccttactgaactttcttggagaacatgcacactgtagaaccttctgtatttggaatcttcaagtgcaggtcctgctgttctgtaaagaactgtcaccttgagtcattgtttgacggctcaggtccttggcactttacccctttgttcatgattgattgacatttggacctttgctgacctttccctgagggattttgtgggcatagtcaaacaaaaggaaattgaaaaaaaaaaccccacaaattttgaaggtctgtcacttggagaagaacagtgttcatgactcttcttcgtcatttcagcatcttaatcatcttgagcctaaagatgaaggagagtggaggtgagcctgattaaatgggagcttttcctatattgaggatctactaggtgcaaggacctcacttgggttatctctagccttcccccaactctgcaaggcatttcacagatatggatgcaggttcaaagaactgaagcttaaagcttcgcagatttggaagcctcagagctagaattctccccctagcctgtttgtctctgaagcgttggttattgcttgacattgcatccctccctcttttttccctctcttcctctttcccttccctgccactgtctgcctgtcttcctgtctgcctctctttctgtcttaaaattactgttgctattccttactggtctggtctggtctagttaattaaaaagaaggctatcgtgaggtaaccctgggatccttattggcacagtcatattcccataacttttaggtgcctgagtcctaatggatctgtaagacagtgcccatcagcgagaaatacccacagcctccctggatgctgcccacaggcatcttgcagatgagggtgtttgccttctcacctgcaagggggtggggagaagtggccaggggtgggctgttctggggacgcctgcctccccactccctgagcctagggggaatgatattatggcttcaggccacaactagacacattatctactctgacagggagccagtctggagaaggatgtcatggatgacgtgaagaaattactgagggaaaaagagcaaggcgtgagccctattggggctgttttggtcaactcctggcagtagatgatattgatgctttggaaatctctattttccttgcatttcccagcaaagtgccattcccatctctttcttttagaagcttcttatcctatggctctgcctccagtctttctcatcacataattcttcaaaggcaaggcagactagtggttaagaacaaagacccagggctgggcgtggtggctcctgcctgtaatcccagcacttcgggaggccaaggccggggtatcagttgaggtcaggagttggaggccagctttgccaacatggtgaaaccctgtctctgctaaaaatacaaaaattagccgggcgtggtggcaggtgcctgtaatcctagctacttgggaggctgaggcaggagaatcacttgaacccaggaggtggaggttgtagtgagctgagatcacgccactgcactccagcctgggtgacagagcaagactctatctcaattaaacaaaacaaaacaaaacaaacaaacaaaaaagaacaaagtctccggaggcagtgcctgggctcgtatcctagctctgtctcttgctgactcctgcatggcttgggcatacttgggctttgctgtgcaccagtgttctcgtttcttagtgagttcgtatctcacagcattgttggagattacaggaacacaaccaatgctctcagaaccagcactcaggaagtgtggtaattacatgctcttctgggcttctggtcatgccaccttcgacggacaatgcgccagcacccaccagtttaaggaccagttcctcctctaggcattgtgcccagcgcacccttctcatggagatttgcttctcactctgcatctgcaggtcttcgctgggtgatcttgggcaagtcactttacttctccaggccttacttctcagctcttcagtgaggacattgaacgagattatttccaaggtttcttgtgtgctgacgtactggggcctctcacattctatgtggtccaacctttcctcctgttcctcagcttctgccagcccgccagggcaacctggttatcaacaaatgtcctcgcttatggacatgtcctgcttctctggaaatcttagtacagcctgaaagctccatgaagtcaggattgtgtctttcatgtttgatatgatttctggcttctagcactgtgctaggagctagcacgtgaacactgtctgtgtagctggaattaatcacccactattccagtcaacaattccttttttctttgagacggagtcttgctctgtcccccaggctggagtgcagtggcatgatcttggctcactgcaacctccacttccgggttcacgccattctcctgcctcagcctcctgagtagctgggactacaggcgctcgccaccacgcccggctaatttttttttttttgtatttttagtagaggtggggtttcactgtgttagccaggatggtctcgatctcctgacctcatgatccgcctgtctcggtctcccaaagtgctgggattataggcatgagccatcgcccccggcccttttttttttttttttttttccgagatggagtctcactctgtctcccaggctggagtgcagtggcatgatcactgctcattgcaacttccgcctgctgggttcaagcaattatcctgccttagcctcccgagtagctgcgactataggcgtgcaccaccatgactggctaattttttgtactttagtagagacggggttttgccatgctggccaggctggtcttgaactcctgacctcgtgatccacacgcctcagcctcccaacgtgctgggattacaggcgtgagccactgcgctcagctttccagtcatttcttaagcgatgttgagttcccaagcactgtgccggacacgcatgggttgctggaggctggcagaacccgaatgtcagtattcctgaagaatggctctaagcaatgtaccttgcagagctcaagcagggctctgctgcatcatgcccatgaaggtgcctgctggtagaaggctggttctatactggctgcttgcctcctccttgtggagacccacattgtgtctggcaaagtgcagaaggaaatcaagcccttaataacattagggaactggactgggttcggtttgcatctcccgagtctgactcgtgggagtaaccaccataatagcagcgctgtgctgttgagggtgactttgactatctgcttgtgttgtgagcccactgtgtgccggagcactctctatacattcagtcttgtccgcagatgaactccagtggacacatgtttctattccttattattattattatcatttgtttttctgagataataataataatattattattaatattattgttattatattattattattattattattattattatttcagatggagtttcactcttgtcgcccaggttggagtgcagtggcacaatcacaatctcagctcactgcaacctccgccttctgggttcaagtgattctcctgcctcagcctcccgagtagctgagattacaggtgcccgccaccacactcagctaatttttgtatttttggtagcgatggagtttcaacatgttagttaggccggtctcgaacttctgaccttaggtgatccacttgccttggcctcccaaagtgctgggatcacaggtgtgagccaccacacccggcctattattattattttttgagacagggtcttactttgtcacctaggctgttggctcactgcaacctccactgacttcctggactcaaggaatcctcttacctcagcctcctgagtagctgggactacaggtgcgccaccactgccagctaatttttgtattttttgtagagatatggtttcaccatgttgtccaggctggtctcaaactcctgggttcaagtgatctgcccgcctccaccttccaaagtgctaggattacaggcatgagccgctgtgcccggcttattctttgttttattgaacagatgaggaaacactttcaatgagcttaagggatgtgcccaaggccacacggttgtgaccacagcatgaggattcacaccttggttcctgtggctcccatcccccctcccctgaatgaggaatcgggtgagtgtgacgggagcaggcactcgaaggcttgggaattccaaagcagctgatccatgtcatcccagcacacgttagggaggaagtgaaacgaagcaaaaatagagcctgtcagcggggggacagctgccgctttctctgggaacagatctccccgatttatcttccaggttaggaaagccccagctcctggggtaccacagagaaataatgtgagcacagccagagaaattgccacctctcccttcctcagaagaagataaaggagacatcgtctttttggcatcagttttgaagaaatctttttttttttttgagatggagtctcgctcctgttgcccagcctggagtgcaatggcacaatctcggctcactgcaacctccgcctcccaggttcaagcgattctcctgactcagcctcccaggtagctgggattacaggtgcccgccaccacgcccagctaatttttgtatttttagtagagagggggtttcgccatgttggccagtctggtctcgaactcatgacctcaggtgatccacctcctcggcctcccaaagtgctgggattacaggcgtgagccaccacacccagccagttttgaagaaatcttacttcacaatcctgagagaaagagaaattgaggcacacttagcatgtgagactgatttctcacttctgctgctacaactgctgccccattgaccgggtctcagaggtgttataattaacatcctctgactcttgctggtactaaaattaacaacatgactggtcccttctgcaagagagggaaagagatacacacatgtgcacatacacgcacacacatgcctgcacacacacacttgcacgcacacatgcatgcacacacatcacacacacacacacacacacacagacacatgcggagtccagaaggctcagagacagagagagagagaggaaggcacagccacacacacactgggagacacttattatggctccccctgcaaacggtgctcccctcaaagctttaggaccagggacgccttccctcactttctgtgttctgtacctcataccccatttaccagcctgtgccaaccctgtatactttaagtcttcagttaccaaagcatccatctgcccgtcctatattgagggggagtggatgcgcagaggtggtctgttggtgttgggtagggaatagacgcagcctgtttttcgtttttcttccaaatgtcttcggcagggcctcagctagtggaaatacctggtggggagggtcaagaaggaaatgacagtggggggaatggggagggatagcattaggagatatacctaatgttaaatgacgagttaatgggtgtagcacacaagcatggcacatgtatacatatgtaacaaacctgcacgttgtgcacatgtaccctaaaacttaaagtataataaaaaaaaataaaattaaaaaaataaaataaaaaaagaattcctattttaactttggaaaaaaagaaaaaaagaaggaaatgacagatttggtcctgacagcctgggaggcagagaggagagagatggagccaagagaatggggctggggccacgttttcttgtggggcaattccgtgtcactgggccagagcatgcttattgtgaagacttcccctcagtgtcctctggggaagggtcagctgtgaggcagtggggcgtgagaatacgatgaaacagggaaacctggaagctgccgattcccaggccttgaaggggtgttctgatgtctttgacattccagcaaacatattttcacaggaaaactcaaaaaatataaactccctttttatagaaataatgtgcatggagaaaagtgcacatgtcatatgtgtatcgatagcttgacgaatgttctcaaactgaacctgagtgtggagccagcacctggatcaatagaacatttccagcattttggaagccccctcccagtcagtcactcaggagaactttgtcctgacttctaaccacacagattagtttaacctgtttatgtacttaatctaaataacatcatcacacactcccctgtgtcttgcttctttcactcaaaattatgtttgtgggatatattcatgtggtacgtgcattttcagatcattctcactggtcgctagattgtgtgcatattttaaaaaatccattctactgttgatgggcatttgagtagtttccagtgtttggctgttatgaatagagctgctgtgatatccttagacttgtcttctggtgaacatatgcacacatatctgtgcattgataccacggagtggagctgcagggtcatagggtttgggtatattcagcattagtaaatagtgcagaacagtttcccaaagtggttgtttatcctttttcagagtgtctgttcaccagcacgtatgaattccagttccacatcaaagccaattattggcattgtgtggtttttaaattttagccaacccattacagaaagagcaaatgaaaggaatctaacagcaagtaatcaggagagaaaagaaaatgctccctgagaaagcattatgatttcatgatacgggaaatcccggtgtacaatgccacacattgtgtacttttgcaggcggagggcgaggtgcagccaccttcttgtgagcatcagggcagtccttgccattggtcagggaccaccacttgactgcagtaatacccaacagaccatgtcataattcttcctcaggtgacagagctttaatggatccgaccccaacagaacaaacttggcttcagacttgcctgtgggcctcagtaaatattcaacagactgtgtcccctgttcactcccctgtcattagctgaggctggtaccataaatcacagctccccttcctgttgtaagtggcccctctcagctgacggtactccagtcctgacattcaggagcagtgcctctcctgggctgcttcccagggctggcaggtcttggtggtcacttgtaggagccgaggagtgagtgtgtgcagtcctggagtcactgctgtggggtgacttgcaggagcctcttccatttgatgtgagaatgatagatccgtcaagctcttaatatgtgcccagcaacatgctaagtcctttatgttgtttattgcaacctgtcacagtccattcaggctggtataacaaaccaccttagactggtagcttgtaaacaacagaactttatttgtcatggttctggaggtggggaagtccaagattaaggctcagacatatttggtgtctggtgagggcctgtttcctggtttagcaatgatgccttcttgttgggtctttatatggtgaaaggatcaaataaggtattttatacctcttttataagggcactaagccctccagcctcatgaccgaatcacttttcaaaggcctccccttttgagatcatcaccttggcagttaagagttcaacgtatgaatttaggggtcgggggtgtaggtaacaaacattcaaaacatcatacaacctcacagtagttctatgaaatgagtagatgttgtttaccaccattttcagatgaggaaattaagggttaaaaacatttccccagagtaagaaacgtagtaaatttgggagtctaacttcaaactgtaatttttaattactgtacttccttcttcttttctcttaggggctgtttagatacttgagcttccttttgaagccatcttcctcttgggtctaaaagctttcaggtagatttaaatgggacaagaaggccagatgcagtggctaacacctctaatcccagctatttgggaggctgaggcaggagaatcacttgaacctgggaggtggaagttgcagtgagctgagatggcaccattgcactccagcctgggcaacagagcaagactctgtctcaaggaaaaaataaataaaataaataaataaataaatgggacaagaggaagtgacctgcagagcacatattgggttcagatgtaattatctgctttttcaatgattttaagaaattagaaccactgtttttctctggctcttttcatgacttttttcaaatgttggttttcagcagttcaactattatatacttaggtgtgatttaaaaaaatatatatcctgcatgggatttgctgatattcttatatctataaattaatgtctttcactgaatttagaacactttcatcccttcccacccccgatattgatcttgctccattctcttctctccttttgggactaaaattacatgtctgttaggctttttgatattgtcctacaggtctctgaggctctcttcaatttttcaaatttttttctgttattcagattaaataatttctattggcctctcctcaaattgtactgactcttggttcctcttcagtctgccgttaaatggatccaattgattgtttcagattttttttttaattgtagaatttccatttggctctttctttgctaagctttcttatctttttatttactaagaatacattttcctttgagtctttgagcatagttataatagctgcttaaaaaacccttgtctgctaattccagaaactgggtcatctcaggatcatggggacggtccccataactatcttttttcttaagaatggattacatttcctgtttttgttttctttttagttgtttgttatattgagctattataaattatatcacagacattgtgagtgatacttggtaaggactgattctgttttgttcctccaaagagtagtgcttttttgtttcagtaggtagttaattcagtaatctaagacttcaaattctgactccctagtattgggcagcaatataaattgctgtttagttcttttggctttaactgggctactccatacaaacttggctcaggagtcacttagtgacttagggaacatttgtacacagaatttgaactcccctttttggaaactctctttttaccaggatttcttctttcactttcacctattgtgttgccttgatctctgtcctgatgtttcagtgcagcaacaccatctgagtgttagccactcacatgttgcagaaccgggcctactctcagactaaaattgaccaaaagcaggaactcactggcttgctgaatgtccaggtcttgatcacactccagaatgtcctacttttggtcatcaggtgcctagattttttagaaatctttgttctaatttttagaaatatttgttcagagtttatagttgctatctaccagggaactgcttcaataggaactactcaaccattgccagaaccttcttgaactttctagaaacactgtcttatttattttattttattttttagacaaaatcttactctgtgctctgccacccaggctggggtgcagtggtgtaatcttggttcactgcaacctccacctcccgagttcaagtgattctcgttcctcagcctcccaggtagctgggattacaggcacctgccaccacacctggctaattgtttgtatttttagtagagacggggtttcaccacgttggccagtctggtctcaaactcctgacttcaggcgatccacccatctcagcctcccaaagtgctgggatttacaggcatgagccaccacgcttggcctagaaacactgtcttatttaaataagaaagagtgtctctcagaatggaaagaaaacagctttggagtcaaacccaacttggatgcagaatctcactctatcttgtttttttttttttttttttttttttttgagactgaatctcactctgtcacctaggctagagtgcagtggcatgatcttggctcactacaacctcggcctcctgggttcaagccattcttctgccttagcctcctgagtagctgtgattacaggtgtgtgccaccacgcctggctgattttttgtaattttagtagagacggggtttcaccgtgttagccaggatgatctcgatctcctgacctcgtgatccacccgcctcggcctcccaaagtgctgggattacaggcgtgagccaccgcactgggctggatatgttttttaagaagaaaacgtaccttactgtttccttcgtgatttcttcactagccgctgcaagtgtgtgtggctctgtgcattgtgggcagggtgaggcagctagcttgatttccattttgggaatgagtggtgcctcctcatggaagacttcttaaaacaggagatgggtgccctctgttattcttgtatggcaggcagaataacgtccccctaaatgtccacatccgaatccctagaacctgcgaatatgttgcatgtcaaaagggactttgcagatgctagtaaggctaaggaccctgaggtggacggatgattttggatcatctgggtgagcccaatataatcacatgcgtccttaggagtggaagagggaggcagagagttattcagagacagagatatggccacagaagcagagtcagagatgccttggtgttgtatttgaagatggaggaagaagccacagccaaggcctatgaagcagcctttagaagcttggaaaagcaaggaaacacattccctctcagccaccagaaagaaatgcagccctcccaacagcctgattttagctcagtgagacccatgtcagacttccagaaatgtaagatcataagtgtgtgctgttttattttttatttctttttctgttttaaaccactacgtttgtaaacatttctttggcagtaatcgttgcttttgatggaagttggagcagtggtcaagctcgtgggctttggagccagtctgccagtccgccttgtttcaaaccccttttcctttctctctttctttcttccttccttccttccttccttccttccttccttccttccttccttccttccttccttccctccttccttccctctctctctttctttctttcttctttttttttttgagatagagtctcattctgtggcccaggctggaatgcagtggtgtgatcttggctcactgcaacctccgtctccttggtttaagcgattctcattcctcggcctcccaaatagctggaattacaggcatgcaccaccacacccagctaatttttgtatttttagtagagacagggtttcaccatgttggccaggctggtcttgaattcctggcctcaagggatccaccagcctcggcatcacaaagtgctaggattacaggcgtgagccaccgcgcccagcctcaaacccttttcctgtgattttttttttttttttttaaagctgtgtgaccttgtggaagttgcttcacttctctgggcctcaaatttctcatctctaaagtcggttaacaataatctacaactcatagttttttgtgaggatgaaatgagggtttcatacatgcagaaagcctggaagtaagttttagctgtggccattctgggcaggaatccctcactaggtaacttagagcggcggatcagggcacagacttgggagacagactgtctagcttcagatttaggcttcttactagtctgaagtagaatggttgtttgttcctccactgcttcatctggaaaacaggggcaggcatcccagggtgtttgagagatcatatcagatggagaggccagagtttttagccgatacatcatagacattccccaaaggacagttattgttatcattgggtggatggggaatattgagcctccagccctaggcattgtggatcaatttgttcttcagttatctttggaataatttaaatacactggattgggaagacaaagctatcaccctcctgatgggagagtgctgggtacctagcaggtgctcagtagttagtgaatgaatgagtaagaacagaacaggtcctaggccctgccctgaagaggctcacagtgcaggacaaggcctggagtcaggccagggttttgtggttgtctttaaaaagaaacaaaacaaagaactacttcctaccagctgaccctaaacccctcagctccctgcagggacctctcagccctgcaggggagcccaggctatgtgccaggcctggccttgctgtcagctttctaagccagtcacaaacattctcctctcaactttataatggatgccccccagcctcctctcccctctcagggtgctcctgaggctatgagcagctggcagttccctgtctgagaggtccttcgtaccgcaggagaggcagctctcacctgaaggcctccctggacaccggtctcaactttgtgtgttaccagttatggagaattatttttagtgagttacactctgttagggccaaacacaaggaggaaagagtgactgaatactgctctgagtcagtgactgtgacaagactgtttttttcttcttccctgttgcaggcctgatcttttggccagaaggagattaaaaagatgcccctcaagatggctgtgcctgtcagctgcatggagcttcgttcaagtattttctgagcctgatggatttacagtgatcttcagtggtctggggaataacgctggtggaaccatgcactggaatgacacacgcccggcacatttcaggatactaaaagtggttttaagggaggctgtggctgaatgcctcatggattcttacagcttggatgtccatgggggacgaaggactgcagctggctgagagggttgagatctctgtttacttagatctctgccaacttcctttgggtctccctatggaatgtaagaccccgactcttcctggtgaagcatctgatgcacgttccatccggcgctcagctgggcttgaggtgaggctgtcctggctggtcacggagggttcactgggatgtggctggtgttctcaacgaggtggcatttaatgagcaccctctgtgtggttggcgtgatgctgggtgcctgggggagacagatggaactaaagaggtccttcctggaagccgttactgttccctgccctgacgtgtgttattgtacctgtcaccattttctgatgttcccagtttacgtatctgtcaccatctacctccctataaagtgcctctgctgttggttctgtgtccttaagacattgtgtggcatttggcacagtctctcatgctgcagaaagggtaaattaagacaggattgttaatgaatgaagacatgggagattcaatggaaagatatgcatggggggataatttcttggctctgtgctcagagctaggaacaacataaggccatatggctggtgctgtgagggttgtatgtgggcagatgcatgtggaggcagacaggcctgggtatgactctttaacacatacacactgcatgcctccaggcagactgatggattcctttccctgcagtgaagggttaagtattatcacacgtcacaggactggaattgaagatcgccaagtagacattgaaatgctgaccacatgacagacactcagcatgtggtgggtgatgttggctgggggtagcttttggggatggtggacatttcttggccctgatctttctgagcagagccagggaggcagtgctggactctgacctgggcacagctggttggcgtggacagttgattaaaggtcacagtttccctgcagcccatgggaaggcagagtgacaagtcagtggcagatgaggaaatggagtctcatgccagctggagggagggagcagctgggttggccacaaaggcctgttgcagttctgcagctgacaagtggaaggactggcctctcaggtccaggcctggtggcctgggaggctgctagctctgagcgatgagtggtgccaaggtgcctgaaggagagttgcagctcaaacagcaagtggtccagctctcagaccacttgaggccacctggcatgtggcggccaagaccacagttggggcggggccttgagtctgattttgattggattcctagttcggctcatgcctgacagcactttctcagacaggcttccctgacctcctaaggtaaataatgtccctctgggtgttacatgctgttctcacccatagctcttagatgtgttctaattgtatattcatatgtgcaatttactgggtttcctgtctttctctcacactagaaagtaatctttctgagttgaggaaatgcatttgccttgcacacaggctagacacatacatagtaggcattttatttgttgcatcacagttgccttgatcaaatatggtgactctccgtggttttctcttggtttctttgaaaaggtcagacagaagggaaacactcttttcttgagtatatatatgacttagcccagcaatcccactaggagagcaatggtttatccattatacagttgagcgcctggaggctctgaggggccatgtaccttccccaaggttatttatccaggagaagacagagccagaagctgagaactgcctcgtgttttataccaaacaaggccccttcagctgaagacttttccttgcggtcttgggaagggtgtgtgtgacggtgagctgcagcaggtgctgggctgtgcttgactgtggtcacgtaggggcaggcagaggagccatttcggggggctgctgagggtctggagagaggctcacagtggtgagcaaagaggttctgggatgggaggggatcagttgggaaagacagaggcagatactccccactcctttgtgccttcccagtcctctctcaccccttcctgccctctccccacaccctatcgtggtggcagctgtgcctcacttatcacatggtccatagctctgttttttccccttttatcagttactgcctagaacaacccaattgtggtggtctgggttatctcccactcttcacagtagggccagagtgggctcagacaccaaaggacacagaatggttatggcaatgaataagattccttctctgtgtcagcaaggatgctgatgtagtaataatctccatttattaagccatgctgtctacagggcacatagcacatgtttttccattcaaacctcaaaacagagctatgagatgcgcaccattatgatgattatctgttttactgttttttgttttgttttgtttttgttgttttttttgagactgagtcttactctatcatccaggctggagtgcagtggcgcaatctcggctcactgcaacctccacctccttggttcaagtgattcttgtgcgtcagcctcccaagtagctgggactacaggcgtgcgccaccatgcctggctaatttttgttggccaggctggtcttgaactcctgacttcaagtgatctgcctgcctcggcctcctaaagagctgcgattacaagcgtgacccaccttgcccggtctgttttactgttgaagtaactggagcacccagagggaaatcaagtgtccctagagaatacaagcagcatttggacagccctgtctgactccaaagccactgcacaacattgcctggagctgagagatgcacattctcccttcttggccactggtgactgtgaccttgggcaaactacctctgctttttgggccttagtacattcattcatagagaagctggctaatttctcttctcagcctggagacttgagagtgaaaggggcactgtatcacttactctgggatgacaggtgtatacgaggatgtagctgggcaagccaggcctagtggctcgcacactcatcagttagatggtgggtgctggtgctgctggtgcatcatgcatacaaggctggctctcccagttttccctggacttttgcctgaacagtttgcatttctactcgtggtgcaggagcttgctgttctgatttcatgtcacaagcctgctttcagccacttagaagagccctgttatccctgactgccgctacagcagtcccaacctgtgttgttttcacttgatgggctcctggaattattgacagcacactctctagtcgtacgggctgccctgccacctacactgacatcctggccaggttcctggagatggcctggcatcttggacctgttccccacggggtgcctggagcctctgatggtctacccagggtggcaatgagggaaaggctgtgacttgatcatctccaggggttcttcggtgaacagcccaaggttgcttaacagctggtgtgtatgaatacctggaatgtgccagttcaccttctaatctggcaaggagaatgtgtctcctccttatgcatatgaacaaactgaggttcagtgagatccagaaagctgccacggttactgatggagagagcagagaagctggtgtttgcagtcccatctgtcagccttgacacccctactcctgtccagccagtgttttccaaagcgtgctgatgagcaatgcaagatgatttcatgttatagataagaataaaaaaattgttttgtgtttaactcaaattagaaaaaggcaacaattggtatgtgcgacctgtggttttgcagatgatactgcttaggatgttggtacttaagaaaaggtcaacttttcaaaaatactattagtgacatgtggacctagtcctcctgaagaggactacattggggcaccggtaattgtttctatttgcggtactctggctgtgtggctctggccacgccactggaggcagtgtctgagcctgtgacttgagtagtagctctgtgtcatgtctgctgattctccccaaatcctgaagattcatgatgaagtgactggccggcttggtctgaagctagattgaaaacaataaggatcccagaacgatagcactttacaatcctataatttggctcaaattgcctgcagttactatctcagccctgcctgttatgttcattgagcacccaaagtttttcagtcaattcctgagttaattattctctgggattgaattatgaaatagtaaatatttccactatgcaatcaattggtgacttattcatgtattcatttcattcatttagtctcaataaattgaagataagggctgagcacagtggctcacacatgtaatcccagcactttgggaggccgaggtgggcagatcacctgaggtcaggagttcaagaccagcctaaccaacatagcgaaaccccatcactactaaaaatagaaaaattagctgggtgtggtggcatgcgcctgtaatcccagctactcaggaggctgaggcaggagaatcatttgaatctgggaggcggaggttgcagtgagccgagattgcaccactgcactccagcctgcgtgacaaactgagactccatctcccaaataaataaataaataaataaaagataatattacctaccccatgagtttattatgagaattaaataagagaacatattaaaaggtttcattcagtgccaggcatataatatgtactcagggaatactagttttttttaaataaaattttaaaatgggattagaaggtcaaagcatataggcataaaggtataaaaaatattgaagatgagtgagttactaaaatttaacattacgtttagctctgagcttcctaattagcacaacatgctaagtaggttatatttgtatctaaagtaaagattggcaaactttttatatcaagggttaggtgacaaatgttttcagctttgcaggccacacagctctgtactgcttgtcagttctgcctttgtatctggaaagtagccatagataatatgtaaatgagtgggtgtggctgtgtgccaataaaactttatttacaagaactggcaataggcctttaggctgtagtttgtccttggcctaaataaaggaaacatgtttgtctttcaaaggcagaaactcctcctggatcataaacattgaaaaaaaaattgttacaagatgcaatatttctgtgagacttgttaagcagtatatgcgcagtgctttcattaggattttacagaaaacttagaagatggccttcacatggctagtttccttactgttcattcagcagacatttactgagggcttactatgtcctaggctctgatatccatacatggtaaaacgtaaaggcatgtgcattttggcagggggtgctgcattgacaaggagtggtctcggtgacagttttgggaagtcagtttagaacagtattggacacactgttccatccctgaattacacacaggcctcaatgctaacttgagtgggcttttggtccagcaggcctgggctccaggggcagtcactcagcgtcctgcctcaagagtggttgtgtcatgaaatcttggccctctttgactgatagctacaattatttgaagagtgtggtttttagaacaaaactaaatctgttttgaagctctgctgttttatacctgctgtgtgatcttgctcaagtttttatttttatttttttctgtataagggattttattttatttttattatgtatgtatttattttattttaagttctggggtacatgtgcaggatgtgcaggtttgttacatggtagacgtgtgccatgtgatttgctgcatctatcaccccatcacctagatattaagcccagcatgcattagctatttttcctgatgcctttcctccccccccccgcccccgacccacaggccccaatgtgctcaagtgttttaatctctctgagcctcactttcttcatctgcaaaccataacacctctgaatctatttgttactctaatgctagctatctagtgtttgctctctaaatgttagttcctccacctgggggctgggcgggcggtggctgacctcaccccatgaagctgtctcctggctttcccagctagagcctgtgggtatgaagattgcagccccctcctcctgggggagtattcagtgtaacaagccttgagaaaacactggcctgtggaattccaaagttaatgaagggaacagattccaagagggtctctgtttgaccttccactctttccccaaccccgttacccctgagcgagtttgggggcaagcataggtttgtaggcactgcaaagaagaactctcacgctgtggtgcaggaccgtggccttggcctctggatatctgggccaggtgggtgcatttgggcctcttccctacagcgcctggtcagactgcaagagacataggaagcagccagggcaggctatcttaagaggagggagcatatttgataaagttagaaaatgattctcagctgtccataggaagagcagagtaaggggctatgtgagaagtttggaagatggcccagttccaaaaatgaagaaagaaagtaagaaagaaagagagaaagagagaaagaaaggaaggaaggaaggaaggaaggaaagaaagaggaaagaaagaaagaggaaagaaagaaggaaagaaagaaggaaggaaagaaagaaagaagagagggagaggaaggaaggaagaaaggaaagaaagaaagaaagacagacaaagaaagaaagacaggaaggaaggaagaaaggaaagaaagaaagaaaaaggaaggaaggaaagaaggaaggaggggaagaaggaagaaagaaggaaagaaagattcattattctgtcctctgaacctgagtgaagaaaaataccctgtcctttgtacctgcgtgaagagagaaaagaaaagaaaagaaaagaaagaaagaaagaaagaaaagaaagacaggaaggaagaaaggaaagaaagaaagaaagaaagaaagaaagaaaaaaagacagacaggaaggaagaaaggaaagaaagaaagaaaagggaaggaaggaaggaaagaaggaaggaaggaagaaagaaggaaagaaagaagattcattattctgtcctctgaacctgagtgaagaaatatactctgtcctttgtacctgcgtgaagaaagaaaagaaaagaaagaaaagggaaggaaggaaggaaagaaggaaggaaggaagaaagaaggaaagaaagaagattcattattctgtcctctgaacctgagtgaagaaatatactctgtcctttgtacctgcgtgaagaaagaagagaaaagaaagaaaagaaagaaagaaagaaagaaacgaaggaaggaagaaagaaagagtgtaaagaaataaaaggctgtaaagaaataaaataatgtaaagaaagaaaataatgtaaagaaagaaaagaaaggaaagaaagattcattactatcctttggacctgagtggtgttttcagttaaaatgagtggagtagaacccagagatcaggcttttgaggacggtaaagcctcaagatacattctgtttctggctcagggaaccttcagggaaaaggctttggagaccaagctaggcagggaagcgcctttgcttatcatgctggagaccagactgaggcagtgaagtcaccataattgatgggccacactagactggagccaaccatggcccattgctgagactctgggcctcagggtggccttggctggaacctgtattccagtggccctggtggctctcttccctctcaccttcccaggaggcagattatttccctgtggtgggggtgaggcggtggcgtgggggcttcttccctctctctctgtcttgtagccttgttaaaatagtggccacacgctgatagctggatttccagtgcagttgctggggatgggggtctttccctctcatctgtctgtcaccctttatcactccacaaggggtgggggtactggacagaaagagtgtgtcccacctgattactgggaagtgcaatggacacccccaccccccgttgacttatctggctccaaccgaagaacagctgttggtggtcaggtctctgagtcactcagtagcttgggactgggttcagtgggagatgatggcataaacaaataaacactggctggcccccagctctcagctttctgctcactggggggccccagaagcttcctgttgcgtctgcagggaaaataaggatacccataatgaaaatagttttcctgatggagaaatgctctggggaggttgttgaggcatgttagaaaatccctgaggctttctggctctgtgagctaagggaggacacttggcctctctgggctttcgcttgctcctttgggaagcctgttattgtgaaagtgagatgatctgggaggtaaaactggccagttgtccatctcccctctctgaacatgatgcatagtaagccctgaatctcatttaaatttggaagtcagactgactttgtgactgtcctagtttccggctgttgagtcagctcaggcagttcttgggacttctgtgagtctctggctccccgtctctcaatggggtgacagtcctcgtcttgtgcccctcacgcgcttgttgagatgacagatgagtcacctctgggaaactgcctgagagctggatgacaccactctgtgggattgcatttcatccacagagacatctggaaaaggaggcagagcagagcctgacttttgattatttggggagggagcctggagctggtggaagtgagggcatagagcacattcctttcaggccaggcagtgcttggctgctgaggcaccggtggagacctcatgatctggtggtccgcctccctcttgtgctgtgtgtgcctggagctctctggcttccttggctttccactgtctttcccaaagcctccatgtattctagaatctgctatggagtttcagggggatctctgtatagtgtgaatatctagctctgaaacacaaaagagaaagctacaaagggcaacgtaacaaaagccgtattcccacccaaggattagcacatgctcatgaggtggcatgctttgctttggatcattgtctttattttattttattttgtttatttatttatttattatttattttttgagatgcagtctcgctctgttgcccaggctggaatgcagtggtgcaatctcagctcactgcagcctctgcctcccaggttcaagcgattctcctgcctcagcctcctgagtagctgggactgcaggcgcgtaccaccacacctggctaattttttatatatttagtagagatggggtttcactgtgttagccaggatggtcttgatcttctgacctcatgatccccccacctcggcctcccaaagtgctgggattacaggcatgagccaccacacccagcctggatcattgtctttaaagaaatttaaaaaaaaaaatagataaatgggaagtctatgagccttgtctcccattccccatccttctcttcatacaagtacctctcctgaacttggggtataacaggtcatgctcttacaatttcattacaaatctatttgaagatcactggtagcaccattttgtgtgtttttaaattcttaggtaggtgacataacgtataagatgtctgcactttcctcttttctcccggcgctatgctgggcagatgatgctactatgcttgttcattcattccctgggccacagagtcttgggttgtttccagaattttgcttttgtaaacaatgctgtcatgagcatcctagcacagggctgcaggtgcatgtctgggtgtgtcccaggagtacagggcacagagcatgcacatttgcagcctgactggaggttgccacatcactctccagttggcactatttcctaggttccttccctgagagcctgggaacttctggaaggcaggagtgggtggtgttcaccactatatacctctgccagtcagcatgccccacaccatgtaccagctcatgacacgcctgaatggggtgaattctggaaggggacaaggcaagtgccagggcaggtccagagtctgggtgtggaaggagcaacataatgggggccccttgcagaagcagcagaaagaacaaagaaataggggcctggagtgggggtgtgaatgaagacattgctgttgagaagatacttgtgaagaagccaacagcgttgtctgggcctggctggatatcatgaggctggacatggaggtcccaggcaccattgctgtgggcttttggggagttggatgcacagtggagagctgaggaggaagttgggcttgctgcagagggctgctggaggggctggctggagtctggctctggccctcactcactgagggttatccaagtgacccattgcaggaagaggggtgggggacccagagttactgtaaccactttatgagtctgtctcagccaggatctggggcttctagcaaagcccacagcacaggcacattttaggaaaggcaagattgagatgccctcggtggcccagaaggacacttcagggcagcagggctgtaaaggtcaggagggggaaacttctggaaggaagttgaatgttgtgggaaaaagctgacataaatgaacaaggaatgatttttttcttttcttttttttatttttctttttagagagacagtcttgatatgttgcctaggctggtctcaaacttttgaacttgagtgatcctcccaccttggcctcccaaagtgctggaattataggcatgaaccaccattgtacagccacaagggaagattaaacatagacagtttgagaagagtttttttttttttaaatttctaattttatatttaatagagatggagtctcactatgttgctcaggctagtcttaaagtcctgagctcaagcgatcctcctgccttgttctcccaaagtgctgggattacaggcttgagccactgcacctggccaagggtacttttttttttttttaagaaaaatatcgttagaaatagaaaatttggatttggtaatggatagtgcatactatgaaataacctttttacttcttcaacacttcccatgataataacactaatacaagatctttggtgaaaacttagaatgcgtagaaatgtgttggtggttgaaagagagccccataaccctccactgaggagtaacctctgtttgaccttagaaataatacctgtgaacagaatggccaacttgtcctggtttgccagagactttcctggttttggcacggaaagtccaacactctgggaacctcctcagtcctgtgcaaactgggatggtcgttcaccctacctgtgaattgaatgataccactgagcatcaagcactttgacagttcacaagtcatttctagtgctgtcattgtgtatacttggttccggctgtgtgcaaggcattgtgcgaggctgcatgttctggagctacaccagagctccagagctgaagttctattttctttttttttttttttcactttttattttagaatcaagagatgcatatgcaggtttgttacagaggtatatgggatgcggttgaagtttggagtatgattgaactcatcacgcaggtactgagcatagtatccagtagtttttcaatccttgtccccctcttttcctcccctttctagtagccctcagcatctattgttcccatctttatgcccatgtgtacccaatgtttagttcccacttataagtgagaacatgcggtattttgttttctgtttcagcattagtttgcttatgataatggcctccagctgcatccatgttgctgcagagagcgtgattccattcttttatatggttgcatagtatttcttggtgtatatgtgccacattttctttatccagtccaccactgacgggcatttatgttgattccatgtctttgctattgtgaatagtgctgccatgaacacatgggtgcgtgtgtacttttggtagaacaatttattttcctttgagtatacacccaggtatgagattggtgggttaaatggtagttcaacttggagttttctgagaaatctctaaactgctcctcacagtggctggactaatttacattcccaccaacagtgtgtcagtgtctccttttctacacaggcccaccaacatctgttattttttgactttttaatgaaaaccattctgattggcatgaaatgtatctcattgtggttttgatttgaatttttccaatgactagtgatgttgtgcattttttcatgtttggtggctgcatgaatgtcttcttttgagcagtgtccgtccttgtgctttgcccactttttaatgggattatttgcttctttgctttttgatttaagttccttatcgattctggatattggaactttgtcaaatgcatactttgtgaatattttctcccattctgtagcttgtctgtgtactcccttgatagtttcttttgctctgcagaaactctttagtttaattaggccccaattgtcaatttttgtttttgttgcagttgtttttgaggacttagccataaattcctgtcaaggcctatattgagaggggtatttcctcggttttcttctaggatttttatagtttgaagtcttaagtctttaatccatgttgagttattttttgtgtggtgataaatagggattctgtttcattttcttctgcatatggatagccatttatcccagcaccatttattgaataggaagtcttttccccattgcctctttttgtcaagtttgttgaagatcagatggttgtagataagtggctttatttctggattctctattctgttccgttggtctgtgtatttgtttttgcaccagtaccatgctgtttgggttactgtagccttgtagtataatttgaagtcaggtaatgtgaggtctctagctttgttcttatttcttagaattgctttggtcattcaggctcttttttggttccatgtgaattttagaatagttttttctacttctgtgaaaaatgatgttgatagtttgaaagaaataacattgaatctataaattgctttggacagtatggccattttaatgattttgattcttccaatcaatgagcatgaaatgtttttccatttatttgtgtcatgtctgatttctttcaacaatgttttgtagtccttgtagagatctttcacctccttggttagaaagtattactagatattttatttatgtgtgtatgaagccctgttttctatccttaaggagcttacaacttgtctttggtatgcagtaggggcatttcacttgtgagagtgggggtcttactgtagcctgggcaataccctcttttattattgggtactaaggatttaaggatatttttgttctggtgggttatccagttttgcaggttggtaccaatgctgaatttgactgcccctggccctgctgtgcagcactttcagacccctaaatgatgtgacccattctggggccagctcagtgttttacagtgatgaagatgatgttgatgatgatgatgatgatgtcaacatccatcattctgaggtgtgtgtctatctctggcctcgttatacctgcagaacattcatgtggtagccaatacctgggaaaataatcccacttgccaggcagcaaaccgtggccctccgttagggggatggcatctcacactcatgaagtgttgagtgtatgggtccctggccagctttggcaactgtgaggcaggcattatgcttccattttaccactgacagactgaggccggtgatggggagcacctgggcctgttggcttgtctgtggtaggccaggctggctacataatatgtggggctcagtgcaaaatgaaatatgggctctcttgtgtaaaaattaggaagaatttctagatgctgacagcagagctttaaaccaagctcgggcccctctgagccaggagccctgtgtgcctgcacaggctgtatgtccaaggagctggtcctagggcaggactaaggttcaggcttcgtattgacttccatgaccaagcatcctgggtccaggctgtgttttgtgtgtctgcagagctctggtctatctgctgataagtccctgtggtgctcaaaggtacctggcttccttggagaaaagtttctctctcccctgcccttccccagcctcaaaatacacaaatgctcagatgaatacttaagaatccaactggaccagcttctgtctgtgacttgatgacttaatgtgattttgggggatgcaacattgggggtgatgctttagcatgccttctctctcccactcaggaacatgggcaaatgccatgggctgggagctctcacctgctcttttgtgctgagcttcactatctcttctgggcacagattggttacagggatatagaccacctgtgtggtgccctgggggttatgtccacggggagcctcacatgaagaagagaatttcctttgggatgtgtatttcttgtggtcttagcatgctggcaattcttatttttggcatcatttaatccttacaacaactttgtaaggttttcacatccattggtcatttctgagttgagcacctcaactcaggtgaatgtgtttgtatgaatgtttgttgagcacctactatgtgcagggcagtgtagtaaaaaattgaggacctgtgggtttttttttgagtatatataattgtgttcttctgtcattttacatgactttcacctcatttcattgctgtagcaacactgtgaggttgttgctgtcacccccatttctcaggcgaggaaatagaggttgagtcaatctcccatcttggatttacctgacatcacagtctgagtcttttgtggcatgtgcaagagtgcactggctttcggggcctgagctggctggcctggattgaatcctggctttgccatttgcagctgtggtctgaggcaagttatttaacttctcttgacctcggtttccccatctgtaaaatggggctatactagttgctctgtgtaggaagggtctgaggtttcagtaagatacattttgcacaaaccccacacacaccaagtatccatgaagcctggttatccttataacctcagagcggtttggagagggttaggaacttgcagatggtcacataatcggtgtatggcagatcttgggcagagctggactggtcttcctaatgagagctcctttccccactctgctttcatggacagaccctaatgaccacctgggttatgtttttgtccctgtcaattcctttgtccttgctgataacctaagggaaccttgagagccagaacgagacaggaagaaaatgcctggctgctgcttgcggggttaattaaaccattcctggggtttcatttgctctctagttagcaccaaaataaatcctccaaatggctttgagccttccagttgacattgcattttgaattctgacagcaccagcattttacatcttcctgaggatgataaatgtttagatagcaccgaagataatggtaaaaggagaaactgggggtagttcaggctgtggctgagcagattgtaactctttggtgtgacgaatgggtgagaagttgcttaaaggacacatctgatgtcccctgctcctaggggttgagagggggatggggggtggactctgttttgccatccggagaatccattgccttcccgatgcttctggggtctcatgcttgagtcttgtttccatgcgttctgtcagatgttaaggtcttgtgcataatggttgaggtgtcaatgtgcaggcgttaatgtcaccattcttatgtaattgttaccctttattgagtgcctactatgtgccaggatttaaatatttctctcagcaacccaaagatgtaaatgtcatatcaccttcattttacagatgtgaaaacaggctcggagaggctgagacacccagccattaaggactcagctgggattcccagccttccctggcactctctcttttttttttttttttttctgttttgagacagagtcttgctctgtcagccaggctggagtgcagtggcacaatatcagctcacttcaacctccctctcccgggctcaagcaattctcctgtctcagcctcccgagtagctggatttgcaggcatgtgccaccgcacccggctaatttttatttttaattttttttggtagagacggggtttcaccatgttggccaggctagtcttgaactcctgacctcaggtaatctgccagcctcggcctcccaaagtgctgggattacaggtgtgagccaccatgcccggccttccctggcactcttgagcatgtttccagaccgcctgcttcctaccccagacatgtcaaaatgcggtgctgtaaatgacagggctctggtcccagatggacagcccgggccctttgaagacactctggccttcaggagtctggatctttatgcctgatggaactgacacgggcctgctatgtttacagtgcctgttctcctgcagggtctccggaagtcatcagccgtgctggccagcactccggaggatgacaggaaattctgctgcagctctgtgggctggctggggtgcatgctggacagggagcgggcggacagggctggtagggaggaaaacaccactgaaatagttcagaccgtattgtcagtgaattcctggattagtatgcagtgctgccaatgatcagatttgggtcaggaagcccagatggcagaaagattgtgttaaatctttatatttttccacgaaatcctcaccgtttcagaccctgttttctaagctatcaccctaataattgtggattttggatttccaaggcacgttttatagtggttgtaaggaggggatggttgggttggggattgggatgggaggggggtagctgaagaaataagaaagtgctgcagaaaggagcacattccacacccagcttcttcctgattgtgtttccctccaagcagcgaacaagaggctgattcaagtggctcagtggcctccctgcctggagttgggttcctatgccttccagtgactaaggaggaaattccatttcagttaatctgtggccgcgcatcacccatggcattctctatcttaattttatggctgcctcatctttttggaattcgccttctttttgtgtgttgggtgataagtcaaggagacatatggcacagctccacaaaatacaaccacattttagtattccgtacacagtcctttctgggcatcccaggctttgtattttcacgttggtcggccgtgaggagggtggatcttcattatctgtgcatgcatgtgcatcccttcatcccttcctcttcagtttcttttctttttttttcttttttctttctttctttttttttttgagatggaatcttgctctgtcacccaggctggagtacagtggcgtgatattgactcgctgcaacctccgcctcctgggttcaagcgattctcctgcctcagcctcctgagtagctgggattacagggttgtgccaccacgcccggctaatttttgtatttttagtaaagacggggtttcaccatattgaccaggctggtctcaaactcctgaccttgtgatccgcccacctcagcctcccaaagtgttgggattacaggcgtgagccaccacatccagcctcctgttcagtttcttaacccttgatgggactcccggctaaacacccccattgtctgggaccttgagattagatgcagtagcactgctggtttcatggtggactttgagtcggatggaggaactccttggagtgcgggaggaagggctgcggaaggtgtctgaactatcgtagcagtagggtccctgccacagggaggtgaggcagccatcatcaccagtcctaagaggtacggtcaccctccgcctctgtctccctctccagtccccatccaatttcagctttgaacccagctgccgggtcttcaaagcctgttctgacttacccagcagagttggttgctctgtcctcttagcttatagacgctgcccgttttttccccacgtggcccctgccatttaggtccatgtctctcgtgatcctgtgtgtatttccagtggaaggacaaggtttggcccactgtatatttgaaggccctcaatatggcgttagttcgtatttactgatggatgaagaactctgaggagatctggttgaaagagacttttaaaaattaaagggaaatgggtcacgcaggccgcgtttttgtccttgcctattggctacttttgctattcagatcatctgtgaatgtaagtgactgtctgctgtgttcgcagtgtggttactgggaaaacagagctctctctccccaaatcaggtgaaactacaggaaaacagtaggcaagagtcttcaaagtgatgcatctcgagagagagagggcctgggtctgaatcatggctttgtgccttaccagcctgtgattctagtcactttaccttctgagccttgtttttcccagctgcaaaatgagtgtgataatagcgcttgcttcaggggattgtttcaaggatcagttgaaatagtgcacaccgaatgtttggcatatgtgcggagctctttgggggtgactcatgggcaactgtttttcatttaagaactgagtggattggacctttaagaactgctttggtcccactgtcatgggaggttagtgctgtctggagcaggcatggggatgtggtggtacagggtagggtgtaggggtccccagaattgggggcctccgtgttggaaagggacagtgggcagagtccatgcaggcgctctggggctgacagggacctgggacttctttctgagaggcagtgaccagccaactggagtggagggttgtggggaaaatgtttggccaaaggatttaggaaccagagagaagcaggcacatgatgctccttttcttggtggggtgttcatcaggcctgtagctgccacagtcatcactgtggctgagattcatacctgtagcaccagagtgggaggcaatttttccaacatggggcagaggctgggtgtgtggggattggttgcaaggtgctgggagtggggtgcagggaagggcctctgcacaccacgtccgtcctcatcctgctatgaggtcagctctgtacatgtgctggaagagcaattagcggggtgcctaagcagtgtccatcatggacgtgggtctctgctggccacgcaaggggaagatgggactggtgggaagattggggagatggaagcgggggcagttgtgtgcgaaaggtacagggtcgtggaaacatgcacaagaaagtgacattttagaaggtggtttttgttccataataaatttattagctttggaatctgactctattgccttggcttctccaaactttggtgtcctcatctgcaaactggggatcacaatctcagttttgcagggaatgtgaaatcctgacctgaaatgatcacatgtgtaggaagctgacaaagaatgctaattttcttccttcttttctttatggcctttccttggtaaatctctgtgtgattgataactcatgaagaacctaccagtcaaatcagttaaattaaatgacttcctaatgataataattagattagtaactaataatcatagctgacatttatctagtgcttattaacttctgggcagtgcgaatttggtctcatctgttaaataatttaattcctgtaataatcctaggaggatggtgctataattagccccattttacaaacaagaaaactggaggatcagagaggctaagtataatgtctaatgtcacactgctgaaagtggcttgctggtgttccagccccaacagtctggctccagagtttgtgctattaaccattatatcagtctgctgtgtgtgtgtgtgtttgtgtgtgtgtgtgtgtgtgagagagagagagagagagattgtgcattgtacggtgaagagcaatagaaatcattataaggcattcctgtgctacagtcttggtgggtcaggcttacttatagaagctgtgagaaggatggggctatgggctttaactcagttctgacaatctgtcactcccagaacctgaggcaggctggacctatagacttccacctcctcttcctcctgccctgaaccgtccagggactcagaggaggtcagacaggtgggactcccagaatagtgacctcctctgccacttgcagcctatgtcgggctcctcttatagagccacccccttgcttatgctgtagtgttcctttgttctggccatagttttcctgggcctgtgtcagttgagtgcgtccagatgcagctgggttgagactcaaagccctgaagataccgcaaggggagtgctcctgtgtgcagttgctctgacctgcacagcaggtcggagtggccgccggtccccggctgccagctgtttacctggccggccttgcaaaggctcttcagggccaggccccagccggtgaatcactgaaactgatccccgtggccactgtgaagtacgggactggaggtctccggaggagatggcagctctaataaaaacaggctgccaaaccgcagaaactgtataagcctctgtttctcatcctcgctaccacccctgcgtagtccctgttttacagttgaggaaaccgtggcccagggaaggtcgggaacttgtccaaaggcacagtcatagaactagggcttacaccagctgtgtctaatagcatgcgtgccccctctgctgtgcttttatttgcttcttggagtgctgtttagagaaattgatggttcttttgttgtgactaggggtccgcactatgggtgacctccctgctccctttggcctcaggcccttatcttaggcgatggccaaaagaacagctttacattcagtaaactgttttaactgaacctcaccacaggtttacgggtggtgctcgtttcataatggataaagaatgggtgtggctcagtgtggggaagttggtggatggggagagggcagcagagtaaccagcttttagtggagacctggatttgagtgccctgagttaggtgagcctttgtacctgtttcttcacttcttggagcagaacattagtttctccagatcccacatgtgataaagttctgtgatcctgcagtttgaacatcctggcattcagctcagcccactgtgcagaaatctatactaaacatgtagacagtttaggaagagggattgtttattgtgttgaatgttatagaataatagctacttaaattttggagcacttgccattcatcttccaagtgatttctacgtgttgactcatgtaacacaggcaaccaccctataataagtactatgtttacacacccactctacagatgaggaaactgaggctcagaggaattaagtaatctgccaaagatcccttggcaagtaagtggctaaggggggattggaacccagggagagagcataatcctaggaggagattctgccaaggtacagccctccacgatggaagggcagcagcctcctgtgagctgactcacttgagttattccacaccatcccagtggagaagttggattatccctattgtgatagaggaagaaaggtgaaggaatttgccagaaattataaatggtgacattcgcattgaacacatgtccactgaccccaaatactgggtcattttatatctttccctcccttcttttttttttttttagactagtctcactctgtcacccaggctggagtgccatggcacgatcttggctcactgcaacctccacctcccgggttcaagcaattcttctgcctcagccttccaagtagctgggattacagacacctgccaccaggccagacgaattttttggatttttagtagaaatggggtttcaccatgttggccaggctggtcttgaactcctgacctcaggtaatccacctgccttcacctcccaaagtgttgggattacaggcgtgagccacgcccacccacccccttcacaccccaccttgtttttttctttttagtagagatggggttttaccgtgttggccaggctggtcttgaactcctgatctcaagtgatccgcttgcctcggcctcccaaagtgctgggattactggtgtgagccaccacgcttggcctcttccctcccttcttgctaactttgaagctcagctccttgtccaagagcctttctgtccaggtgttttcatggtgcctgtgccttctgctggtttggagtgagcggtttccacagcatcctcccatcagccatgcattcctcagggtcaggcgcaacatgctcttcatatctgctccctggcacttggccttcaaaccaggaattcactgcacctagcctgatccattgacctgggcccagtataggccctcccatgttgggaggccatggggtgttaaggttaatgctgggccacacatgactgtgatgagtccctttctctctgctgaagaacgtgtttccatgggggacaggggcagttaagcctgggttctgttgggcgctgctgcttgggtgggtccagtctgccccatgtggggtctgcattctatgccaagtgttggcaggttctgccaggtagagctcttcagtatggaagcacttccctgtgctcagcctctccccgactgtgcacatttccttctcttctgctggggaaatggaaaacagctgaccactgattccttgaaatcacctactcagacactccagggtctgtgtgggattaagtcgtccgcagtctttccctcccttaatctcttctaaccttcctcgaaagtgccgtttcccaccccattttaatcatgccctttgctctcgcctggacatctccaggggctccagtgcctctctaagtgaagggtttggggccacacacatggctgtctgttctctccaggcccacatgcagaatccagcagccccctggcctcacacctgcttttcagtagtggctgggactgccagatgaataggcttgaggcagcatacgagtttgctatacacttgctcaaaacattagtggactcaaaaccaaaaagacaacccagtttcagaatgggcagaagacttgaacacacatttctccagagaagttatataaatggccaataaacacatgaaaagatgctcagtagccatggttgttagggagatgcaaattaaaaccatgagataccccttcatacctactaggatggctgtaattaaacaccaccaccaccaacagcaaaaaaaaaaaaaaaaaaaaaaaaaaaaaaaaaaaaaaaaggcagaaaatagcaagtgttggtgaggatgtagagaaattggaacccttgtacattgctggtaggaatgtaagatgatacagtctctgtggaagacagtttggtggttcctcaaaaagtcaagtatagaattacatatgacccagcaattccactcctaggtgtatatccaagagagttgaaggcgtatgtccacaaaaagcttttacaggcatgtgcactactcacaacagccagaaggtgggaacaacccagatgtccaatgtctgtccgcggaagaatagcaaacagtattcaactgtaaaatggaatgagacattgatacatgttacaacatggatgaacctcaaaaatgctgttctaggtgacagaagctaggcacaaaaagtcacatattgtctgattccatttttatgaattttcaagaataagcaaaattatatagacagaaagcagattaatggttgctgggggccatggggagtagctgcttaatgggtacaaagttgttgttggtttttttttttttttttttgagaccgagtttccctcttgtttcccaggctggagtgctggagtgcagtggtgcaatctcagctcactgcaacctccacctcctgtgttcaagtgattctcctgcctcagcctcctgagcggttagggttacagtcatgtgccatcacacccggctaattttgtatttttggtagagatggggtttcaccatgttggccaggctggtctcaaactcctgacttcaggtgatccacccacctcggcctcccaaagtgttgggattacaggtgtgagccaccacacctggccaatgagtacaaagttttatttgagggtgatgaaaatgttttggaaccagatagacatggtgattataccacattgtgaatgtactagacaaacgtcactgattttgtacactttaaaatggttaatattactttatgcagattttacctccattaaaacagttatgacatcacagatcccatcaggttaaaagaggacatgtgggccaggctcagtggctcacacctgtaatcccagcactttgggaggccgaggcgggcggcagatcacctgaagtcgggagtttgagaccagcctgaccaacatggagaaatcctttccctactaaaaatacgaaattagccaggcgtggtggcacgtgcctgtaatcccagctacttgggaggctgaggcaggagaattgcttgaatctgggaggcagaggttgtggtgagccgagattgcatcattgcatttcagcctgggcaacaagagcgaaactccatctcaaaaaaaaaaaaaaaaaaaaaaagaggatatgtggacactatgtctggcacttaaactggtggattctatagagatgggatgggttcattagccccattctacagatgagaaagtagaggctccattagagcacacagtgtagaagtggaaccaggattggtctgactctagaatgctgcttttgatcacttttctatgttcctcttcctctacagtggacaggttttgttttgtttcgctttgcttcagattcttggctcatgccaagtgctgtgtgccatgggtacatcacctgaccctgaagagcccagatctatgtcttttcatgcaaccttgccctgtgctttccacatattcacatccttcacagtcaatcccaccctggccactaggccaatagggactccccacatcccacttacaggggggcaaatatttatagccaaaagaaaacagaagatgtgggtttgagtcacagttccactatgtggtcatggatgagtgccttcaaccctcagtacctcagtttccctaaatgtgcagtgggagagcatgagaacacttatctgatgtcttccctggggttttgtgaggattaaacacaccatgtaggggcaagtgctttgagaatggaaaagcactgtgcagacatgagtgatgtgcatgatggttattgttagatgttctctcctggaatcaagttcaagcttcttgcatactcagcagagaacagacccaaactcccgaatctagtgctgtggcatgtggttggtgctcaataatgatttgttgtgtgaacaagtgcatgaatgagtagtaggtcaatgacctcaatgtgggcctggtcaggatttagatttcttgtctttgtgtgtgctcagcccaggactgaatgcacagcaggctgtcaggaagtagtcatggattgatgtgtccgtattcgccataaccaagcaggagatagatgatttcgttctggtctctggattttggctgcattttctctcatagtaggaattattcccggaagatccaaatgctcagctttgtcctcctctcatcctggtgaggcgtgtgatccaggtgagaagcagggagaactggccttcctggtgggaagttgtgggccatcaggttaag

SEQ ID NO: 49 - DNA, 159146 bp, Homo sapiens
gaattcagctggtctaacacagggcccttctgaggcagagctgaagaaaagaagcccacgtcacctgctgaagtcctgtcttctttgctgtttctcttccactgtttttagctttagattgggcagaactaatgtgtccccagattgtaggaagtggcagaagcaccccatcccaggactttttgggtggcggtatgggtctttggtcatggaaatggtggtgctgttgttattcacagcccttggagcactaagacccaggctcagtcctcaaagaacaactcctgccaatggtatcacatagtcaactcttaacagatacaacagccactttctaagaatacagtgtagcttttaggcaatctgcctagaaattcttttccactgaattcctggaagaggctgcttgattttctccacaccctagactcagaggagcaagtcagaaagccgagaatagccacacacggcacctgagaaaattgtgtctgcaggacccaggctcacgtagggtggaaagagctgttctacaaggaatttgtgagggagacataaattctacaattctggtttgatattacgttggtggggaagggggtgggatggggattagagcttggaatataatacctactgagtagttaccgtatgtcaggtacattacatttgtatcttatttaattcttatgagttctaaaaggcacaaaattttaattcattttatgattcacaggacatcaggttgagtacacagaaaggtcttatcgcagtccaagccctccttaaagactaggcaatcttgcttcctaaacaaagtcaatgagaatgtgagtatgtgtgtgcatgtggcatagaggaaaggttataaaaatgaacacattctagtgcaaggtttggcaaactatagcctgagtgccaaattcattctgctggttaattttgtaaataaagtttcattggaacactgccatgctcatttgtttatatgtagtctatggctgcttttatgctaccatactaaagttgagtaatgtgacagagaccacatggtctgcaagcctaaaatatttaccatcttgccctttagagaaaaagtttgctgactcctgctctatatgaccacggtaatataaggcgttactttatattggtaaattaccttctatatatctaggataactacatatcccagactaagaatatattattaacttttctaattagccataactaaatactaaaaagagtttgaaaattaaccaaataatattcacaatcaaacatccatttgcaggaaaaactatagcaatattgttcctgtattctggaagtcattaataaagctaaaaccatcagtaaaataaaagcagacattgcatatagagccatcctgagaaagtttgctgtccaaggagttagtcccataccatcctctgaaggagtcagtgctatattggttccaatgagctgtcactttaatccattctatggggacgttgaaccagtcactcagataagaacgatgatgaggctgaacaggtagcaaccttttcccctgtccttctcagtcctcatttccacccccagagaatgaagtcctccattagaatttttgagatgaaagggcaaaaggattggggatatccccaagtaagttttggagtagtaaaagactccacgaatcaatataatttagcagaaagaaaagctctcagaggcaagtgacttgcccaagggatatggcggtggtagggcaggagttatcacccacgtcgccaaaacccagagcagatcttgctccaatgtgaattcaagttgtgctgtccatgggcaaacaagaaacttccccgttggcactctaattcctgacataaaagtacaatgttggcctggattggggttgcccaaacctcagccatttctggagcatctttacaagtttaccaggactgtaccatacatactattatcaactaactctatttaattgagtcactttcatcttaaattactttgctgtacaagaaaactgttgcattgcaataaatggaatttaagtatgaattatcctaaatagaaattactatgtaaactttactatgctattaaattccagacagataatgttgcccacccaaagctttgttcctgagcccttttctattgtccttgagaaagactgaaacaaatgttggagaggtgttaaagagtgataccaaactgagaatctctccaggcaaatagaaagagaattcaaaaaagagcaaccttctcacaatttcataccattaatagtattctcctcagacatttggaaacactgacatctaatttcatgagaattccaaagccagccaaagagttggaggaggggtggaattggaagaattgaaaataagaaatatttctctctaaaatgaattcaattcctttagttttcttgttggcatctcacgcacagcagacacttgagtatcattgcatagtcaagataacctttaaggttgaaattttatttccattgtagagatagagacaccaaagctcaagtccaggaagattaagtaatttactcagggtcacagactgtggatagagtagcttcagacagaggtctatttgatgccacatgcctctttttttctccctacagttgaattttgtctcctttgcaatctcaatggtcctgccagtgatccaacccctgcttactggataatgagaattggtccctgtcctccttggcacatcctttcatgtgcctgccagagtctgagcacctcacctggctcatcctcctctgcagactcgcatgctcttctttctcatcctctttacataaatcccaccctggcaaccttttatcactctctgctcctctccttttaactggttccaatctctcagcctctactctttaagtgggatttccaggactgaagacagcctgccacaagatcctgaagatacagcagggttaaactgaaccattacttggtgcattgttaacaagtttctcactgactccagcaatggaccagtgctagttaggggttcagggtgatagaagggggcatataggcaacttttgagaaatgaagacagtgtcactcaatgaagcagtggcgagaaaagtagtcaggtaagatggcaagtgcagaagtgtgaaaatggaactcaaacccatacaacaaaagtattgaacaccaagtttgcataaggcagattccaggtacaaagatgcatagagtggagacacaaaggagaataaaatatcctctccctcaagggagctgctgtctagctcttccctgcccaacatgggagccactagccacacatggttactgagcacggaaatgtgtccaggccaaattgagatgtgatgtaagtgtcaaatacattccatattttgaagacttggtcttcaaatgacaaaaaagcatgtgaacatcacagtaatcatttttacgttgattactaattgaactaataatatgaacatattgggttaaaaatgttattaaaattaatttcatctgtgtctttatacttttttttaaataaggctactagaaaatctaaacttgtatatgtggcctacgtgacatttctgttggagaacactagtccatgcagcaagatgggtatggacccaacacaggaaacatgtaaaactgtaacacatgatgaattagacacaagtgtctatgatcaggaggtgggggggattccaagtgggggaagcacagcaattacttatttacacaattacatcgttttcacaatatccattggctactgagctttaaaaatcttttttctcattaatttccttgtgtgttcccagatctgagaataaactctttgtgtgcaaggacaacctcatctccctttttaaattccctcagtaccacctcccagaagttacctcagttctaggcacacaaggaatgcctgtagaaaccaatgaatctcacatgcatttatctagactctatttccgatgagccaatgtccatataggcaagtattcaaagtagagaaaagctattggccagagcatggaaaagataaatagacacagacatcatcaaatggacatacaggagcatttattggctgcttactatataccaggctctcaatttcattctttatatataatacctgacataaaccttaaatcatcctgcagaaaagctaatcttatcctattttacagatggggaaactgaggctcctaaaaggttatataactgcctaaacatagttaataagaaggcaataatgaaaggagagatcatgtccacatacttgaaagctcagggatatctctttatggagcacatctgcatgaggatttcagcttctgctttgaattacattgttaactattgtacaagcaatttgtctgaacatttggagaaagatgttgtgtaagtacttgtatcctctctgtaggaggaaaattcagcaggatacaggtgacatgactttgctctcttttgcatccagctgccgaaaagtatccctcttttggaactccagattgtgtcttagcctgcaggttcacactatttggactcccaaactcataacgtaagacttggaaaccagccagtgaaagagggagggaaggaatatttttgcaattgctgcaagaactttccaagagctattcttggagctaggagtgttggcaccaggctctcaaaaagagaacagggaaggattctaatgtggaaatattctaaactgtgtgcttgacaatatatactagatcccaccacctccccccacccccgaataaaaaaagccactagtgacagaggctctggtagagtaactgaatactggctggctcattggtggacttgctagtgcaataatcccatttaaccaaaggtggggtagtgattgccagaattcagatcccagctttgcgggatactagccacatgactttgaataaatgaggctctctgtacctcagcttcctcatcaacacaataagcacaataataatatctgccttagagagttgttacaaagtttaattcaagttcatatatataatgtgttttcaacaatgtaaggagtagctgttattattatcatttttaatgggctatcacaacaggtagctcagttctagtatcttcaacaaagatagggtaaaacaagagtaatgctacttaaaaagacactgtctccccaacaatgcatggaaatagtgagattttcttgtgtctacatttagtggggaaagaagtagaacaagttggtagaatatgagaaaggcaaactaaggcataaagagattagaaaaaacaaaaggagttattaagaatgtaaactttgtataagatgagcccccatattttctaggaaggttaaatcacaaccttcccccatctctataacccttttcattattttcttccctttacaccatactttgaaatgatatgtcagtaagttcttactaagtaataatttaaaagctttaattttgtgtgttatttggagatggaagtaactgcccaaaagaggtcctgaaatgatttaaaatgccaagttattttgagctgataaaattctactctgcaggatggtgtggcagtacaaattgtacaaaatgctcagtgtgtcctttaagaattctgatgtcaattaaatccatcacaaatatcagactggaatggagtgtcaggaaccagtatatccggagctatttcttgtttcctgatttgtcagaaagagctcagacacaaagctcagagtaattgcaaagctggacaacaattttcagatcgatgacattttgaccctaacttgcaactacttaacatgcaatctcagcatttaacaagctattttcttataaagtaattttaaattacatcttaattgcttttttgcacttgaaataaagataaacagaaaaataaacaaaaagaaatcatgttgtcatgatacttacctccaaatatgtttgttcatgcctcatctatgtgattaatgttcaatggtcaattaagaatttcttaaatgaaacaccaccaccaccatccatcacagtctagtcataaaatgttcagtttcaccatttgtaaaatgaagctaaaagtgcttactcttggtatgaggtttgaggattaggcctacaccttccatttgagttcattcttcccctcactgggaaccaccaataaacagaagaagcaattgtggttgagagcataggctttgcagccaaactttgaggtctggatcccagctccaacatcttatatctctgtgaccctgaggaaatgacgtctttgagcctcagtttcctcatctagaaagcaatactcatgagcgtatccacccgaaagggttgttgtgtggacttccacagatgatgtaggctgagagattggtacagtgtccagcaaatagtgaacaattgatccatgtcagctaccctatcatcttcattcaataaatgaagctctgaaaggaccaacatatatctaatggatgtcagtagatacatgttgaatgaaagcatctgaggcattgtatccttgggcccagggcagatagccaaggaggaaggagaaacccttgacaaaatttttctccctttgaaagccaagggtcaccaggctatatagttaaagtattaaaaagccaacattctaaaaaaaattaaaaataaaaataaaaaaagccaacattctagcttctctttcttgatctaccccacctaggggagagagaagaggaaatttcccccaactccacccaagcctcctaatgagcgcatagaagagaagggatgtctcacttccttgtcattgtctcattttagcttcttctggtattaccctacttggtgaaacctgaactaggattctgaggccaattttattgcctagttatggatgtaaagtgatgcaaagtgagcccacgctgttgagaggatgtaaatggatttaccaagctaacactgaaccataattcaaaaacctcaggcctgacactgtcagatcttcaggctctgggtgcacatgggtggtgcagagtgcgtcccaggcactgaagatgaccacctcgcataggtgcacttccagaagaccagatggaggcagctgggaaatcttctcacggccctcatgccttggcatcctgatgacgcactaccctgcagagagtggagggcacccagaaattccccaacccactcactttgcttatcagtatcctgtcttccccttagtaaggaaaacaaaaagagaacacaactgttgagttcaggatggatgggcccagaaataatttcaaaatgtagccttctttccttcatcttttcagtaaatatgtactaaggacctaggtatcagtttattacattgtaaaacaaacctcccaaaaattactgacttaaaacaatgaccacttttttttagttcttcaggtcagtaactttgtctgtgttcttgaggacaaaactgtgtcttatacagctctagattaacaggtaccaaagggccttgcacacagtaggcatttgataaatcaagttgaatgaatttagtaattagaaaacaattgatgatggtttaaatccccttggggctcaatttatgagcaagaggtcaatcatattgaccaacatgattgcactcattttagaaagtgtatgttccctgttgaatctctgtgtctataagaatccctggcaaatagtaggtgcttataaatatttttaaatgaatgaatgctctttccagaatccaacacttctcatcatccccttttctaccactgtatcaatgccactgttatctgttgccttgatggttgtattagcctcccaactggagtctgggtcattgtctctttattaccctcagtacaccagccagaggaatccataaaaatatgagtcaaatcatgtcactcctgtgattgaatcttttccttggcccctttctaactcagtctaaaacctgaagcctttacagtgccctacatggccccacgcttcctgccctcttgtgtcctctgcttcttcttgtctcccctcactccctcctccccacactggcctcttactgttctgtgagcccaccaactgcccttcctcatgcttttaaatttgttattccaaatgccttgaaggctcttccttacttccttcaatcttttcctaaatgtcatgttctcagcggggttttccctgaaaaccatgtttgtaatttcattgcaatctcttctttatctgctttatttttccctatagcccacttatctccatctagtatgatatatattttactcatttattttgtatgttgcctgcctcccccaaactaatatataagctccccatgggcaggaatttttattagtttgtttactgctaaatctccagcacctagaacagtgtctggaacagagtaggtcctcagtaagtaacttttggatgaaaccataacgtgctctatgagaagtgtacattttctcagctaacactgaatccatgccatatgacccatcaattctactcataggtatttgtacaagagaagtggaaactatgttcatacaacattgtacattaatgttcatagtagcattttataaagccataaaagggaaacaatccaaatgtccatcaactgatgaatgaataaatacatgtggcaaatccataaaatggaatattattcatccatgaaaaggaatgaggtattacacatgctgcattgtatgaagcttaaaaacatgaggttaagtgaaagaggctggtaacaatgaagtatgaagtggagagtgactgctaaaggttatagagtttcttttggaggtgattacatttttctggacttatatagtggtgatggtttcataactttttgaatatactaaacaccctgacgtgtacattgaaatgggttatttctatggtatgtgaattatctctaactttttttttaagttgcagagacaaaacaaaaaacaaaaaacttgaatccaacattacccatgtcatcccagaggttagatctcaagtctggggtcacccagctacctagagatgaaatcaagatttgcactgtttattcaaagaattattgcctgaggctctgttttgtcttaagcactgcttggtggagcaaacaaaacaaaacaatataaagtatgcatttaatgtccagttcatttggaggacagacagctatgaatacaaataaataaaattgaaggttccacctaaatacgaaaagataggtggaagccaagagcacgagaacacagaagggaatattgtttattagggatggtttcctggagccaggctggaaagaaggtagggattctgcaaggacaggaaaggaaaggaggagcattctggcacacggagcttgagaaagagcatggaattccccaaaggacaatgaggagggcagaggaaaagaatgcaggagagacaggctgaagagatgcaccctgagggtgctcagtcccctgctatgcaggctgcattttctcctgtaggcaactggcattggcagaaggttcatgagcatagaactgttatgatagaatatgtattctggcaaggctaagcttccagccatgtgaaccaagagttggagaagagattcattgatatagttggatctgtgtccctgtcaacatcttatgctgaattgtaatctccaatgttggaggtaaggatatattgtaatctccaatgtgggaggtaattggatcacggggctggacttttcatgaatagtttagcaccatcttttttggtgctgttctcatgatagtgagtgagttattatgagatccagttatttaaaagtgtggcacctccctgcctctctctcttgctactgctctggccatgtgatgtgccttctcccctgtcacctttctccatgattgtgaatttcctgaggtctccccagaagctaagaagatgccagtattatgcttcttgcacaacctgtagaaccatgagctaattaaacctctttttgttataaattacccagtcgcaggtatttctttatagcaacgcaagaacaaactaatatagtcatgcatgacaaggagggactgcacaaacacatgaggttaacgcaagagcttgggttcagcctgtggcagtgggagtggccaggaataaacatgtcccagaggcatccagaaggaggatttggtggccaactggataccaggagggaaaaagtcacagatgctgcaaagtatctcacctcagaggcaagagagttttgctattttactaatttccagagggagcacaggaggtgtgggagcaggtaagatggggaaaaaaatgcgtaacatttgagagattttggctttgagttgccatcagggaattgtccagcagatagttgaacaaggaagaactattaaagtattagctacatgtaagaaatattttgagcatacactacatcctacagaatgttctcagcatttcatatacattattcaatttcatcttatcaaaagccctttgaaacagagaaagacagccttctcctgtctgccttctcctcaccatagccttctcccacctcctgccttctataccttgcatcttctccccatccaagccttcatcccacctctacctcctccctgccattgccttctctcttttcctgtctttctcctctcccatcctttcccacttctggcttctcccttccactactgtctaagagaaaaaatcttggatatgaattttatataaactgaggcaatggatacttttgagaactgagaggtaatctgaaagacaagaattatttgccccatgctcttacttattagacaaccattacaatggtccacccttacccacaggggctgtgttccaagaccttcagtggactactgaaagagcagatagcaccaaaccctatatatactgtgtttatgtctatacatacacacctatgataaagtttgatgtataaattaggcacagtaagaaattcacaacaataactaataataaagtagaacaattgtaacaatatgtcagcatcactgctcttctgctttggggctttattaagtaaaataagggttatttgaagagaagcactgcagtatcacaacagtcgatctgatattctagacagctgctaagtgactgacaggcagggagcatctacagcatggagatgccagacaagaggagaattcatgtcctgatcaggacaaagtgggacagtgcgagatttcatcacgctgctcagaaaagcacccaatttaaaacttatgaattgtttatttctggaattttccattcaatgttcttaaactccgtaagtaaggaaatcctggaaagtgaagctactgatataaagcactattgtaactggacaccttgtttgtgagaggtgctgttctaggtgctgaaggcagagctgtgatggaaacagaaacccttgctttcatgcagcttacattctaaagagagaacagtgaggataacacatcagaaaagggagtaagaggcaaaaactcagttcagattggaatggagggagatagtttgggggagttttaggtgagagacaaggaggaatggggtagctgctgtgtcaagcagtgaggctgaactcactaaggtgagaacagaaagcaagttttctctttctgaccactgccccccaaactacctctgtactatttcttcctttgtctcttggatgaactttcagacagtttccatgctttttacactcactacttggtaataaaatttccaattagttttgtccaccaaaaagaccaccactgccattttcccttcaattactgtgcctaagtcacatataaaccatggaatactatgcagccataaaaaaggatgagttcgtgtcctttgtagggacatggatgaagctggaaaccatcattctcagcaaactatcgcaaggacaaaaaaccaaacacctaatgttctcactcacaggtgggaattcaacaatgagaacacttggacacaggaacgggaacatcacacactggggcctgtcatggggtgggtgagggggagataacattaagagatatgcctaatgtaaatgacgagttaatgggtgcagcacaccaacatggcgcatgcatacataagtaacaaacctgcgcgttgtacacatgtaccctagaacatgaaatatatcaaaaaaataaaataaataaaagaaaatgaacatattcattcaatgcacaatgaaatgaaaaaaaaaaattattgtgcctaagtcaagacaatgattcttctttgggcttcattcagagttggaacttctcacctctcccaggctcagggaagatgcagacctcggatcctgtaagatgctgtggatatttgctctattttgtggcccaacttgcctttctgctttatctccccctaaagagccagacttggatcctgactattccagagttaggcttatggaaagaggaattagaggagaatgtggacacctggtcaattggtactgtcactatccagctttggtgctctccagaactggaggtagtaaaggctgactgtttcttccaagaggtgctttgaaacttttctcagagattccccaccaggaactttaacttattttctcatagtcactgttttttctcctgggattgcctctaacatcaaccctcaaccttggcatttggtggtccacttcatagagacactttctttttggtgtcccatttaacctctgggaagaccacatgagcttcatctcatttctgctcatgagagagaccccagcaaattttagtaccacaattgatggaaatattcaccgcaaatgtcagtcctttctctcttctatgcagccccaatgaagaagccacagagttgctattcagatttctcaggaaaagtcaaataactgtccactgggttccctaaaccctagggggtgaatatcaaactctttaagtggtccttgaagccactctcaccatgcagggggtgggaaggaaatttctacagaactccacaacccggccccacacatcgtcttgttagatcagctattttaaatcctaaagcagtagtcagcaaagcttttctgtaaaaggcctgatagtaaattatttaagctttgcaggcaaaacagtctcagtagcaattctcaactctgcattgtttttaaaaaagaaaagagcaatgggctatgcttaagcaaatgggtgtggctgtgttccaatataactttatttatgaaaacagatagcaggcaggattcagcctgtgggctctagtttgactctctaaaggtaggtgatgacccaatattctgattttcagccttcccattgcaaggcccgtcaagatggggtagcacttcccttggaagacagaggttctttctttattgatttttcttgctgaagtcagagagacagaaatggtctcatttttaacatcctattaaacacaaacacacacacacacagagagagagagagagagagagacagagagagagacagagagagagacagagagagagaggggagaaagaaagaaaaatgacagaaacaaagaaagaaattagtaaagacattttgaaaaaatgtgctgcgtgttaagaatgaaattccctatagtatttctgagatgactggtcatgcaggtggctgggtctttcaactgtaacatgtggtgggaggaaaccagagtagcccaattttatctgagatgtaataggttctcttttcctcattttatagttggaaaaaactagtactatagagatcaaataacctgtctttggtcccacagttagtaagagacagaaccaggatttaattcgttttccatgaccaccaaatgctacgtagatttttcttaggtagattattgtacttgttttctattactgctgtaacaaatcatcataaatttagttgcttacagcgacataaatttattataccacagttttagaagtcagaagtccaaatgggtttcactgggctaaagtcaagatgagatgtcagcagggctttattccttctagagactctaagaaataatctattttatttccttgcctttccagttcctagaggccacctgcattccttagattgtagcacctttctctgtcttcaaaaccaacagtgtagcatctcctgtgatggttaatactgagtgtcaacttgattgggttcaaggatgcaaagtactgatcctgggtgtgcctgtgagggtgttgccaaaggagactaacatttgagtcagtgggctggggaaggcagacccacccttaacctagtgggcacaatctaatcagctgctggtgaatataaagcaagcagaaaaatgtgaaaaggtgagactggcctagcctctcagcctacatctttctcccatgctggatgcttcctgccctcaaacatcggactccaagttcttcatttttgagacatggactggctctccttgctcctcaagcttgcagacagcctattgtggaactttgtgattgtgtgagttaatacttaataaactcccatatatatatatttatattctattatttctgtccctctagggaaccctaatatatctcatgacttctcttgtccctctgttgccattgttatgtatgtcactttctatctgactctaagtctcttgtcttcctcttataaggatgttgtgtttacattgagcccaaccagttaagccatgatcatcttcccatctgaaaatcattgaattaattacatccgtgtaattaattcaatttttgccatgtgaagtaacatattcatagattctgggaattaagacatagacaccttctaaagggggagagcattgctccacctacaacaattgttgattacaatccaggagatgaatgtggtctttcagaaagaatgcttaaagctaaaagggaatcaagatgaaaaaaagaacttaaagaaagcatctaaaagtagggccagtggaggaaaaatgagaaattgcaaagagctaggagaagaattgcataaaagtgcttcccgaaagccccagaggagagaatttcaaaattcttgagtcacaaagtcaaatgctctgaacttgaaaaaggacaaaggaacacaatctcaggcaggggaccaccagcaaccttagcaaagggaagatttggactgcacgggtggcggcagcgtggagtcacactgtacagcctggcccagcccagaacctttctcctagcccaggccctctgttcacaggaagcatcagcactaccttttacctcggccaacccatccatattgtgaactcagcttattggaacacaaagagcatttggctgtcttttagatataatttgaaaagtcaggagttggcctttggaaaagctgcttcagacagcaagaatattttagtgtaaggggaaatatattcatctgatgaaaggtgtgggaaccaggagtgggagggaagcaaggttcccttggtaccacctggagtctcagcatccatattattttatgtggcatcaccatcattttttgacaccaccagcgagattgttcaatgaatatttaatcatgatggggttctctcctttcccattccttcggtcccctggctccagcctttctaaagtaataactttgctcatcaaacaccaaaactggcacttccccatccttatgctggtaccatgatgtagactatttgtgggttctgagcgacaggtggctggtaaggtagcaacagaacagctcccagagacaccagttgttggaggcttatattaccccagggaggatcatgaaactgcagaagccatctggcagggctctcaaggcacctgtatgctgagcctgctgccaatatctccatctcaattaggctcctgtgcagtgatttccctgctgtactcactgactcgcacaaaatctcagggaagagcacaggcaccaaccaactatgctggagagaagaggaaagtttggaagattactgaagaaatctttcctctacttccatgtggtgaaagagagaggaatgcaacacacctctccatggaagaaatcaaggaggatgaccaacaattcacaggcaatcttgatagcccttgatagtcacacccaccctgtgacattgggccacttggatgccattttaggtatgtggaaattgaagcttaaagtggttaggtaagtccctgaggtcccaaggatgatgaatggcagcaccaaggtgtaagccacgtctgtctgactctagggttgatgtggatgctcactacagttcattgcttattgcagagtcaaagttcaaggtccttaagcacaagaactgtgtcctatcttgctctttttgtatccatcacctcctcactctcacccatgatgcaacctcaggaccaaacacaatgggtaagtttcttctccactgtcaaccaccagcgttgtatctgggaagtggggtaaaaacacccatcacttgactccataaatgcctttccatctccatgatgaagacaaactccagagatggtgcatttatgcaactgagtattgagtgagcacatgctatgtgcgctaggcaaagtggtaggcgattaaggagaggtagattagaggctcagtatgacagacatgcagcagcgggtgttaattactactaagtgttcttactgtgcttggtaagcatgttgcatgcattatctcatttaataggtgtgtgcgcatgtgtgcgtgtgtgtgtgtgtttgtgtgtgtgtatgcagggagaaattgaagtgggcacattcctggctgcgcaaacagcaggagcaaaggtactgaagtagaaatgtgcaatgcatgtagaagaaactaaataagttcagaatattctttaatttatttgcttaacaaatatttattgacatcctctatgtgctaggcactgtgataagcaaaggagaaagaggagtgaaccagatatggtccagagtgacactgataacaattacaaatagcgataccataataactgtaataaaactacaacgttaaaaagcaggaacacaagattactgaacttcaggaggctaaccttgtctggaaggttatggaaagcttccctgatacagcatcagtgagaacaacagagagtagaaaagtagggtccttcccttctggatacagggtagatgttaatttaatagtgagcttctgagagagtcaagtcttgatatgaattcaccatagcactggggtggaatcaaaagaaggaactagcctgcagcctcatttaggaccaggagacatggcatcagtcaaatgagagtcaaagcaggattgaaactggagatcccaggcaaaggctaggagcacggacctctcaggagggtgccaagttcaccagaataagcattgtgcatttggatagtttcagtaccttttccagtcactttatccacatggatgtttaacatgaattatctcacctgagactcacaacaagcatagggaggcgggaatgggaacaaaaatcctcatctgacccagaagggaactggaaggagggcttgtgattagacatgggacttcccattctcaaccaagtccctgcgcacacagcatggtcaccaggcaagaccatgttgagcctcacccgctacttatttttcaattaataataaccatataaagaatccttgcatagtgttttatttttatttttcacagcattttcctttccaccgtctcattggagcatctcatcaaccttgctaaggagacaacaaactacaacaaaaccccgcaaggcttagagatatttgcccagagccatgcaggtgaaaatatggaagaaacaaaatgccaatttaagtcttcttccatagaatcctttgatctttctgatactccacatcacaccacccatcagttcatttattcaagaaatggttactgagtaactttcatgggccaagcccttttccagctactgaagatgcaattctcataaggaattcacagagaacaagtaacctgatacattacagaatgtatagccagagtagtagcaaggtgctaaggggtacacagaggaagagacacaagagcttcttgtgttatggggtagagggcaatggggaggcttcatgcaggagctagcatttgagctcagatgtggtggataggtaggagttttccagggcaacaaagcaggcaaatatctgagaccagaggaaacggcatattcaagggcacaggcatgaccaggcctgactcttccagggaatatggctggagtgaatacaggagagatgagagagaatgctggaatggaaggagaggacttcataccagaaactgagagtagtcagagaggtgttttcagcaagggagaggcacattcagatttttggtttggggaaaccacctatgcgaaatttagaataaaaagtgaaaaaagagcctgaagatgggaaaataggtaaattatgagagtggcagtgtggaagaaggaatattgcatctgggaatacaattggaagatttagtgacttggatgagaatatgagagagaaggtaagggatgacatgaagccttctaccctgcgaagccaagaaaatggtagagccatccagagtagccctatttcctaacacatgctcatggatacacaccacacacacacacacacacacacgcacacacacacaggcacgagaggctaggtgcagtggctcacacctgtaatctgaaaacattgggagactgagttgaggagtttgagaccagcctgagcaacataatgagactctattgctacaaaaatttaaaaattagctgggtgtggtggggtgcacctgtagtcccacctacttgggaggctgacgtgggaggatagcttgagcccaggagttcgaggctacagtgagctatgatgacaccactgtactccagtctgggcaacagagtgagaacccgtctctaaaaacataattttttaaaaaaagacaaaagaaatggaagcacattagcatgttagcagtgtttatccttggattacaaaacgcttgccagaattttctttttaactttttttttatactttaagttctacagtacatgtgcacaatgtgcaggtttgttacaactgtatacatgtgccatgttggtgtgctgcacccattaactcgtcatttacattaggtatatctcctaatgctatccctcccccctccaccccaccccacaacaggtcccggtgtgtgatgttccccttcctgtgtccaagtgttctcattgttcaattcccacctgtgagtgagaacatgaggtgtttggttttttgtccttgtgacagtttgctgagaatgatggtttccagattcatccatgtccctacaaaggacatgaactcatcctttttaatgctgcatagtcttccatggtgtatatgtgccacattttcttaatccagtctatcattgatggacatttgggttggttccaagtctttgctattgtgaatagtgccgcaataaacatacatgtgcatgtgtctttatagcagcatggtttataatcctttgggtatatacccagtaatgggatggctgggtcaaatggtatttatagttaatcttagggggagttattgtcgaggttggtctcgaactcctggcctcaagcaatcctcttgcctcacggagttttccaaatgttctgtatgagcatgtattatatcatgctcagagaatgtaacattttgaaattactaaaaatggtaacagttacactttctaacaactactacattctcatatttttatgaagtaagaacacagttatcctcattttacagaggaaaagctgaggctcagacaagagatctctgcagggacacatatctactaagtggctgaatcatgagtcgactcagatctgtttgattccagaagctaaggcctgactgaacacctgacattgtcgtgaatttaaaaaaaaaaaaaaaaaggaagtagattttaaagagaagtgctcattaagtttagtcttgtgagtcataagtttgaagcactgaagagatgactggggatgtcttttgaacaggttaaacattgactggaggctcaggagctcctctttggaggtgttgatttgagaattgttcagagatgtcaatgaagcaacagcaacagaggagaccatccgggagtagtttagagattgtgaatagaaggatattgccaaagaccactcagtaaggaaaggagagtcacaggagagatgcaggtaacctggaaactgagggagagaggactttcagatcactgagcatgatcaagtggcataaaatggcctttaggcagagtcttatgatgagtttgacatgagaatatttatagcataaactagcctgaacacagtcaaggtaggaagtataaaatgccctttcaagaatggaattgatgaggaattggtgagggaaagattgtagttcaaaatgatggagacaggggaagggattttccccttgcagaaggcttgactccacttttaggctgaatggaaggagtaggagggacagaagagtcaggatagagagaaaacaacccgaagaacaagttccttgaggaaatggaaagggatgccacacacaggtaagggtttgctctaaagtgctcctcaaagttaacagtccagttatagacactgttgctgcaaaacaaaccacaccatatgcaaaatgtaaagtaaaacaatcaccatcttatgcacgctgcttctgtgggtcagaaattggacagagcacagtggggatggcttttctctgctccacagtgtctggggtctaatttagaaagactcaaatagttatgggtgactcaaatgtcagggggctggaatcacccagggtctttcactcatgtggccgatgcccgggctgggatgattttaaggctgggctcagcagggtcgattctttgagcactcatgcatggcctgtgcatgtgccttgggcctcctacggcacggcagcagcattttgagaggaagcaataatccttatggtatcatcactcctattgtgttgaaaagagtcctaaacctcaggaaattcatgtcacttgttcagtgtcatagagctttacagtgtgctctcaattttgcctaaaaaatacattcatatcacatatagaaaaaattctgggagaatacacatgaaaattttagaagtagtcatatttgaatagtgtaatttttatttccttttagattttctctgttttgtttttatgttttagcaatgattatgcatggctcatacattaaaagttttgtttttactttctagatgaagccttctgtaagcagtctaataaccccttggacttagttgttttcaggacaagcccaggggtggcatctcccggatggaaatacaaaccaaacatctgccaggcatgtaccaagggttccatacttgacgtcatcttatcttggagaagagattctcacactatgggactgactcagacatcatgcctcttcagccaggcagaggaactgacattccctaaggtatcctataacatagctatatcagagatggccacatgaggaggccaggacatcattgagcaacatgccttgtggttgagcttcatactaccatgaccaagagtccaggtcaagaatgccagtgtgcttctctcaacaaaacatagcttgattctgggcttttaggcttttaggttctttctatcttctgaaactcatccaagattttcagctcatactttaaacacgttgaggttatctttgaaacacaacagcatctcccctgagatcaccctcttagtttacgcagttttaagttgggggttttattcatttaaatgaaaatgtaagaattttaatttaggttgaaattttctaatgttagctttgaatgcaatttagatgaagcataataaatgcaggttcaaattcaaccagccatttctgagaactgtgcctggcactgtgcccagtcctctctgatgagcatacactcttgtcttctcaacattcaccctgccttcttctgtcaaccccaaatcaggtgaggccagctagtgaacagtatctgaactcaatcactgagttcacccagaatctaattggcctcgcttgtgaaatatgttattttgatgaggaatcagagggccaattagctgagatgctttggacaagtcctccatttagtcacctgtaaaatgagaagaggacaaggaattggatgaggcatctctaagacccttctggccctaaagtctcggcttcttcaagtcacagatgtgagcatgtctcttgttacatcagagctgccctttctctgtcatcagcccacaagttatctaccgggaggcacacaaacatatccatacacatcctgagcccacacccctgcagcaaacagcctcacccagtttcacacaaagagaagccacctgcacatgtgaccaaccctagcggctcctgagcagctgctcttctttgctctctaaggcagcaaaagggatgtatttccctcatcgaatcttttttctcttaaagaatcagaagcctccttcactcttgccttctcactatctggacttcaaccctgtttactataactggctgtttagctatctaaattttctatgtgaccatgaattccacaaggaaaacacctatttgtcatcttactgagtgttttggcttcagcaactagctgggagctagatacagaggcatcgattgctgaataaccttgtcacccctcccggcccgctcttgtggtgaattagagacaactgcatgttctctgacacctccccagtcaagagatgaagtccaaatcccctttccttctatcttggcaggcagatcccatttgtatttatttatttatttatttttttttttgagaagagtctcactctgtcacccaggctggagtgcaatggctctatctcggctcactgcaacctccacctcctgggttcaagcgattctcctgtctcagtctcccaagtagctgggattacaggtgcatgcaaccactcccggctaactttttgtatttttaatagagacggggtttcaccgtgttgcccaggctggtcttgaactcctgcgctcaggcaatccacccacctcagcctcccaaagtgctaggattacaggcgtgagccaccgtgcccggcgatcccatttgtattattcctagtttctagatgaggaaactgaagctcggaggctcagagatgcgatcctcaaggtcacccaactagcaggtgggaaagccaagattcaagttgagatctttctaactccaaagttcaagccctctataaccactgggctgtcttgcttcccaaacaatgttacagcgggtgtgcctgtttgtgtatgtatgtgtggcatacagagaggtagaaaaactggatacctccttgagcaagcattggcattgtacagcccacagccaaatctggcctgtttttataaataacacttcatgaagccgcagccacactcattcatttacatactgtctatggttactttcacatcaccacagctaagctgagtagttgtgactcagcaaccatgtggcccgaaaaagcctgaagtattgactatcttgtcctttacaaaaagtttgctgatgcctgttctagaggatctacataggagattacttacatcccttcaaggacacaatgggcctcattttttcctgaggcaagatttaaagttaccaacttgtcccagtttttcctagactttgttatttttttccagaaaaacctcttggtcctgggaaaactgggatggttggtcatcctagttctagattatgcaccacagactctatataagtgtgcagtcctgctgtcccttgaaatgccctaactgcagcttccacggctgcctaagaggggatcagatgccccaggcacagaaggcacttccttctctgccaaggtcccaccacagagcaggcccaaggcaaggccaccctgttaataagcttaattggatttgccagctgagccatgaattcattatccctgtcaatccccagccctagagagccaagaaaaattcctagaggaaatgataaaggtctctcgtctgggcctgtgtctccattctttctccccctcccaccctgaaaaggcatatacagtgtgctaccttctcgcattccaggacataaaggagatactgtcaatgatgcagacgttttaagaagtagcattttcataatgaaaagaaaggtctggctggttttttgttgtggttgggttttttgttggtttattttttctttttttgagacatggtctccctctgtcacccaggctggggtccagtggtgcagttaatcacggctcactgcggcccccatctcctcggctcaagcgaccctcccacctcaacccttcaagtagctgggactacaggggtgcgccaccacacctggctaacttttttgtattttttgtaaagacagggtttcgccctgttgcccaggctggtctccatctcttgagctcaagcgatccacccactttggcttcccaaagtgctgggactacaggcatgagtcaccacacctggccagtctggctctttttttttttttcttgcatgtttttaccatgttcttggggtgtgtataataggagtggagtaggtgatgtgcatatacatagcctatgcataatttttcagatgcgtgaactttcccaggcttaataattggcctgaagttcccctcactttagacattcacatcttcatgcacagaggcccccataatgagagttgtacggaccagtcatctactagcaaaattatctaacacaatgccaaaaacctgggtgtgagctgagactgggagaaaagcagccagaaaaggcctctctccctgtgcagttctcagagggaggccggagctgcctcaacagcacaaagaaaagggagggcctcttgccttcctcccagacttgagtgataagttctgaagacaaaaggttctggaagaacggactcagcttctgcagcccctgaccaggaagagagaaatgactagagcagtttcagcaaactgcagtcctcaggccacatctggcctccctttgttttagtgcagcctgcccagaggctaagaatgacttttacatttttttaatggttgcaaaaattaaaagaatactatttgtgatacgtaaaaagtatatgagaatcaaatttcaatctccatcagtaaagtcttatggaaacatggccaaactcacttgcttttgtgttctccgtggctgctttcccattttacaaataaagaaactgaggtccagaaggatgaaataaatgaatcatcccaaagtcacatagtttgtaagaggcaaaactaagatttgagcttaggtctgcctgccaacaaaacgccatcactctgacaagccaccctcttgaaggaggcaaagaagtgggttcttgggtgagtgggtcaaggagaaatttggatgatcgatgtcagctcaagcctgaggtacaagccagtgttaatcagtggacaacagctggctcatgcagggtgtacatatagaagatacctcaacagaagctgagagatattgaaaaatactgcatggcagctcctcattttacagaaggggagtccgggggtccgaaggcatgagagatagaagactttgtctggaatcatccaggcagtcatagccagagctgggtggagaaactaccacatcattaaccccaagagatgagagttgggtgccagcttcaaggaatggggtcagtgggagaggtgctctggctggcggattccagttccacaggaggccttgggtaattctggggacaaacatgggtcagaggccaaactaaggctcagcacacctacccttagttccccaaagttgcagaagacaaaataaatttgcatttttacaatgggataattaatgtgaactaaagtactcttgtaacagttgatctgtttgaaaaggaaagaaaatgtcctaagaaagacccaacactggggtcaaagctcaatatttgcagttagtatctgagccccacttactaaatgcctctgtcctagtagtacttccttttccaattttgatcagaggagacactgagcacggaggagagaaccacatgcataagtcaccaaaccctcatcaagcatctgttgtgcattgggctttctgggtgcattatcactgatcctaaaagataggcaaaatcatttccattttatttgtgaggaaactgaggcttagagtgaccaagtgatcacctgaggtcatacagctagaaaaaaaacaaaagccagctgtctccacacttggaggagggttgagtttggtaaatatgaaaaggacttctttctcccagagctgctgggtttttcagcctcgctggtatagccagatgtctttcctccctagcaagatgtcttctgttgaactcttagggctgaaaccaggttattgaagggaagctgccaccttggggagttgatgcatcgcagatgcagataaaggcagattgcgagattccatacctgcaatcagatggctcagattcctctgcggggtcaaatgccaccacaaatgtcttttttatatagactgaaggagctgataatgtaaaccttaacaacccgggcagggcccttttcatctccctgatcacactcatctcaggatgaaatgggccgcagggaagggttcacaactcaactctcaactccaaagtttcctgaaagataaccccacaccttgtgcaaagttatgacaggaagccccacaaggcctttgtgataagctctcccagcacattgctggggacccacaattgtttggcaaaggggtggtgtccactgcttcaactgtgactttggaccagagagttgtaacagacaaatgtggctcaggcccggcaaccgtgctctgccttatgtcagggactggctgagattacttcaagagggaaattgttgatactaaacccctacgtggtgtgagtgacactctagtgtcaggtgacaaccctggatacatatcaaggggatggggagagacatgctgaactggttgcagttgagttttgggagagcgttttagcgctataaccacttttagctctagactcaggcttctgctgagtttcagctccagtctttcatattccacataatagatgacctcctgctactcccagttatctgggagtctatgagccatgagtctaagtgtctcagaaatcaactactggtcacacatcccagaaaggcaatgaaagtcctgacactgtgggaatctcctcagcccatttctccaagcctgcccaagcagagttctagagctttgatctatgccaaagatctatgcccaaaaggccaaacttctagaagttcccatgtatacgtagcatgctagttcctggcccgaggcctttgtgtgtgctgtaccctctgtccaaaactccatttccccacttgtccacccacccatctcctcctctttcttcataatgtggcacagacatcctctcaaaagcagtctttctctgaacctccagggtagccctcctcctcttcctctgtgctctcgcagcctcctacctcaccccactgcccttctctctcagcacctctcttgtcaacactcaactgggtgttcatcaatcttcaccaccagtcaagcccatggatggtcaaggcatggccttcaccatccctggagctgcacaaccggtgcttggcccatagaagatttttaatagacgcttaccttcttaaacacttggaagaattaactgaaaccacaaactcatgctagagcagcctcttttagaaatctcctcatttatttattcagcccatgtttttgtgcccctgctaggggtcatgcgctgtgatagcacaaggaagacaatggggagcaaaacaggccttgcctctgccctcagggagctgattcgtggcagaatcaaacactagtggcactattaacttttttcttaatagacattttttagttcttttttaaaaaatttttaagttctacttttaattaacaaataataattctatatagtatatatatttacattgtggagtaattaaatctaacaattctatcacctcacatacatattatttttgtggtaaaaatatttaaaatatactcttctagtaattttgaaatatataatggactactatttagtagagtcaccgttctgtgcaatagatcactcccatgtttactgcagaattattcaccataatcaagatatggaagcaacctaggtattcattattcgataaatggatttagaaaatgtggtgtctatacacaatggaatatttttcagcctttaaaaagaaggaaattctgggccaggcatggtggctcacacctgtaatctcagcactttgggaggccgagtcgggtggaatcacctgaggtcaagagtttgagaccagcctggccaacatggtgaaaccccaactctactaaaaatacaaaaaattagctgggcctggtggtgcacctgtaatcccagctactctggaggctgaggcaggagaatttagcttgatcccaggaagcagaggttgcagtgagccgagatcgtgccattgcactccagcctcagcaacaggagtgaaactccatctcaaaaaaaaaaaaaacacaaaaaacaaaacaaaacaaaaaaaaacccaggaaattctgtcattggcagaaacacgaatgaacctggaggacagtatgctaagtgaaataaagcaggcaaagaaagacaaaagaccacatgatctcatttaaaagtggaatcaaaaacaaagtagagtagagcatagaatggtggttaccagcagctgggatcaggggacagatggggaaagagaaatactgatcaaagggtacaacgaactatttaaccgtggttctgataaatgctaccaaagaacgaggccaggattgggtgggggaagcaaataaggcactggccccaagtgcaaaatttaaggtggagcaaaaacatacagggaaaagacaaatcaaaattaatacaaaaatcttcgtgctcaagaaactatccaaaatgtaaacaaaggccaaagcatcatgccatgtcacaatggagccaaaggcataaggaaaatatgcacccctatagacatgattttgcatattttaatggttattttttcccagaacattaaagtagttgaaaatcactgaacaatgtaaaagtaggatattaaaactcacattattttatgtttaaatattttatttattaccaagcagaatgtattatccttttattatagcttaagctaattaaaaaatcacgtaagattgccacttggtcacatgaatttatccaacatgacaattttctccagtgaaagcaagataagcaaagaagtagacaccaaaaacattattgagtgcttgcttccaaaaagcctggagtatacatttttcctttccttcaggcaccagcttggctcagaacagcatgagtctttatttaaaatttgcgattttgttcaccttgaattttttgcgttaattttgatacgttaaataattgcattaaaatactatttatcttgatatgaagggggttttatgggcacccacttaaaattttgcacccaaaagtgagtccctcttttgcctcaccctaatcccagccttgcagaataagggtacaggaggccaaacctaggctgagtgtgaaggagggctcccccagggatgtgacaatgaatgtcaatcctggtggaagatgacacagttagaactgtagagggctctgcctacagttaaaccctgggccaggaaggagcttgctaaagaataacgataagaactgcaaacacagacattatgctagtatgcagaggcactgtcctagcagacattcatttgattctcactacaaacttatgttgctggtattattgttacaattttacagaccaaaactaggacacagaaaaggtaagctagtagttcaaaatcacagagccatgaagtgatccagctagaatgtgaatgcaggcaatctcgggcccagtccatcctggaaacccttcctctctctcactcagagagaagtttacattggctagggtggagtgagccaccaggaggctgccatgagtggatagtgagatatagggctgaaagttccagccttgtgaaggtcccagtaggaattctaaacccttggaggaaaagtaactggtgccattttaatgttattttattttgcctctttcttcccgctatcatctttacagttgtcttgtgctttaatcttagaaatctggaaatattctgttcagatggtccctggaaagacgtagagcagaggtgttttattctaatttactttataatttaaatgagggatgtctcagtcaagacagagtggattccaacacactgctaatgcaaagccttgcccgtacagccatgaggtcaagggacctacagcaaacaagaacctcagcatcgtcagtcattgaccgtattcaacgacccttgtctacaggtagtaacatacagagtggtcaagcacacaggttctggtattaaattgcctttgtcttgactttgcaaccttgggcaaattacttaaagcctctaaacctcagttttctcacctttaaaatggggtgtcatcacagtgtctgtcattacagagactggctcagctggtcacaaaacgcatttttctcttctcctagcccagagctagcctatgcttattgcacagattcccttgcaatttggtgtggctgggactaagtattggccaaaagaatgtgcacagaagcaatggataccacgtccagacctgactcatacaacctcctttactgctgtctgctctctttcttcctttctctgtctgctggcagaatgctgagccccagggtgacttcagaagctgtgtgttgaatacagagcatctgtcagccggaatccctgattaagtatgtggagacagagctactgtcttggactaggtttcctccaagtggaggctgagacagggattaaagtatatgtgattcactgaaggagggatctcagggaaaaggaagtgtaaaaagcaggagaggacaggaaaaggaactaaccgagtatgtggtttcagcagggtactaagctgcggcaagattccacaggagccctggagcttggattccaccagagctgggcccacttggaagcaagtggggagggtggccttagtacctgtatcaggcagtaattggctaaaggccaccactgccaccccacgaggtgggaggtgtgacctcctgggtgaggcagacccatctctcctcccccagccattctgcagaaagcaattttctgaaaagcggggtagcagtgagccccttgtaccagcggaggcctgggcgctgggtagggctccagtagcacccactatagacatcccacttcccaatcaggaattcctgatttatgagagcaataaattaagttcattttcttaagcctccatgatttctgggtttctatgtatcattgtaaggaacgtaagcaatactgtgtacttcatggggttatgtaacgattaaatgagatgctgcatttgagttgcttaacatgtggtacgtgttcaatgaccattagccacaattagtaattattgccctgtggcaggtaatagagatggagaaatatctgttctgccttctctggagggcctcgtggccttgtgggcacaagacagatggaaattaatgattacagaaatacagtagggaccatgtctgaaatgtgctcatagccactcacacctgcatctacccaggaacagaataaaatgtttcaagccagaagtgatgcttgagttgacttctcaggaatgagcaggtgctctcaagcaggcaaaagagagaagagcacttccagcaaaagggacatgcatttatgctatgtccaaaggcatttcttgtgctccgaggtctctgtagtattcacacaagtgttgaccgtgcctgttgaatcagtgacctctagagttgaagcccaccttccacttggctatataatccaggacaggtcatgaaacctcttgatccgtggcatctacagttgtcaggggtgggagagggatagtgacaccatccctccctcaagcttgagataaggttttgattccagaactgggcagcataataccttgccatagggagtgctggattaatgttagcccctgatatgatttggcagtgtgtgcacccaaatcttatcttgaattgtagttcccataattcccatgtgttttaagagggatccggtgggaggtaatttaatcaaggggattgttacccttgtgccattctcatgatactgagagagttctcatgagatctgatgattttataagcggctttccccactttttctcagcacttcttcttgctgctggcatgtgaataaggacatgtttgtttccccttccaccatgattgtaagttatctgaggcctcccagaccagcagaactgtgaatcaattaacctctttcctttataaattacccagtctcatatatttcttcatagcatcatgagaatggactaatacagccccctcctttttcttgcatcccctccagctccatccttcccctggtggtctcccagagtgtcaacctcaggagaacttagttggaaccaaaagcttccacctcccagcctccttaaacctcacctttctcctctacatcagtcccaaactagaggctgagctacttgctaagggtcatacacttttcatccacactcccatctccattctcccaccagttcctgttcacaaccaagtccccttctcctttcccagtcttcctcttgcatgctccactagctagcagaagtttgaggaagtatttatgtgcaatgtacaaagtgagttccagttccctgacggccagctttatttttagcagccctccaggctcctgcatgtctctttcgagctccttggcttcccggtcttttcagcaggagcagagatgtgcctggatacaaataagatacacactctgagtcttttttacctaaatatttgcagctcccaaccagcaagtctaatagtccagccttctctctgtgaacctattttgtcttccccactcctcaactgcttgtttttccagtttttggattactgccaggagcaatcatttccctttccccacaaaggagcagagagatgcttccctttccaaatacagagacactggagcaggaggggctgcagaaccatatttggcaatggatctcggctacgctcctgcaggacaaggaaaatccaagagaggagacccaaaaataataataataaataaataacaacaacaacaacaaaaaaacctcacacaggagaaaaggtttaaggctttaaggacaaacatgttgcttagaacctaggggttgggccttataagtccccttaaccccagccaggtagctgaaaactgacatggctaagcccaaaacacaatagacacagctctgctgtccccactgtgtatgtgagggtcagtccactggggctgtaggtaagcccgtggctctggagtacctgccagacttgtgcccttaaccttcattcaaggtacacaacctgtctgagcctgttttctcatctgcaaaatgagataattaatgatgccttccttgcaggtttcctgtgagcattcaatatgatgattacagaaggtacttatcactgagcactgctccatccactgccagcgcttagtaaggggttgttgttatgattttcattttttacattcatttgctacaaaaaccctggaaactcttcccaagaaatgggaactcctgaataggatgattggcttctccttttttttttcttggcagccccagaacttagcatagcatagtatcgtacactcaatgttggctgaagatgaaaaggcagaagataccattcctagttcatagatcaggtctaaggaataagggaaccccagtttgtatgcctccagcccctgtcttttcactaagccatgcttatcctgagctgtctcacttacaaaaatgatttgtagagacaggtaaagttataacaggtgtttgtctgagggatcaagagggctgggggtgcttccatttcagaccagaaacaggcaggtgccagctggtgatttcttgtcctacacaggtgttctgcattgccagttctaccccttggaatgtctcagctggacattcacctactcattcattcactcgttctttcactcattcattcatcaaggagtgattgcaaacctgggagcagaggagacaaaaggcaatgagacatgggctgtaccttcttgaagctcacagtctaccaacagacacagcctgtaaataagcaattgctgcatacagagatgaaggttttaaagaaggtttgcttgtggtccaactagagatggtggagtaagaggtcagaactactttgggggcaagaacaggggtcggtgaggactttatccagaagtaaaggctggagctggctgggacctcattgagtgaacaggatgaagaagacattaccagctgagaaaacagacaaaggcacagaggcatggctgagaagaaagcattaagaagaccacaaacagccaggtgtgatggtgcatgtctgtagtcccagctactcaggaagctgaggccagaggattacttgagcccaggagttttaggctacagtgagcaacaattacaccactgcactccagcctgagcaacagggcaagactctgtctcaaaaaacaaataaacaaacaaaagaaacaaacaactgggaatgccatacacctgggaagagttaggagcaatgcagctggagaaggcagcagaaacaggctgagcaagcctcatgggctttatcctgaaggcagctgtggaccactgaagattttcaggcagggaaatgatacgacagatttgcattttaggaacaaggtgagcctttctgatccatgtatgaactcatcaggcccacttaagtgaagctgtgctctatgtttttcttctgactctcagcagcatttgtcactggaggccatctccctttctttgtattcggggatggagcgcgagcttgattctcctcccacctctcagatcgtgtcttctcagcaagttcctgtttcaccaggaatttccaaacatgcatgtctcccagtttttctgccaaaaactaacggccttcattttctctctgctctgtctcttgggaatctcaaccacacctgcagcttcaacattttttttttttttttttttttttttttttttttttttgagatggagtctcgctctgtcgcccagtctggagtgcagtggcatgatctcggctcactgcaagctccgtctcccggattcacaccattctcctgcctcagcctcccgagcagctggaactacaggcgcccgccaccaagcccggctaatttttttgtatttttagtagagacggggtttcaccgtgttaaccaggatggtctccatctcctgacctcgtgatccgcctgcctcggcctcccaaagtgctgggattacaggcgtgagccaccgcgcccagccgcttcaacattttaaagtactttgaaggtgagtcctcaacccaaatttccaacagggttgtatgtatgatagggagtcccacaatgctgctaaattgcctaaacattactggctaacattataaagtctttccagcagagcatatttgtagccatatgtgagagtttagctaaatcctgttttatgttaagattgtcacaaatgtattaaagtattaaagaggtaaaaagtagcgtggaggccgggcgcggtggctcacacctgtaatcccagaactttgggaggccgagacaggcagatcacaaggtcaggagttcgagaccagcctggacaatatggtgaaaccatgtctctactaaaaatacaaaaattagctgggcgtggtggcacatgcctgtaatcccagctactcgggaggctgaagcaggagaatcacttgaacctgggaggtggaggttaaagtgagccaagattgtgccattgcactccagcctgggtgacagagtaagactcagtctcaaaaaaaaaaaaaaaaaaaaagtagtgtggatactgttatactcatcaaatagattcttagccctcttcagcaagtatttactgaaaacgtactcaatatacaaccctgtgctgggcactatggaatatacaaaggcaacctttcacactctccttttcctcaatgtgttttgacaccagtgagaacagcaaggggcaataggacattgtgacccagagcacaaactttgggcttgacaaacttaggtttgcattcttgctcctcacaagcataatcttgggaaaagttattccatttcttttaagttcagtttcttcatctgtaaaatggggaacatagtacgtccctcatagactggtttcaaggatttcattcaatcaaaacttaaaacataatgcctgggatgttgcaaggactcaattcatgtggttgaaaaatattcagccactgtgaaaaagtttggcagttcctcattagaagttatcatgtgatccagtaagttcatccctaagtatatacccaaggtaaataaaaacatttgtgcacacaaaaccttgtatgatagtgttcatagcagcattattcacagcagtcaaaaggtgacccaactgtccatcaacagatgaaaaattgtggtgtacacacatggtagaatattcagcaagaaaaaggaatgaagtcctgatatatgtcacaacatggagggatcccaggaacatgatgttaagctgaagaaaccaatcacagaggattacatattgtattttttcatttttataaaatgtccagatggcaaatccagactggggagaacaccacagggaatgggagaaggagactagaaggcactgcttaatggggacaggatctcctttggggtaatgaaaatgttctagatagaagtggtagttgcacaacattgtgggtgtactaaatgccatgaattattcgttttaaaatggttgattttatgtcatgtaaatttaatctcaatttttaaaaaatgaatcttttttggcactgaatgaatgaaagcacatcatgcttttcctggtcctaggctggtcctggcttttatgttggcttgaaattttgtgcattgattctgtgtcctgaaacttcactgaagtttaaaaaccatgggggcaaggcaggacccctgagctcctctgtagtcctcaggttctagcagaaattcagtagacagttcttgcctttatggagcttatagatggtaggagtgttcctaagctctgaagataagttaacaccttgtacccacaatctgcaacctctgtgcaaaacattgtaaagctctgagtctcagtttcttcctcaatgaaatagaagtagtaataatgccagcctcagagttgaggtgaggattaaagagggatgaattagtttcctagagttgccaccacaaatttccagcaagtaggtggcttacagcaacagaaatgtattctctcatagttctggaggctaaacacctgaaatcaaagtaatagcacggtcatgctttctttagaagctctaggagagaatccttcctggcctcttccagcttctagtgactccaggcattctttggcttatggctgcaatctttgctctaactgcacaaggcctctcctcttctctctctatctcaaatctccttctacccgtctctttcacccaggctggtctacctgtctcttaataagcacatttatcattggatgtaaggcctagccagataatctaggataatcttatctaaagatttttaccttaattacatctgcaaagatcctatttctaaattaggtcacatttactctttcaggaattagtacataaacatatctcttgatgggggcggggagctaccattcaattcaacccactgttgaagagataatcctggtaagtgcttttctggcacttagtgaatgtcagatatgttcttatgatcatcgtcatcattgtcttctttattattctgtggccatatccctgtatgtctctaggacagagtctaactgaaatcttcatctcactggggctcctcccaggccacagccttccatccttttttaggatgctggagccttttctcgtctctcccattccctcgaccccggtccaaattcaattctcactgggattatgcagctcttctccctcaacactaccaaccacctgaagccccccatttctgcgcccacccactattctgagattctgggatcttaatcctgtttgatctgttggactatatgcactggactcttcaggtgcccctacagagctgaccctccgcagcccagtggctctctccaactcattccttttatttgggtcttgctccctcttggttgaagccgagggaacaacacacattcatcctcaactagggagctgataaaaagcaaagacagggctgggcgcagtggctcacgcctgtaatcctggcactgtgggaggctgagatgggcagatcatgaggtcaagagacctagaccatcctggccaacatggtgaatccccatctctactaaaaatacaaaaattagccaggcatggtggcacgtgcctgtagtcccagctactctggaggctgaggcaggagaatcgcttgaacccaggaggtggaggttgcagtgagccaggatcataccaacgcactccagactgggcaacagagcaaaactccatctcaaaaaaaaaaaaaaaaaaaaaaaaaaaaaaaaaaaagccaggcatggtggcttatgcctgtaatcctagcactttgagaagccaaggctggaggatcactgaagaccagccttggcaacatagtgagatcccacctctacaaaagaagtaaaaactagccatgtgtggtgctgtgcatctcttgtcccagcttttgggaggcagaggcagaagtatagcttgagcccaggagttcaagcctgcagtgagctattattgagccactgaactccagcctggatggcagagcgagaccaaaaaaaaaaaaaaaaaacaatcaaaggcccaggctacatttccaaatccagttaaatcagaatttctggggattgggacccagggatttagatagatagatagatagatagatagatagatagatattttatatcaaaatatggggtgggtaggctctaaataattattatatatatttttatatattgtggtggcaactctaggaaatgaattcatccctctttaatcctcatctcaactctgtttccaatgggcagccaagataaagaatgcctaccctggggcataagcacccaagaatggcattgctccatttctaagcactggaaattttcaagatgtataaaatgtagctattgcttactaaacagttctggagcagaaagagttttatgggggaaagcctgggtcttggtgataggcttggaatcaaatcttgccacttattaagctgtgtggccctgaccacgttccttaatccttctgaagctctgtgttcctgtgcttagaatggagttaataatacttatctcacagaactggtgtgcagaagtcatgaatattaacatctagcagtctctgcaccataataaggaagactcaaattccttctccttcccctcctcccagaagttacaaaaagtttaaatcaaattgcagacaccaaaagtgtaccttctaccaaaggtttgttggtcccaggaaagggttaattgtttagtttagagtcttagatatgtgttcgctagattagaggcaattccagaaatccactcccagatgattaaattagggtgaggaaaaacggtgaggccgatttggctgtggcttcgggctacttgatggtaatttgactaggttaacacaaactgcagcacacagagatttggcaggctacaaaagctggtagacgtgaaagttctggtgagctttttggcagaatcctccctgttttccctgatcaaaggagaaaaccagaaggccatgtgtccaagctgcttgatcttcctgagcagccttaaagttcctgttcctgaccagccaatgttttctctgttgtccctataaaatcaaaagcagactcccctgtgacaccggaagccagaacccaacagactggaagtgaagaattcagattttacaaatgctcccagcattgtctctgcattttgccttttgcaggaacaccctgtggtattcttcttccaaactcaaacacatatgcctttcccttacattttccatctttttacccttccattagcagtttgcaaacactgctattgcaattctcctccccgatgtattattccattctcacgttgttataaagaactgcccaagactgggcaatttataaaagaaagagatttaattgacacggtttcacagaactggggaggcctcaggaaacttacaatggtggcagaaggggaagcaaacacattcttctttacgtgatgtcaggagagagaaatgccaagcaaagggggaaaagccccttataaaaccatcagatctcgtgagaattcactcactatcatgagaacagcagcatgggggtaactgtccccaagattcaattacctcccactgaatccctcctatgacacttgaggattatgggaactacaattcaagatgacatttggttggggacacagccaaaccatatcacatgagctaataaagacagagtcatctataatgtctctcacacatcttttcctcatctctttgtccctggttcccagcagaatgtctggtactttcatccatttattcattcagtcaatatttatggcgtatctgttgttttccaggcacggtactttaccccttgtgcatacttagtgcctgccacatagaagataatccactgaataattgttgaagtaaattaagcttatttagagcccacccaccctaatgaactgggttgtagataatacgttagcaaaattccagtgggccatgcattctcagatatcctgagcaaaatgtatcatctcatatggaagctcatatcactacctcaaatcctcaccatgaaagcaattttagagttcacttagaccactggatcccaaatgtggatccctaggtgattctgatgccagagttgaaaccagtccaacctcccaaccaaaaatcatctccttgctacagcttctccaatgcaattggatagtaggttccaatgcccttcacataatacccagccaccttaccaggaccaacaaggacccgtaggatctggtccctacctgctctcattgcctagtgctctgtccctctgctcactacaccagccacactgagcttctctctgctcctgagtgcaccaagctacttccaacctccaggcctttgtcctttctggtccttctgatcactcaggtcacacctcagaggttattgtctcagaaataccttctctagccacccagtaaagcacaatctattacacacacacgcacataaaacacacacacacacacacacacaatacagtcattcttttacattcccttttattgggacaatggcacccatcactagctacaattacctttgtatctgtctgttcacttatttattgtctgtctccactactaggatggaaatttcatgaaggcagagatcttggccgggtgcagtggctcacacctgtaatcccggcatcttgtgagtccgaggcaggaggatcacgaggtcaggagttcaagaccagcctggccaagatggtgaaaccctgactctactaaaaatccaaaaattagccaggcgtggtggtggctgcctgtaagcccagctactctggaggctgaggcagagaattgcttgaatctgggaggcagaggttgcagtgagccaaaattgcaccactgcactccagcctgggcaacagagtgagactccgtctcaaaaaaaaaaaaaaaaaaaaagaaagaaagaaaacaagcagagatctttcatgtctttttcactactgcatctatgtctagtacatagtaaatgtttcatgagcactagttaaattaatgaatctgtcagcaaatcattcattgtactaaggaaggtgaaccttctacatctgctgcatgcccctagtgatggagggaggcatctcacccccgttcaaggccactctattccactgtgggccagttgagattattagagaatttttcccagtgccaagctgtcacctgcctccctcttgcctcctgccactggctctgctttaattccctgtagctgcccccaacaagcctggtcctcctgcatatgacagtccttcaaatatttgaagactgttaagtttcctctctgccttctattgtcccagtgaatggcttcctggagatgttgtcaagaaacaaggctgtgtttacatttaatgactgtgcccataaaacacttcagcttcctgaatctgtaaacggcctgtgtttttattttccaggacagctgccgacacactgccagggtggggcttgcacttgcattttccccatctccgagctgtccctgggaagagtccaagggttgtctttacaggccgtgagaaatatgcatctggaaatatcaatttctaagaaaggtacttgtgagctccttagaagaaaaaagtaaaaaaggtgtgggagaagaaggaagtccctacagcagctccctgcaggaagggggtaataaaagaagcatagaataggtcttccttaaaattttatctttgtctcctccacctgctttccccaatcaccctttccaaaatagcacatacgtcccgccaccaccacattgtcgggcactttttatccagtttccaaggcttcattttctttacggctcatgctatttgtctacttatttgtctccttgttatcaacttgtaactcatatgtttattttgtttccccaagtagaatgtaagctccctaaggacagggagctgtctgtcttacatggtatctatcctcagtaggaatatcttgcctggagcaatgttggtacttaataaacaatgaaaggatggatgaaagaatgaatgaatgattgtaagatctcaggcaggtcacctgacctctgtgaacctcagtttcctcttctttagaatgggatagtggggaggagataatctcatcactaggttgttgtatggatcaaatctgaggatacctggggaaatgtttcaccagctgtaactctgtcaaatattcctggtcattgtgtcacacactgacatagggctggacttataagcaggaaaagctaatactatcccttcagtgtgacttcaggggcccaaatgacccctcggaaggtctcccttattgtttaaccatctgaaaattccatcattaggcattcctttcagtaaaggcatcatgttcccactagaacagaaatgctttcctcagtttgaagatgggagggcagagataatggagaagagatagctcactttctcgtcatctcagctactctcctttcagcccccgagtcttgctaacttttccaacacttcagatgcatgatcctggattacttttactgccaacaatttttgaaacagagggatggacttcactatcatccacctatctttccagcctggcttaggacttcggagacattttccatctggctctcagtcatgtcccaacacacattccatagcaggggaacttcaatgtgcaagtgtttcctgtcctggtcttgccaaaagaaaactggactccgaagatgagactcaaggcaaggctttggcccagacagtcccagtaggattatcactgtctggaagcagaggtggggtatcctccatgcctttaggagtggcggcaagaagtaaacgtagaagaaacattataccaactcctcacggcaatgcctaccctctggccaacgcttccacctacttactcttcctgataccctcccttcctctatcacattccaaccttgatgcagttcatcccccaaaactcattcacttatttaacaggcaggggttcagctcctgctctgaactggaagcatatgtaatcattgtcctgaaaggcctcagcatcaagtgcgagaaacaaaagaaatgaaagggtgctgcacagtgttagaggcatctgtaaccagggtgttaaggtactcagaggaggaaaatagaggaaggtcttttaataagatttaggaatgtctgggaatgcttttgagaggagggggtaaagtgagttttaaagaacaagtgtaaattaacccagaacaaaagggaggaagggcattgaaacttggagaatagaatatgcaaaataagagtagagcatcttcaaggaagttcaaggaggttgctttggctggaggggagaatgagtgagccaaaaagggcctagagaagcaaaaagggtcagttgatgacagcctagtagagtaggctaaggggttttggcttatatgatagaatgtcatatcccttttatcataaagagagagccactgaaggaatttagaagtgatcaaaattgcacttaggttaattactgcagctatagtctggaggacacattctgaggaaaaggttcaatagaagagtgaagaacaggctaggcacagtggctcacacctgtaatcccagcactttgggagaccgaagagggcagatcacgagatcaggagttcaagaccagcctgaccaacatagtgaaaccccatctctactaaaaatacaaaaaattagctgggcatgttggcaggcacctgtaatcccagctactcagggggctgaggcaggagaatcacttgaaccagggaggctgatgttgcagtgagtggagatggggccactgcactctagcctgggtgacagtgtgagactccatctcaaaaaaaaaaaaaaaaagaagagtgaacaacaaataaaaagctatggtaaaattctcctaaatggtggtgactcccgaaataaagcagtggcagttaaggggatgggagggcgctcagtttggggcatgttgagtccaagggttttagaggcagatggacctggatctttactttggcagtgcctttgcttaatgatgtggccatgcaaggcaacaatctttcaacccagtcacttgttctggaaagaaaggatagtaagttccaccttgccaggttgtaagaatctgagctacaaatatcaaatgtacagtacagagccagactcacagtaggtcctcaatgatgatagcctttatgtatatcacaattcctgagggagagaggaccatgatgctgcatctgccaaccatctgcatcaccaatgccgagtacagcggttatagactatccaacgttgtgtaagactcagaacatcatatctccttctaaactggtatagacaaacttacaaataaagtcacattgtcttaataagaaaaaccaacaggagcctgaatgaccgtcagcccacaggtatttgggggatgccttctgcatgcctagcattgcactaaaaactaggatagcccaaagaggtacccagtgaaacactgaaggtaacacttgacctcaagaagtttcccctctggctgggaaaataaattagaaatgcctgaaaccgttgaagaacaatacctcttttcaagtcttatcttagtggctttctttacaactttgtccctagtaaccttacccttcttcctgaaactcacctcgcctttaatttccagggccctactctcaacactgatggatttttttttttttcattctctcttcttggttcttcttccatctctctttagttgttggcgacctccagagttccttggtactcttgtcttactgcacatagctccctgagccacacacccagatccatggcttcagctacccagacctctgtactgagctcagtgctaacctgctacactaccttccaggtaacagctcctgggtacccccacacacaggccagacataacatcttcaatgcagaacccattgttttcccttcaaacctattcctccttcaggccgtacctgagttaatgatattactatccaattagctgcccaagttctgtttgctaagtgattgtaacacagtgattaaaagcacaagtgctagaactgagctgtctgttttcagattccagttcttctcatttaccccgtgacctgctggttattaaatatctctgtgcttcactttcctcacctataaaacaagtacttcaatagtgcctactgtattgagttgttgtaaagatagaataagttaatatttatataaagtgcatcaaacagtgtctggcacatcataagtaatataaagggttttattattattattttcgatttctcctactccctcaaacctctgcaaatggtttgccctcaccttcagtaaattcgtcctatcaggaatctcacttctccatcccaattgctgctgcctgtgttcaggccttcatgatctatgacagacattttcaaagccacatctacccagttcatgtccccagagttgaggccctggtgacttccaggtgatgctcacatatctaatgccaagacttagctctcagattctgtggttccagaaccctggtgtccactccagggcagcatgagttcatgtagagtcagcgaagtttccccctccacactcacactccccacccacaaaattccactatctcttcagcattcctcctactttgcattcctttcttcagtccttacttatttcctggtcccttttagtccacagacaggtaggaagccacaagcagcctggccttttgactctccacttgttctcccctagggtccctccttctggattgataagggtgggaacattcaagctaccgataagacctctgcacccagctcctgtccctccactccctacggctcagctttgaagttccaaaaaccctgcctctgtgacctgattgtgttatcttcataaccaaggtgagaaaacagagaatcactttatggtttcctgtaagcagccttctccaaagccatgatttcctataatgggggtggaagaagatctggggtttctcagaaattacagcactatctggcacagggtaggtgctctaggagctgttagagcagtggttctcaaccagaggcgatcttgctccccaggtgacatttggcaaattctggagacatttctgattattacaacttgggggatgagtgctgaaggcatccagtggatagtggccagggatgttcccaagtgtcctgcaatgcatagaacagtctagcaagcaaagaattatctggctcaacacatcaatagtactgaggttcagaaacgctggtttagaaaatggagagaagaggaatggaaagagagaaagatacttccatgaatataaagagtgaggcaccatggcatttttgctctgctgctcttttaatcttcacgtatccacacttcaaagagatgtcaaaaatccgtcatggttctaaacagtatacaggaaaagtaagatctatttgtctccttgttttacatgagctgacaaactcacttgagagagggcacaaattcatggttcatggtgcccagagaccttataggtcctggctgggtagctaagcagctggcatgttagggcaagttgcctcagtgggcttatctacaaagtgggcagaggggcttagggttcccttgggaacagtgaattctctgataccttagaaaaggaagggctgacatcagcaagagctggaggacctcagggaggagggcaggtgggctggattgtgcactggccttggaaagaagagatatctgagcccaggacagcaaggggtgaacagaattcaataaatcgaggtgggaaagagggttttaagagaaccacacaagcaaagccttgaagtagagataaaatgtgtgtctgacccattgtagttgctcataaatgccggctccttcacccttaagaaaactgaggtgagcagatgaagcttactctactgggacccaaccctagttagaccacctgacagcgtccttagttacggaaaccttagggccttcagtgatacttcagaaggggagaactgggagaaagcaccagaaccatctacttgagtgattcaacacattttctggtaggaaaacccctttccaggataatttcctcaaaattatactgttttttaataggatcagtttattgggaaaacacataatggcaataatttaagaagctctataaagtgtaagtgaatgtgttttagtcttctcaaatggtgtttatgtacttttttttcttttaatagacatttttagagcagttttaggttcatagcaaaattgggctgaaagtacagagatttcccgtatacccccagcccccacaaattcccagcttcccccattatcagcatcccccagcagattgtttcatgtgttacaattgaacctacattgacacatcattatcacccagagcccattatcaccgagaacccattagggttcactcttggtattgtacattttatgggtttggacaaatgtatattgacatgtatccatcattatagtatcctacagagaagtttcactgccctaaacatcttctgtcctctacctccctccctcctgacccctgcacaccattgattttttactgtctccataagttttgccttttccagaatgtcatatgtttggaatcatatagtttgtagacttttcagattggattgtttcacttggtaatatgcactgaaggttcttccatgactttttatggtttgtagctcatttatgtttagtgctgaataatattgcattttctggatggaccacagtttatgtatccattcacctacttaaggacatcttccaagttttggaaattgtgaataaagctgctataaacatctgtgttcaagtttttgtgtggatgtaagttttcatctatatgctgagaaatggccatggacatgggaggcaacgtgtgttgtggtctctggacaatgttcagaagagaaacagatggattagtttcctggagagattctgcaggctccttggactcttggctcttaaaaagtgatagctagagaaacacatcatgtagcagatcatgcaaaccaagcttcaagagggaagatgacttctcaaacacccagagttctttactgacagattcaagatgatagccctgggtccccacctgcctgctggcttctacctctgctgctttcagataccgttatctaaatctcaatgtccttctctagattaggggcacgtcacatccacccagaagtacccatcagtacgactgtttctatgtcatactattcagtggagttgaagaagagtcacacaacttttccaaacagttaagtcccagaaggactttgctagacctgaggcagtgaagcatgatgacacagaccctgaagtcagattcaatcctttgcttaacaaatattttggaatgtctacttatgccagacatcattctaggagcagggttacaggagtgagtagggtgacttatgacccctgatctcctggctgccacttactggtcaagtggccttgaaatatcattcaacgtctctgagtgttagtttcttcatttgcaaaatgagatttttattttaaaaactaccctaaaacagaactgagacaacatctgcacatctctcagtcggctgcctgggacatggtgagcatgcagtacaagttacctactgatgtcgccaggctaaggcagagccctggggctgtccagatagagatttatgttaaaactctgggacaagtggatcttttgcctgacctctaccattaaatgacaacaagattgaaagcaggtgccttttctccatgtaggtgcttatccaccagtacatgcccttccttctcccaacctctatgcaatggcctcaaggaaaaaatcaaaataaacctttttcctagaagccagctgacccttcctttgtttattaaatattccttaattgtgagtgccacctgtccattggaactccacttgtctctaacatggttacagtggtcaggacacctgagcctccttaactgcagctcagagtccttgactccttctaggtcaacctctcagcttcaacatttacaggcagacctacaaagggactaagatttagcctgaagctgctacacctttgacctttgcaattgtttgcgtttcaaattcagttttccaagacattggaaaaaaacacaaaaaaaccctccttctattaattgagcagtgggtctcccaaggcctaggctaatggagcactcaatagcttcttcatcagatgaagtctgcccccctttctgcttgagattcttgtacccatagagaagtcttgttttgtgtattctaagtggttatgaaggtcatgaagaatcaatgaggccttcataaagcctctgggcttcctttgtcatggtaccaaggtcccctgaaattattggcttgactttcacctgaagattttcagcaatagtctggccaaaggcttaaggcatagctaacacctggtcaatggtccttagaaagccactgaagaggccctactaggtggtcttaagagggcaagcatcttaatggcagctgacagtttggttctgtgcaaaatgaggtcacagaccccaggagaacaagaacaaatctctgtgttcagagaaggttgaaggacactctcagcacatgtgaagaggaaagtttaaggaggacagtgagttgaagctttggagataagtatggaattacagaagttcacggcttcctaaccccgggagaggaaagatagaagccagaaaatgctccagggaagttattaacaaacccagtcttcaagagtctagtggccttcattgtctttgaagtttctccttcacctacagggtcaggtccaaattcttcagcctggcttttgaaatctttcagagtctgaccccaatgtagggaacaacttctgatggcaaaagtttaggaacaagattatagcacccaaagtggggaagccaagtttgaagtaaaaccttcatattttacagttctgaatgttcaggtaagttacaaattgcaaccttataagatgggtcttataattatttgttagagaaagaaacagaggcccagagagattaactggattttaggactcatgtgatagaaaaaggcagaactggggctagagcaagagtctgcttcctgaatcttggttgaagcatgggctcctggtattatgccacccctgcctcttccatccttaggacattctagagacacactctgcaaggctcctttaatcactttatacacttttgaaagtttctgctaattaaagtcttgagcttcccttattctatgctgagatgctgtgtccctctttgcattcatctgctgtccatgtttgactcattaaatattcatcggacagagtatgcaggagaatgatcttcctcagatcatcttccctttctgtcctctcctgagagaattttcacttattctgtcaattttactttgtattgtcttttccctaaccataaaccaaacttcagcttacaaaagcctactaaacaaggctcagaggggatgttacacacacacagcatatatatatacgtacatatatgtatatacacatacatacatacagagcgagagagggcaaatcccaaagtcagagtgcatatgtcatcaactgtaaatcataagcccgaccccctgacttcctgacttgaaagtcaactccaacacacatgagaaggagccttccatagtcaacagactgggaaagttgggaagcaattctctttctccattcttcaaaacagcctggaggtggggggtaaatatttgggaaggaatgagggaaaaatgcaataatgatagaaacaaacttaggtgtttttcttttcatcctcaaagacatctcagtttgggtgatcatacctagctgcttaacaaacacttcccaaatctcagtggctcagcacaatagaagtttatttttttctccaataaaacaatgcaaggggcagggcgtggtggctcaagcctgtaatcccaacactttgggaggccaagataggcagatcacaatgtcaggagatcgagaccctcctggccaacatggtgaaaccccatctctactaaaaatacaaaaattagctgggcgtggaggtgcgtgcctgtaatcccaggtactcagcaagctgaggcaggagaatggcttgaaccagggagctggaggttgcagttagctgagatagtgccactgcattccagcctggtgacagagcacctcaaaaaaaaaaaaaagaaaaatgcaaggattcattgggcagctatctgtactgtatgtgatctgtgtgtgattcaggggcccaggctaaattatttccaccttagggctctataaccgtcatccttcacaaggatctttgaaccctctgcactcagactgcagatggtgacaaagagaatgaagaggattgcctggagggtttttctgggctaggcctgtgattccattgtgcttacattccattggccagaaacaggcacctggccacacctaattgcctggagactcggacaggaaacctagctgtgtgcatttttatgagcacattgcaggttctgctacaacagtctgttccacatggggtccttgagtttcagagaggttcaggagagcctgccaaacacactgagcagccttgaggggaggccaggctggcccccccaggcttccaaagagtagatcgacatcaaggttggatttcatatgcccggaacaagagcaatttaggccccaggagccagaggaaaagccaagccaaaggctactggatagagaaaactgaaatttgaatcccaaaaagaccagcgaggccagaggcagaaatcaaagttgagttgcaaagccagaaagtttttaaaaaaaaagaaaaaaagaagtgaagaattggatgaataaaataagagcagttcaagaggggctatgggaaagggtctaagaaaaattggcccagaccctagagggagtacctgggtcatcattagagattagtgggtgtgtagtatgtctgtggattggcttggcttaaagaggcaggagcaagaactttccagaagagtgagaaggaaaactcatagttgaccgttatagattgaattgtgtcccctcaaagtgtatatgctgaagtcttaacccccagtactccagaacgtgaacttacctggaaataagcatattgcagatataattagttaatctaagatgaggtcatactggagtaaaatagacccctaattcaacatgactggtgtctttacaaaagaggaaatttggacacagacacgcacacagaaagaccagcttataaagatgaaggcagaggttggggtgacgagtctacaagccacagcatgccagtgactgccagcaaaccagcagaagctaggcagagggcatggaataggttcatcctcaattttagagggagcatagccattcaacatcttgctcttggacttctgtcctccagaatgggaagaaaataaatctctcttgtccaagccaccgagtttgcagtactttattctactagccctagcaaacaaatactctatgatgctatagaggcagcatcaaggggaatattgcatcaagggacaatgggagcacagtgatgttgctttctgttcacaccccatgaatccagcttgttcagcaccctggatatcaaaaaatgatatatttattaaatttataatctgggcctttgagtgagtgaaaggacacgtaacaaatataaaagaagggctaagtgctagaagaaaacctaggcaataccattcaggacataggcatgggcaaagacttcatgactaaaacaccaaaagcaatttcaacaaaagccaaaattgacaaatgagatctaattaaactaaagagcttctgcacagcaaataaactaccatcagagtgaacaggcaacctacagaacaggagaaaatttttacaatctacccatctgacaaagggctaatatccagaatctacaaagaacttacacaaattaacaagaaaaaaaaaaaactccatcaaaaagtgggcaaaggatatgaacagacacttctcaaaagaagacatttatgcagccaatagacatatgaaaaaatgttcttcatcactggtcatcagagaaatgcaaatcaaaaccacaatgagataccatctcatgccagttagaatggcaatcattaaaaagtcaggaaacaacagatgctggagatgatgtggagaaataggaatgcttttacactgttggtgggagtgaaaactagttcaaccattgttgaagacagtgtggtgattcctcaaggatctagaactagaaataccatttgacccagcgatcccattactgggtatatacccaaaggattataaatcatgctactataaagacacatgcacacgtgtttttattgcagcactattcacaatagcaaagacttggaaccaacccaaatgtccatcaatgatagactggcttaagaaaatgtggcacatgtacagtgatagactggattaagaaaatgtggcacatatacaccatagaatactatgcagccataaaaaggatgagttcatgtcctttgcaggggcatggatgaagcatcattctaagcaaacaatcacaaggacagaaaaccaaacaccgcatgtcctcactcataggtgggagttgaacaacgagaacacatggacacagggcggtggggggctgggggaggaatagcattaggagaaatgccaaatgtaaatgaccagttgatgggtgcagcaaacaaacatggcacatgtatacctatgtaacaaatctgcatgttctgcacatttaccctagaatttaaagtataattttaaaaaaacaaaaaaaagaagggctgggtgaatgttatggtagttccaaggagagaaggttggatgtgatcagggatggaggaaatgaaaattagcctggaccttggaagctgagttcatcttaggaatgaagagaatagaaagataaaattttaggtggcagaaatagtgctgctcaagcacccccatggtgctatgcagtaccccctcactcatggaacatttccctcctagatctcacttgtaactaaagccagagtgttgaacaagctgggctcgtggggtgtgagaagaaagcaacatcactgtgctcccattatccctttaaaatgtattcaattgggaaaggtcatcctctggcctcaaatgaaaacttgtacaatccagtgaattttctactcactggtaattaataaaagtcagtgttcctttatatcatgaagtatcctgcattcagatattggaatgcttcttcatacaataatctgcaatccaaacttgattccaaggtcaatcttctcctgttccctgggtaaggcccatgctagctgagaagcctggagctcagacttctccttcattgagttactaagtggtttctgccactatggagttggagaagggtagaaattaaggcaaggggcacatgaaaatatttgcttgcctggtattcttgtaagctggctctatattctttgagcacagcagatattcaaaaatgcctctttaagagacatttttgtgggttctttgggggtccctccaaaattgctctgacctacagctcccttgatgcagagggtgcacacttctgtttcggctgatggtttattccttccacatctcccaggaatgtggccatagctccagctgagatctgggctccactctaggcaactgtacggaacggacagactacaatcccactctgactctcttgcatatagaacatggaaagagtgttctatttttatccctgaaaagctctcagaggacaagctgcacagtgtagccatctctcctttggatcttgcaacagcagctgaccaggacatctcttgtccctcaaatgtctcgggtgggagtcaggcttaagtccactgcaacctgcaacttcaagagatacacactctgctctctgagtggtcttgctgaaacccttctaggtagactccaatgagggacatgttccctgcccctacccactgagctcagtggagaagcaacctctaccaggaagtcctctttcttctaaatcatcttgcctcctgacactttcctatcctggtgtaggtgaggcacttaagagggagctaactactcttgaccactgacttttcacaagttcttctgggtggtcaatctcacaacacattttggtgtgtgataatctgttgtcataggatctcagccaaaacatccatgttaacttcctttcatataattctttactactctgcaactttcccaagagtgaaatccctgtttttttttgttttttttcacgttaatagcccagcctcagatacagtattcaagagtcattgcttgaatgaatgaataaactaatagatactgtaggattatataaagcagggtcctcaaaattaaagatatcagcttgactgaagaagagagtttgtttagggaaggatcaagatctaaataggaaggaagggcttagataattgaggcagaaaaaaactttatggaccatgaagcatagtggaaaaaaagataggtttcagggacagatggatccaggtgaacactcagctctgccattaaagttgactctggaccaggagcaaggttcttaacctctctggcactcagcattctcactgtaaaataaatatcatcaatgctatctcataagattgatataaagtttaattgagacagtgtatgtaaaacacctggaatagggcttatcacacagtgggtggctgacagagggtaataatgactttaaatcatatttgagtacatcttgtgggtcagggactgtgttaaatgctttatttaattattttatttaatttttacaccaagccaatgagacagggagcaagttagcctgattttagcacaaagaattaaagttaaatgccatgctcaaagtcacagagctggtgacaggcaaacctgggatctggactcatatctctcttcctacagagcctgctgtatgttaccctgacatctcatgcatctttaatgaaggatcattgtgtagctggcattaagagactctaggaaagaaatggtagcagatatcaaggagcaacatgcttcagtctcacgctaaaagcaattataattttcttttcttaattaaaatcaaatctgtgatttgaagaataaaatatttgctggaaatttctcaggaaataaaacatgttagtatgattggagtacacactgtggatcgtgacccacagtgagggtcagctgacagaatgtgtgaaaacgcttggaaacctataaagttcttcaataaaggatggcagtaggttttcagaggacttgggagagcatgattactctcttgaaggcttgaatccatctctccccaccaaggtcttcctcccactaaaagaacaagaatgatgcagagacaatgaagagtcaagagaggtgagaatactgtgggaatgcacctcaccaactttgaaaggcccaaatcccaaaggaatgaccatcactcttggaaagacagagaaggcctggggtagactttagggtgattcggggcttgttttatctgacactgggaccaaagcaaatgtgacctgaatattcaaccctaagaagattccaggacacattattaacaagtagattgtgtacacctaggaatataaatggtgagtatcaagccatccaggtcaaattcatgaggtctgatggataggcaaatgcagggctgggacacctttggggcagcctagaaggagagtttcccaaggtcctgtggagccagtggggcaggggaacacctcaaatacctccactggagcctcggagctttaaatagacccatatcctacttcagtaagaacaaagacaataacagcaataatatctgctgtgtaggtgcactcagtgtgccaggcactgtgcagagcattttctacacatgacccaacttaacccctaacacaaccctgtagagtagatatttgaatcaccagcataacaaaaatgtggaaaacgagacacagaaggatgtggtgacttactcaagaccacacagcccccttggtaaaatttgaatttgaattcaggtctatgcaatttctaaatcaatgttcatgataactatggtatcttaaacatattaggaggttgagagctaaactggaggccaagatgaagatataaacagagaatggaaaggtgtgagcagcaagcaaaaaaggaaacagatactgggctctgaaagtggagtgccccacctctatttcttgttagctctattccttcagtaagttatgcatgtcctcagttttttcatctataaaatggggatattaatagcagctaccttctacgattgtcgtaaggatgtgatgagataataacccgcaaagcccttagaacagtgtctggcatgtaagaagtgccattttagctacaattactctgaagtgtgggtgggctaggctgtgtgtttgaaactatcttcctgactgccaagaccagatggtttccctaggagcttcttcaagaagctacagtgaactggaagaaactaacattggtttacccacagcaaggcttggcaaatatatggatttccctttcttaatagggattcaaactgggaatgttctaggcataacagatggtgatgtcaacaaagccattaaggtctcctgtgattttttttccacatttattggtttattttaaaggatattacaaaggatacagatgaagagattcatatggtgggatactggggaaggggtgtggagtttccatggcctccctgggcaagccaccctccgggaacctccatgcattcagctatccagaagttctctgaatcttcttctcttgggtttttatagaggtttcactacttaagcatgattgattaaaccactggacattgatgatcaacttgaccttcagcccctctttcctccccagaggttggggagtgagctgaaagtccccaccctctaatcttgccttggtcttttgggtgaccaacctcaccctgaaactatcagacaaaagacacacaaaagatagcagtgtggagaacccagggattttaagagatctgagccaggaaccatggatggaaaccaatatatcataacaccacagtccactccctggttttcgacatggatcccttgcatcaaaagaatatacataatcagtaataattagtccactccatcatattgcatgaatatcttcccagggtgaggccactcaggtttgcaggcttccttttgatcttgtcaggttctacaagcaggagaggcctgggtaaatacacagcttcaccctctcaggcaccttgaatcactgagctaagagacagtgtcatctcttgctctgaaattcttttgagtagttaacataatattgaatttccctcaattaagaacccatggtttcatttctttactctcagttgccatttctccttctctccatgaatacccaaactttttcacctttggaatggacattagaatggtcactgtgctgatctagattataggcagcaatacaagtctaccaagtacgtccttctcagtccacttccattccgataggatgaggttatataagtgcagaattagtgaactatttttaccaccaggcacagtagctgcatttattcttagaccagttttgctagatgaaggcacacgcccatcaggcccttggaattctgatataaggtttaaaaacataggccgggcgtggtggcttatgcctgtaatcccaacactttgagaggctgaggcgggcagattgcctgaactcaggagtttgagaccaccctgggaaacatggtcaagccccatctctacaaaaatgtaaaaaaattagccgggcatggtggcgcgcacctgtagtcccagctgctcggaaggctgctgcacgggaattgcttgagcctgggaattggaggttgcagtgagctgagattgtgccactgcactccagcttgggctacaaagtgagattccatcaaaaaaaaaaagacattgtcattgttacactttcttatttagaagccatccctgcttctggtacttgtacttgcagccctggtcctagcagcactgtgtcaggtagcagagaagacacaatttttggatgatttggagaagaacaaaattatagccaggtgcagtggctcacgcctgtaatcccagcactttgggatgccaaggtgggtgaatcacctgaggtcaggagtttgagaccagcttggccaacgtggtgaaaccccatctctactaaaaatacaaaaattagcccggcatgatggtgcatgactgtaatcccagctactcgggaggctggagacacaagaatcccttgaattcgggaggcagaggttgcagtgagctgagatcacgtcattgcatcattgcactccagcctcggtgacagagcaagactccatctcaaaaaaaaaaagaaaagaaaagaaaagaaaaaactatagttgttataccagcatactctcttgacaaaaactgtatagccataccatcatcctccccagctcctcttcaaccagaaaaacagaaaaaaatctagtggggacactctagtcccactcatgcttttatctccagcatccccagcccttcatgcttttatctccccgttttagacaaccaatgtttccattgcccaggctacttctctattaaacgattactctcaggaggatatctctctgcccatttttggacattatggactatacagtgtgctccttggtctgaagaaatgatggtcagctgtccaagttgtccaaagccatgctacacttctctgttttttatggtaccatgagcatttacatcttccaccaagtaagcaaagcccactccacagtcagtgtctgtgcctgacaaggcccatttgtcacccccagggctgctagcacaagtctcacttcctagctatgttcagggccttcgcaccagagaatctgcccgatagccattagcaatctctatctcttttctttgcatacaaaacagcttttactgacattttgtgcctgagaggtgcaagaggactgtgtctagattcagtctatctctgcactgcccacatatccactcatcttatggtcccaggtggccacctcaaagaagcacgcaggaatatctgcttgttgatgctagtcaccttctgaacttggaaaggggttcttctgacgggcactgacttgttctacgttaatgcccctctcagatttccatagggccatgctccatatgggcatttctttaattggacaggtttccattgaccttttccctgaccatggagccaggtcattgctcactgctagtaagtcaataaaaacccaaatacaggccaggtgctgtggctcacgcctgtaatcccaacactgggaagtcaaggtgggtggatcacttgaggttaggagttcgagagcagccttgccaactcggtgaaaccccgtctctactaaaaatataaaaattagctggtcatggtggtgcctgcctataattccagctactcaggaggctgaggcaggagaactacttgaactcgggaggcagaagttgcagtgacctgagatcgtgccactgtactccagcctgggcaacagagtgagacttcatctcaaaaaaaaaaaaaaaaaacaaaaacagaggcttctactattgtttaattcttccatgacttttaggaaaacagcatgcaattcagcccactgagctgatctgcctttaccttctttgatcaaaataacagccttccaaacaggatgctgtccattcaccttggagctgccatctgtaaaccacgcagctccttgttggtcagtcaggagctgttcatactgtactgtccaagtgttgatagaatctggcagcacctcccacagttccagagccagtcctgggagagaaacgaggcttcgtgcttgtgagtatctcctccttgcattcccctagttgcatgatcttgtataaaccatttctattttattaggaaatactctgggcacttgcatccccattagagcatttttctgacatcacccaagatatcatgggtatttcagatttcaaagtcatttcatgtcagatgcagcgatgcataggacaaggtgtgggggaaggagcacgaaaccccttccttttcttaaaagccctttccatgtcaatacatatcaagcataaagtaactgtttaaaaagaaaagaaaaaggctagaggatgggctccttgggggtgattaaatgagatatttctggatatatacagccatcagagagagttgcactaggtggcctcacagaaaaaattcaaatccaagaccccatctttctttgccatggtgacatgagcttttcccaaaaggcagcaacaataagtactgaaatttgcaaggctttttctagtttacttttctctttcatatacatcatctaaaacagcactctgcaaacttggcctaatgcaaagaggaatcttttctttgatttgcttgcttatttactcatttaacagattccttttacatgcctattatgtcccagtcactgttccaggtgcagaggatacaactgtttaaaaatataaattatcctctaccactgcccctggctcctcctccttggggaggtccccaagggggtataggaccaaaggagaggctgaggatcctacggtgctctcacctgaggcaggaagggttgcctccaaaaatatatatataaattaaaaatgcagttcctgcataatagggtttataatataggaactaaaggtatataataaatacatatgtcaggctgtgttaacctccaagaaaaaaaaaaaaagcaaagcatcaggaaaagagaaggatctttcagttgggagttcacaggaagtctttctcagagagggacatgtgaacagaaatacgaacaaagttcgaaataagccaccgagggaaagagcattccaggcagaggaaacagtaaatgcaaggccctgaggaatggcagtggagccctggagccctgtggctggagcagagtgagagcagggcagacgctgagggatctggtcagaagtgcagctgacaatcagaggcctctgctttgagttgttgtttaatttttttttttaaaggagaatcagaagtctatgtcaaatttacagaccactatgagaacttcatttatttatttatttatttatttatttgagacagggtctcactctgttgcccaggctggggtgtagtggcacgatctcggctcattgcaacctctgcctctcaggttcaagcgattcttctgcctcagcttcccaagtagctgggactacaggcgtgcaccaacaccatgcctgggtaatacttgtattttttggtagagatgtttcaccatgttggccaggttggtctcaaactcctgacctctgcccgccttggcctcccaaagtactagggttgattacatacatgagcgactgcacctggtctagaaatttagtttttactctgagtgagatgaaaagccactgagaggtttggagctaaggagtgaaataatctaacctagcatatgattttaaaatatcaccaggagaataggccacaaagggacacaaatggaagcagaaagaagagtccgctgcaatagatgaggtgggagatgaagtagcttagaacagcatggtggcagtggaagtggtgagaagtagacagattgttaatgtattttgaaggtagatccatcaggacaggagaggacaggagtcagggatgcctctagactttcaggttgctcacttggaagaaagcagtagtcattttttaagaaagaaagattggggtaggagtaatcttgggagataccagcagttccgttttgaacatgttaagcttgagatgcctactaagctggtagttgaatgtaagagtctggagtatagaggaaagattcaggtttgagagaacaattgaggagtcgttagcatgtaaatggaagactcatcgaacagatgaagagatgctagtgaggtggaggagggcaacagagagtgaggttctggctgccaagtgaagaaatgattctaccaggaaaggatgaccaactgggtcatatagtcaagtgaggccacttgaagatggaggatggagctgaggatgtcaaatcaatggctggatatagccacatgaaggccactggtgatctgaatagaaggtggttttaggctgggcttggtagctcacacctgtaatctcagcactttgggaggctgaggtgggcggatcacctgaggtcaggagttcaagaccagcttggccaacatggcaaaaccccatctctactaaaaaaaataataataacaaaaattagccggacgtggtgacgaatgcctgtaatcccagctactcgggaggctgaggtaggagaatcgcttgaacccaggaggtggaggttgcagtgagccgacattatgccattgcactccagcttgggcaacaagaacgaaactccatctcaaaaataaataaataaataaaagaagttggtttcagtagaacagtgtagaccaagttctgcttaaaatgagttgatggagaacgggaagagagtaaatggtgacaagtccagacaattctttcaagaacttttctgcaaaatttgttctataaacttttctgtagagtttgtagagagatggagtggttgctggtgggcatctcagatcaaggacaaacttcagtttttcatttttcaaagacaatagttgtagagaagaaacattaatttctgaaaaccagaaatgatctattgattgatccatgctgactatttaattatccaggagtctatactaatgagacacttccctagatgtgacacactcgactgcccacagttacaaagacaaaagaggccatccatgttgaaagcaccccatgctgaggtgggcataacaccaattatctacaatattcctaaagaggaagccaggagccttccaagtttttaatggagcaaatacatagtacaaggaaaacataaaaattaaattgctagaaatttgaccaaatcattagttaaaaaaaaaaaaaaaaaattcttctacttagcaatctccattcctaacctggaaaatggttggaatcattgagtttaaaaacatttaaatttgtaatcattaactcatttaagccacataataacccagcagtgatgtggattcctgttgccctttgtctactgctatgcaacaaacagccccaaatgtaggagggacaagacaactatttcattatgctcatggaatctatgggttaggacactcagggcacagtgtggaaaggtgcatctctgctacacgatgtcagtgcctcaggagagaaggcacaaatgactggcagcaacttgcagagcagggtgctggaaccatctgcaggctcattcactcatatgcctggcttctgtgctgggatgacctaaaggctgttgatcaaaggcctctcccggatccttagggtagtcgccctttctatatgcacctcagggttccgagaacaagtgttccagcaacagaaacagaagctgcatggctttttatgacctcacttcagaagtcccagtttcatttttggtgtacactcttggtcaaagcagtcagaattccacttaaattcaaaggaaggggacccagagcccacctctcaaaagtaatagtgtcaaagactcccagccatgttttaaaactaccacaccccatctggcagagggaagaaaattcacacaaggtgttaaaataaacacaattattaataacaaggtggttaagtaacttgcccacgccatacaggtaggtggcaaaggtgaagtctggtttcttaaccactgtacccttctccctcctgaccacccttgatataatggctctcccactcttctcccctgcaatacttatcctggttacactgctttcttttctctatagcactgtttacttcttggtcatcaatctccccctctacaatggaagttttgtgaagaccaggacttcagttcattcactgttatgtccctatcctctgggacaatgtgtggcgtgtaatctatactctaaaagaaaattgtcaaataaaaaatatattttctttttatttagactaataccaaatattgagaaaaaaaactataattcctaagacagccctggaggttgaggctgcagtgagccgtgattaattgtaccactgtattccagccttggcgacagagcaagatcctgtctcaaaaaaataaaaattaaaaagcctcaacctccaggtctcaagccatcctcagcttcccaagtagctgggactacaggcacgtgccaccatgctcagctattttttcacttttttttttttttgtagaggtgtctccttgtgttacccaggctggtctcaaactcctgagctcaaggagtttgagccccagcctctcaaagataatctgatgctgagattacaagcatgagccacaatgcctggcctgagatcaaccttccaaaattaagatctgctcaactacaaaccaaggtgaaaattataatccctacacatactttcaactctatctctacagattattggatttgtctcgaggaggcattaggtagcttttgctctcacaacactgggaggccacatatttggtagttgtacatttttactagtgatatagtaaaaataaaagccaccaaaagaaataaatgcctttgctaaacccattttagcctttccaggaggctgctcaggttgcccatcttcacctgctcaggttgctcatttgctgagaccccaatctctcctccctcccctgcatccagccccagcccctactgtcttctcctctggcccaaggccccagttgtcccaaactccttgcagttattttacttgcagacctttcctgaaatgtctttccctccactctttcttgtcatcctcaaattaagcatggctcatgaagtgggggctgaatggtaccccccagagatatgatatcctaagccctggacctgtgcatgttactttatatggtaaagtttttgcagatgggattaaatattttgagaggaacagattattctggattctctgggtgggcactggatgccactagacgtatccttgtaagagaagggcagagggacaatagacacacagaggcagagactggagggatgtggccccagtcaaaaaaaaaaaatatgtcagtagccctcagaagctagaagaggcaaaggaagaatccgccccttgagcctccaaaaaaggcacaactataacaacacgttgatgttagctcattgaaactgactttgaaattctggcctccagaactgtgaaagaataaatttctgtcttttcaaaccaccatgtttgtgcaaatttgttatagccaccacaggaaactagcatgcctcctctagaaagcctgttctaactactttttcctccgagccttggctagagagtcccagctgcaacttgtgtttccttccagcagaactgttctaccagtggatgcaaactcgtccacttccaagaaccagcaaataacatcaatttgtgaaatgagtagagactggtacaaaccaaagggcatatgtcgctgcaaagcaccaagaaagagataggaaccgccacagaaagatgggtgaaggatatggaaggtaatttactaaagaaggtaaccacccaaagcccaatagacatgtgaagagtgctcaaactcattagtcattagaaaaaataaacataacatgagacagacataaagctggaaaacaccaagagttggtgggacttgcagatttgggaacatctacatgcttctgatgggggtgaaaatgctgaaatgaaaaatcagttatgaatgcaccacacaacccagctcccactcctagatgtgttccataaggaatcctccccagtaggtccctcaggggagcatgggttgctttgtttctcacagacggtggcagagtagggaagcatccatccacgtgaccatctttggaggagggaataagactacgcaatggacatgaacggagtagccaacagcagttagaaaccatatgtatacacaacaacaggacagatcttcaagtaccaggctgagtccagaaaataagaaacagaatgagatatctgagataacttcattttgtaaattaaactctacacgtacaaagcactatggatcttaccagaacacctacaaacagaaagataaatgtcaatacattagaatcttgcctataggaagaggaagatgggcattaaaagagaaataaatagaagcaaagataaatgagacgggatcatttatctaatgataaattatctaagataaatttatctaagataaattgcagggactgatggtgttaggataacactgtgtaattggctgaagagttttattaactcaaccatctgagttgtcaagtttaaaaaaaaaaaaacatgctcacctatgctgtttggagattttggagagaaagaagagcctcaaattctttgacacttcttccaccaaagcaatagaagtaatgttgcatgatatcagaagctgggccataaaaggaatttttcctcccagaatagttcctctcatactcatctgccatggcccctggagagaggacatggaggtattcaggtcaacagtcccaactgagccctgccttcaattcatcccagctcaggagctgaacataccaatgaagaaggcatgctgcgagtgggcctctcagccacagctctgccagccccaagctgttagagtacctcctaagagtcttcctggctcaggccccagacattgcagagcagagacaagccatcccctctgtgtcctattcaagttcctgccccatgaaatctgtgagcataataagatagctgtttttttccactaagctttggggtagtttgcatcactgctgtaggcaccaaatcatgccttatctaaaggagcaattacttcctagctcgtgccaactgtttccccatggaaataagcactcaggttagctaaatattctttttttcaaaagaaatggaaaaatccagattgtcttctgatttttcaatgtcagcaactattaaaataaaaaaaaattcccaaaatagtgaagaagaaacaaatctcatttgcacttcctaattggccttggagccactgatttacaaactcctaaactgtgtactgtttgtctctctccagagggtctgtggctcatggctgtttatctctgtgtccctcccaccttcatagcctcaagatgggccccctaaccagagactccatctctcaacactggcttgggtcaggagtccgccactaactggctgcccaaccttgtgcctcacctcacttcccgtaactgctgaatgggggcaccaatatctacctcggctgcctcagtggctggtgtagggcttgtttcaaacaactgtgtgtctaaagaagcaatttgtaaggaatgaggtgatacaaaaatgtactggtcaaaatggtggtccccaaaaagatatgtccatgtccaaattcctggaacctgagaatgtaaacttatttggaaaaaaggtctttgtagaggagattaggtgggccttaaacccaatggcaagtgtccacataagagacaaacagaggggcctggcgcggtggctcacacctataatcccaacactttgggaggccaaggagggtggatcacttgaggtcaggagttcaagaccagcctggccaacatggtgaaaccccgtctctactaaaaatacaaaaataagctaggcatggtggtgtgtgtctgtaatcccagctacagggtggctgaggcacaagaggcagaggttgcaatgagcagggatcatgtcactgcactccagcctgagcaacaaaataagactccatctcaaaaaaaaaaaaaaaaagagagagagagacacagagagagagacaaacagacacagagaaaaagacaatgtgaagatcgaggcagagactgaagtgatgcagccacaaaccaaggaagagtggagccaccagaagctggaagacccaaggaatggaatctccctttggagcctctggagggagcacagctttgctaacaccttgattttgcacttctggtcttcagagttgtgaaagaaataaatttctgttgttttaagccagtttgtgaaaatatgttatagtacccataggaaattaataaaagattaagtcggtgcaaaagtaattgcagtttttgccattaaaagtaatgcttataatataagcattatttataccatttaatacttatatatgcagaattatcatggcctcaacattgaatcctttagtagtacatcttgtggagctttgtaactcatgggtcatcaggctgctggctaatctagctcgtaaagacccctccctgaaaccactacatggtccttaatccataataactgtgaagtcaccaccatcccggaagagttacttaaatcttgcattattgtttaatattctcatttccctcctggtgatgaattcccaaaggtggtgagctcttcactcagcagcggtcctggaaagttcatcctcaaaatgccagtttcagaaccacctagatcacgtcctaaagattccaaatctcaggccatgccctagacttagtgagtcaacagccaggcatgggaagggtgggaggaattgagaatcagttttttgaacagattgagcaaggtgcctgctatgcacaccaaaacttgaagaccgtcaacatgagaagggggttaaggggccttgagccacacagcctggggctgattttcagccctgctcttcctcatcaattagaatcttaagcaagtttaaggtctgtaacttttagttttcttatctgtaaaatgaaggtcgtgagcatggctcatcaaggagttgtggtaaaagagggtttagatgagattatgcatgcaaatcacccagcatagttgcataataaattctggatattgtaaatatgatggggatggtggtgaatgataatggtaatgatgaccctttcccctaagtacatggcccaagggcccccatatttagaactatgtgagccttccgggtggtcttcccagaactaatttatcattcaatggggtgaggcactcactgcaaaattctaatcagatcatgttgaattaacagaatccatatcaccttctcaaaggaggaaaatatagaaaatgaaaagataatggtgactatctctttatttgggccttccaagactattaaaagactttggtatatgttcttctttaaaaaagaaaaaaatagtaaatttgactttgttagtcctctgcttagtcatttgtgtcagcatggcacacagtggcccacaagacccacgccttcctacctctcccatcttgcctcagccttcttcctttaaacatgtgcaatttcccaataatggtacaacgttaacccccaatgcctttctgcatgctgctccctgtgtctccaatgtccttcccctcccctaacccaccccatcatctgtagcactcctgttcaacctgcaagactcagcctaatcatcacctcctctgtgaagccttctctgattcccttgcttcaccaccatcgtttctatagcaaagttcttcatctccttctctgtgccatcttcttttcaatacataccctgcatagcataaatgtcagggacatcagatggcctgggtttaaatcccaggactatgacttactagctgtgtgacctaatctctctgggtctcagttcccccatcaatataatatgaattgttacaaaccttaagtgaggtgattcttaagtatcaaacatggttcctggaactcagtaagcaactaacaatatccactactcttattattattcttcagaatggtccaaaaatacaagtaaggtaatctcttccttttgatctccagacatccacagaaaacttatagagacagtcgataattacatgggtgaactataggggctcagacttgggaggaacctcagagataatttggcctaactcagttttaaccacaataagacaatatcactgtgacttgggatggaagccagagggctccgtttatgtgactgagggacccagaacaagataaaacacttcgcaaaccctatcctcacaatgtccttgagaaacaggtcgaagctaagaacccagggcctcaatttctagatgaaaaacctgagtcacagggctacgtgaccagcaaggagggtcagcacctctatggccatccaggccactcttccatgctatccattgacaatcgccagacgaggaagctgtttgggtccccaaagtgctgtccttatgggaaatgaatgtgaggtgataagcgttaggttataggaacgaggtaatgttcaggtttttgttgttgttcttaagtgttcaccatttatggtgagcatttgtttcctttaatttcagaaaagcccagtcatgagaataggcaatgaagcattcaggaggcagcacagctttgtagagagtagggcaagtttcaaatcggtggggcccagggctcacctgtttgtcactagctagaagaactctgacagatctgtgagctctgaaagcttcatcttcatcagtaaggtgtgggcaatggtaatgcctcccttatggggctgtcatcaccaccctaggtgatatatacagaactcctggcccataatgagcactctataaatactactatgccatgataggagctggttggaaaactgtaaatataaactctccaggaggaagtgcaaagtgttttcagagaccagctgagtgttaaatcgtccctaagggaacagacattccttagacacctgctttgtaccaagccctgcgctagcactctacatatgtacctgcatctctgtaccctccattccaggtacagcaccttggaagcagtcagtaaatacttattggttgtatgtatgtatgtatacaggaatgaacaaacaaatttatttaatcctgacaatattgccagataaatattgtcatcttcattttatagattaaaagaacagaagctttgagtggtaaaatcatttctctaaagtcatagggttagtagagttaatcagcgaaccacatgaggcctctcttaacaatgtttgtaaggccgggcgcagtggcccatgcctgtaatcccagcactttgagaggctgaggcaggtagatcacctgaggtcacgagttcgagaccagcctaaccaacatggagaaaacccatctctactaaaaatacaaaattagccaggtggggtggtgcatgcctgtaatcccagacactcgggaggctgaggcaggagaatcgcttgaaccagagaggtggagtttgaagtgagccaagatcgtgccattgcactgcagcctgggcaacaagagtgaaactctgtcttaaaaaaaaaaaaaaaaatggttgtagcttaaacccaaaaggtaagaaggacacagctaaagcaagcacacaaggaggagaattccaggtgaaacagcccatatgaatggcatgaggcagggtggagagaaggccacagtggcctgagcatctaggatgagctcgggggccaaggtgagctcagagcacgcagggattatggactgcattaaggactttggattttgttctaggcacaatggaaagcttttaaagcattttacacagaggaaggatgtgattccaatttcatcttggtggtgttgccaagaatggcctggaggagggggacaggtagggaatccagaaggtgatcatagctaatgcccaggcaagagaagctgtggcttagtcccaggctgaggcaggtgagatgtagtagagtggacagtctggggaaatatgtgttcagtgcagccagtagaccacgctgacagattggtgtggcaggttaaggaaaagaacaatatgaaactcagccttctggcttgagccactccctgagactttaaagccgagatcagaagcaggtggagagaagatcaagaatctagttggggaatttcaaggtggaaaggcttgagagatatcgcagtggagtgcctggatgagatctgacttggagaattcttcacatggggtaccatttaaagctgtgggaatgtataaaattaccatggcttcaagtggaggacagaaaagtggtaaatataacatgagaagtagagcaagcctgaggaaaaccaatatttaaaagctgggtagaagagaaggagaataagaaggagtaattaatgaccaaggaagaaaaccaggagaataaacttgtattgattcaaaggacagagaagcttagaattaggaggtcaggtctggttcaactgcttcattttcatatgggaaactatagcccagataggggaagtgactcacccaagatggtacaactagataacctcagaagaactttctaacgatgagcagtactgcccagcagtgaaatagactttctcctcaggcagtggactcctcactatgaaaggacacaaataaaagctgaaaggtacagctggatgctagagaataattgtgggttttttttgttgttttgcttttttttcttcttctttttagagacggaatctcactatgtggcagaggctggtcttgaactcttgggctccagtgatttgcctgtctcagcttcccaaagtgctgcgattacaggcatgagccactggccagctagaggataattctgtgtgtgtttggggtgaggggcggtagccgtggagggaagattttccctagacagaaggttgtagaaaaggtgaccctccggtatggctagtatactttgtatctcaggattcccaaggtctatttattagcacatgaatggaaagataaaaactcgtaaatgtaaacaatcatttgatgaaaaaagaggagagaaaacaaatccatttacaaaacacatacattgcagaagtttcttgctgaggctctctaactatgccaagaaagagataaaacgtatcagcagacttccataaagagataaaatgttatcagccgacttccatagggttcccttcctctgtggattcttcatgacaacaaagtatcaagagcttgaagatggaagagtctgcatatccctcatttagtagaccacagtgtgagtgccagatccccccaccacccctgggagcataggtctaccttccccaccaggacccatgggccagatctcaccaccacccctgggagcacaggtctaccttccccaccaggaaccatgggccagatctcaccaccacccctggcagcacaggtctaccttccccaccaggacccatgggccagggtttctgtgtgggcatttgcacgacagagtgtgaagccttttgtaaacattaccttcatgacttatttacaaggcactgggtagagcaatctgcccccagtgcttggagggaagagaggaaagataaggtcacagagagagcactcagaggcaaacccacaaaaaaccctcagaatatttgagggaggggctatgtacttctcccacttttattctctctgccgccacttctccaacattcatactggctttctgtttctcccttccctctccttcctccccttaccctctctcagccctgcctgccttgccatttggccactctgtttagtccgagatgctgggagccactatggcctccaaataataagggtcttgtggcccctaacatgaaggaagggggtacaggtgggtacagatggaggaaaattgtacacaagggtgcaagaaccacaggggaatcacgctaggggcagaaactctattttctcccaaaagtaacaatacaggatgtggaggaggaggaaactgaggaagaattgccgagtggaataagagcaagagctggtcagcggtttacaggaggagtctcaggtggcacagggattcgggctgaggtgctgtgatactagggtaaccccaatctgcacagtcgtgtggcatcctccaatagtgctcagaagccggagtgctggaggagagggctgtagcagtgaccacatttggggtttggctgaatgcttctggcaggagggtcagagctccacagaagcaggagcatcaataagagaattattttggtgatcaaccaagtggcctaagttaaaagggaagctgtgaatccagtagccactgactaatggggagaagatggaggggaaagcaggaaggaggcagacaggaggaaactggtgtcaaagcaagggatattgaatgcgaagtcttcagagatgaaaccaggcagtgctgacattcgccagagtatggctacagggtagggtggctgaggtggagcggggatgaaggtcaccagagttggcaaggtgaggaatgaaaaagcaatgatgctactgtgtacagtcaatgttctcagggacactgaggtcagtcatgaagacaaaaaaaaaaagtgaggtaagagaaagatactgagccaggacccaagtcgccagggaatgctggggaaggaacaaccacagctgggaaaggcagaggcgtttactggatggcacaagcctcagaggagaaggcagcaccatagggaaaaggagcaacaagtcggaaaaaagcaacaaaagaccaaaagctgcaatgaggagctgtgagggagccagtcagccctggaatccacccacagcctggagcaagtggagctgtgagagagcaagggagacagatgagggagatgggccagaaggagcaggtctcaggaaagagtgctggctgctccctaaggtgggaggaggatgtttcaagcagcgggtgatatggaatagtgagcacaggtgaaaggtttgtgagaaagggggagcagcaaaagcagaaggcagaggaaaatgaggagtgcaccaaacacacagaggtccagaaaacctatatttggggattcaatgataaaatcaagattgaagttctggtgtggtggctcacacctgtaatcccagcactttgggaggccaagacaggcagatcacctgaggtcaggagttcaagaccagcctgaacaacatggtgaaaccctctctcacttaaaaatcaaaaattagctgggtatggtggcaggcacctatattcccagctactcgggaggctgatgcaggagaatcgcttaaacgcggaaggcggacgttacagtgagctgagatcaagccactgcactccagcctgggtgacagagtaagactccatttcaaataaataaataaaataataaaaataaaataaaattaatatttaagagactttaatgagagatgtacggacattatgtgatttttataaaagtgtttttgtcaaaaaatcaaaatcacaacccaattgtcccatccaccaatgaatggataagcaaaatatgtcagtcacacaatgaaattctgatacctgccacgacatggatgaatcctgaaaatattatgccaagtgaaatatgctgaacacaaaaggacaaatactgtatgattccacttaaaggatacacctagactagtcaaattcgtagagacagaaagtagactggtgggtgccggggctgggggagcagagaatgggagttgttgtttactggatgcagggtttctgtttgggatgatcaacaagatcaacaagttctgaaagtagatggtggtgattgttgtacattgcaaatatacttaatgccagtgaaatatacacttaaaacagtttagatggtaaattgtgtgttacatatattttgtcatagtaaaaaaaaggtatattaaaaaattgaaaccgaatctgatcaagcctctgaattctactgccaatttatagggaaaaaaaggagacagagtaacatgttagatgacactactgggaatacaatcagtaaagtttatgatttgagaaacttaaccaacaacaaggaaacttttttttttaataacaaaaactcaagagaaaaaaaggagagatgaaggagaaaccctaattaatagggacttaaaagacatatccataatgaatcctaatttaaacaaaaacaattgagataatttgaacactagatatttgacaatattaagaaagtattgttggctgggtgcagtggctcacacctatattcctagcactttggggggccaaggtgggcagatagtttgagctcaggagttcgagagcaacctgggcaatatggtgaaaccctgtctctataaaaaatgcaaaaattagctgggcatagtggctcctgcttgtagtcccagctacttgggagtctgaggctgaacgatcacttgagcctgggaggagaaggttgcagtgagccgagatcgtgccactgcactccaacctggacaacaaagggagaccctgtctcaaaaaaaaaaaaaaaaaaaagaaaaaagaaaaaaagtattgttaatttattttggtgtgataatgatcttataagtatgtttttaaaagaatccttatcttttagagatacatactgcaatacaagtgaagtggtatgaggtctaggacttgcttaattgaaaacattcagggcaggagagatgcagcgtcataagtgaacaagcgtcttcacaaaacaaggtcgtccatgagctgaaaattgatgaatttcatgaaggtgatgggtttatgcagattcattatatcactattctctctgcttttgaataagttggaagcataccataataaaaagtagggagaaaatggacttttggtggactaaaaccaagtagaagatattttaatgggcatatatataaatcctatgtttgggctcagaatgaagaagggataccaggtgtcaagaatttacacaaaaatgatctgggatttagttggccctgagatctgcatgaactagtaaagtggggtatctactacaaaagttaatcccaccttaggccaagagcacaacaggatcctctgtgtttaggtttgctaaggaatgtctggaatagtgtgctcaattctcaaccccagaatttatagaagacattgtcaaactataaactatttactgccaagttcagcagagagaaaagaagacttagttaaggacacagtggtgagcattccagggaggcaacttttggctaaatacagggatttgtgccatatcaggaagtagcatgagatatcacatactcttcaacatttttcactccattatcccgaagagcagagaaggaggataaatatgtcatctgaggtagcagcacagactggaaaagtctcagaaatttgtctagtctttaaaaattatatgaatttgcattctaggtaataatactttaagctggtaaagatgatgttctagaagtatgcagtcggtcaggggcagtggctcatgcctgtaatcccagcactttgggaggccaaggtgagtgaatcacctgaggtcagaagttcgagaccagcatggccaacatgatgaaaccccatctctactaaaaatacaaaaaaaattagccggacgtggtggtgtgtgcctgtaatcccagctactctggaggctgaggcaggagaattgcttgaacttgggagacggaggttgcagtgagccaagtttgtgcaactgcacttcaacctgggtgacagagtgagactccatttcaataagtaaataaataaataaacaagcaaatagaagcatgccgtcatcctgtggcttcctctgccactagcatactatgccataataaggtgtaaaaggaaacttactccagggagagacacataaaggggtgaatagagctccagcattcatagctctatgcccctcagtgagtgattttacctctttgagcctcagttttactcatctgtaaaacgagattatttacatgtacctaataggtttaatgtatggatgtcagattctctacagaacaattacaactatcatttattgagcatttgctatgaatcctataaagtcacttctgttatgctgcttcttttgaaaacgtgaaattgttccagcacaattgatacaataggaaacaatttgagcacaacatacatttcatgtttgcttatgcaatatttcatctgtgagaaaaactaggtgcacccagctgaaccgaattatgtaggagtacacaaaacacacctcaaacatctcccagtcacctcagctgggatgttgtatattcagcataatacacaaaggtgtgtgttatgaaccacacccatccacatctggtataacaactttccatctgatttcaaataactcttctatcacaacttctcaataactcacaaggtacaacccttctgacactcacttatacaagtaaactttgaattattcctagtaagataaagtgcaatatttttgaatatttatgtatttttaaactaatgtggaaaactgtgctaccattttatttggggtatatatatatatatttgaggtatatatatgcaccaaattaattaaaaagtgtatgattaaatatatatatatatatatatatatgtatataactcgtgacatttttgagtattttccccttaccccattctctccataagccccgtggcttttgtgtgacttttaggaacacatgtgaagtactatagcagaactggctgtgcgaagcaatttgcatgctttcagttgtcccaataactcagggaaatggatgttattatcctcacattgtaggtactcagtaaatgacagctgctgctattactaataataattgaataagtccagcattggggaaaggcctcttgtcagttactatggcacttttacttattgatggtcaagcagttgaatgatggacaatacgtttttggtgggcaatgtagtcccttctatttctcatggtctccagttctggactctttcggccaggagtgtctatcagaggcctcagttggccagcccctccccggctgccatttacccaccagacaggtcaggcaagcccatgccctggctgttccctgttcagtcatgggaggtgtcttcttaatactccctttcctctgtgactcagtaccttcactgaaagatcaactgatcaatttgctcgagaagcttattacagttcggccaaatactttctataaaatctgcataattacttgtggcccagatgtctggaacatctgtcacttcctgctctgtgttctctgtgaaatgaaggcctaaaatgagtcactggaagcttcatgtcacggatgagggtttgccttagatgtcctcccaggtctttgcaattcttggtgtctaattctacaggtttcccttctggatagcttgtctttctttttttttttttaataagttacttcttgaaatcaaaagctaagaagcacatttattcttcagtcaatacattagattgagaatctcctctgtgttgggtgcagcacaagatactggggatagagctggaggcagcccagatgcaatccaccattcatccacatggagcacacagacagttggattcatagaaataacctaacacaggtctacatattttagacatgctttcaaattaaattttgagaaagatgcccacaattcatctcttcactcagatttctagggcaaaagaaaaatagcaagttaaaaatctcagctttgccactttatagatttatcaccttgaataatgtgattaccctctctaagcctcagtttggtcatctggacatgggaactctgtagatatggaagagttgctacatgggattacaaagcatatgtcatataaatagccagaacagcagtacatgcttttctctttctttcaactctatagcccttagccttcaaggtagctagcgcttagcccagggggcttcaagccactgttttctggaagcaagctcattcatcacagaaccctgcagttacacctagagcttcacaccagtgttggtccttgtggtttgggtttgaggacacagagaagtggccttgagctgagtctaggagggaaaacttgccagaaggtcttggcatgaggtagcctcaccactctgcagcccctcagattggccccttgaggagcctccagatgtgtgggtatgataaaaaccaaccacatcttaatggaaaaagaggcaacccaagccacccacctttcccacccacgtctgcatttgcttctctgaaattgagttttctttatccttgttaaatggtcattttgatccattaatccacttcttgactgtgtgtgacagaaatacttagttgttggctcatttttcgccgggggcaaagggagggagtgattctgacatcaatcaaattcacgaagggtttttttttcatcgtgaaatataataatactttatatttccagtattgtcaagaaatgagttgtgaacagccaacacaaattaaaagcagtagctgtaggttttggtccaggcaaattaatatgcaagagaacaccaagatgaggtgtggccccacataagtgacttttcccgaggatttgcctgagctgcattaaaaaatattgaatgtactacatgctagaaactttacatatattatttctgacctctcaacatcccctggaaataagaattattatccccagcttacaaataaggaaactgaggcccagagaggttaacaacaaaaaatcctcactggcccctttttcaggattatcttttctgacttggttgagtatccatggaatttggttttcatcgaaattgtgtttattgatacctttctctttttgttaaatgcctatctctcctcctccatccacaacagccaagagcgcaaggatgctatttgtgttacgtatttggtcaacaaacatgtgagtccccagggtgttaagctctaggccagcttctaggagtctcagtggtgaccacaacagcttcaggctctcaggagcttacaggccagcactcaaccctgtaacctcagcttctagctgagtgcctggcacaccacaaacattcaatcgatatgacattgagtgcatgaatccatgaggtgagagtcagatcagcctactcctgaatcctgatgcacccaagcctcccttatggtgcctcctacatgtccttcacagtgtcctttacatcaggctatttcctcctgctttgttctcactgtctcatctgtctcctttacaacccagacatgtgccaaaccaaacaagccttaatcaagcaatgccctatcagatcctttgaacccaccccacctggatggcaaagcccatctcattgaaagttccacccaaaaagccacctcctcggagaagctttccccaaccctccattgcagaccaagatcattctcctgtgccatcatgaagcacctggcttatacctggatttaggtacatatcaaaccatgctggcattattttcatgctgccgttgcaactaggctgtgagatctttgagggtagactccacaagttgctcatttttgtgtcatcttgtatttgttaggaaacttcaacaccaagtaatagaaaacccaactaacagtttaaacagcaaagaccattatctcacagaaaaagaaactttgggatgtggaggcttcatttggaacctccatgaacacttcaaagaacctgcacttttcattgtcccactctgtcctccccattagcaatgttttttcttatgtttccaagatggtagccacagtttcaggcatcacatgtagacacaacagaagcaaagggaacatgaggagaatagggacacgtcccctctctgatgtctcttttagagatgaaaaacactttctcggtcattcaagctcaattcccctcatacctatgagccagaagtgtgtcatatgtccatacataaagtagtcttgagcaaagagaatgagaccaccttgatggctgagaccaattatttctttcctccagaaacacaaggcttcggtggagagtgaacaaaatcagagctttcttcacaaaggaaaagagtgaggaatgaatgaagttgacaacccagtgacatctgcaattcccttgtgactttttacttgccagactcactcttctcctaagtagcacaaaggaattgttgcttacggtagatctaggtaaaaactggctggatttttggaggagttaccaggtcatctgtagctggcctttctctatgcagacccaataccacctagatccttctgctcaccgtgggctagtgctgtgaattcattcattcactcatggaagcatgttgatttctatcacctaccagcccatcaagtaggtgctagggatatagcaaataagccacagatcctatcctcaagtgcctctgttattgctcagtctcatttgttttttcttccaaaatatgagataggcagagaagatgttccttttgtacagaaaatgatattgagttatgaattagcaatgtgatattcctgctaacacagaagctcacctcagaaagaaatggtcagaaatgtaaacagccaactctaagcctaattctcattccagtcagctgcagaccatgaccccactagagacctattccatgggacaaggtagcaaatgaggcaaaacactagtgcctgtgttctccattccccaaaccagcattttccagaatgtgtttctatgagatgttcctaggaagaaaagagttccatggtcagataattttgtgacctattagccctgccctctctcggagagtcacaatttgcttcaatgcactgaagtctctgaggagtcctaaagtatgtaagtggtttatttcagctggttaaaattttaatcactcacaaggctggatgtggtggctcacgcttgtaatctcagcactttgggaggccaaggtgggtggatcacctgaagtcaggagttcaagacctgcctggccaacatagtgaaaccccatctctattaaaaatacaaaaaaagagagttgggtgtggtggtgggtgcttgtaatctcagctactttgggaggctgaggcaggagaattgcttgaacccgggtggcagaggttgcagtgagccaagatcgtgctgttgcactccagcctgggcaacaagagcgaaactctgtctaaaaaaaaattaaaaagaaaatcactcataaaacactttttcattgcaaaacccctcccaacataattcattcattaagtaattattgagtatccactatgtggcatgcactacatagttttgagcaaaacaaacacggtccctaccctccatggactttataaagtagtggaactaaattccgtatcaccaagaacagtgctcactggggtaataactactaacataaaaagtcatggttgacttgagtgtttttgtagctaattacttaagttgatctccacaggtatggtcatcaacccatccatggtgacacaaatgagaatcaagttcaggactatcttcctgagattattagtatctacatgaaccatatgtttccaaatatcctttgatgtattagcccaatttagatgcaataacaaagagcgccaaaatcccagtggcttaaaaaaacaatttctttctagctcatgttgcatgtggatggctgcagctcagcagctgtagaatctgcaccacctgtcttatgctgagatccagcctggaggaacacccctctgtggaatgtggcactctcttggcagaaagagcaagaaagcaggcagaaactcatgaagactcttaaaggcttctgcttgggcacggggtatgtttcatctactcacagtccactggccaacacaagtcacatggtcaaaccccaagtccatccgtgagtcaggagttgtatcctcctccctcctatgggagacactgcaagtcacatgacattacagggaaaggggtcacgtgtagtcctcttaaaaggaagggacaggccgtccgggaggtgaggggcgcctctgcccggccgcccctactgggaagtgaggacccctctgccaggccagccgccccgtccgggagggaggtgggggggacagccccccgcccggccagccgccccatccgggaggtgaggggcgcttctgcccggccgcccctactgggaagtgaggagcccctctgcccggccacgaccccgtctgggaggtgtgcccagcggctcattggggatgggccatgatgacaatggcggttttgtggaatagaaaggcgggaagggtggggaaaaaattgagaaatcggatggttgccgggtctgtgtggatagaagtagacatgggagacttttcattttgttctgtactaagaaaaattcttctgccttgggatcctgttgatctgtgaccttatccccaaccctgtgctctctgaaacatgtgctgtgtccgctcagggttaaatggattaagggcggtgcaagatgtgctttgttaaacagatgcttgaaggcagcatgctcgttaagagtcatcaccactccctaatcttaagtacccagggacacaaacactgcggaaggccgcagggtcctctgcctaggaaaaccagagacctttgttcacttgtttatctgctgaccttccctccactattgtcctatgaccctgccaaatccccctctgcgagaaacacccaagaatgatcaataaaaatataaataaataaataaataaataaataaataaataaataaaaaagaaagaaaaaaaaaaaaaggaaggggcaggaagtgagtaattgtggacaacacaatgacctggggaaaggaagaacagccttgtatggggttatgacaatggactctgatgtcacacccgtctgaatttgaatccaggcctgctagttattagctgagtggccttggggatattagaaaaacattataatcctcagtcccttcgtctataaaatgggaacatcagtatctactttacaaggccgcagtgaagatttaatgagataaagcttaagttcttagcacagagccttatataataaaatattcagtgaatgacaaatataataataccagagtgaggccgggtgcagtggctcatgcctataatctcagcagtttggaaggccgaggcgggtggatcacctgaggttgggggttcgagaccagcctgaccaacatggagaaaccccgtctctactaaagatgtgaaattagctaggcatggtggcacatacctgtaatcccagctactcaggaggctgaggcagaagaatcgcttgaacccaggaggcagaggttgcagtgagctgagattgcaccattgcactccagcctaggcaaaaagagtgaaacttcatctcaaaaaataataataataataaataatgccagattttctttgcattcaaatcggtggtcttcaaactagatctcatgagcacctatgattctcaccactcctggtgccattcagaccttccctcggtaagacagcctctctcaacctggaaaatgccactgggtccacagtgaagtggaggaagaaaaacaaagaaaatggtaagagctgacagtttcgacaagctgttcctttggaagcttctcaatcatggacaagtcaactctggtgacacatgaaaatgatgtgcctggaacaagtaaatataccttagactcctgatatctaaatctggctttggaaaaagaatacaattcatccaggagtcaaaaaagtgagtaggtgaaggtctccaggcagaggatcagtgtgggaggctacagggtctccacaagcagcctgagttactgggaggacaggcaattctcaccttctctactgtaggaggaaaagcagccctgttcccatgagttctcacccaaagaggccagggccatgtgtgctgccttcctctttgataagggggactagtttcagcaacatgaccccatgccctctgcaaactgcatcaagtcattagcaacgatagaggtaacctcaccatcttcagtaattacccattggatctttgggatagcagttccttggtacctaggaagctggataagaagggtttcagggagccctggaactcctcccctgttctctcagagagagagagagcttgggtcttagagtagctctcctgcttctctctagaatgtctgccataagaaggagctgaattctaaggcagccttactccagccttgcagctgttacagagactgatggttgtgaatacagattcttgtcagccaacctggctcaaatcctatctgtgtgaccttgaggaagttgtataacatatttgagttttgatttccccatcagtaaaaatggggatgttaatataagttattttttcccttttcgtccttcagccattgtcacaaatctcatgatcaccctctcatttcagacaaatgactgatacatcattcactacattgagtcttcacctggggtagtttctttaaatggaactgcagattatcagagaattacttcttgatgtttgcatgtgagccttatattacataagcttattaacgcatttacccaaattgattgtcacatctgtggattgttatattattgcattttttttttttttgagatggagtttcactcttgttgcccaggctggagtgcaatggcacaatcttggctcaccacaacctctgcctcccgaattcaggcaattctcttgcctcagcctcctgagtagctggaattacaggcatgcaccaacacgtccagctaatttcttgtatttttagtagagacagggtttctgcatgttggtcaggctgatctcaaattcccaacttcaggtgacccgcccaccttggcctcccaaagttctgggattacaggcatgagccaccgttcctggcctttttttttttttttttttttttttctgagacggtgtcttcctctatcacccaggctggagtgcagtggcacgatctcagctcactgcagtctctgcctcctgggttcaagcgattcttctgcctcagccttccaagtagctgggactacaggcacatgccaccccacccagctaatttttgtatttttagtagagacggggtttcaccatattgaccaggctggtctcgaactcctgacctcgtgatccgcccgcctcagcctcccaaagtgcttggattacaggcatgagccaccgtgcctggactgttatattattgtttagaaacatttgttaccatcttaggtttcttatatcctttctgtaggtttattatatgtcagtagaaagttttctaaaatacaagttgccatgtcctattgtgcttctcctggtgccctctcaatggaagaaaagagtttcaccccctcctcaccagtgaccctgaactgaatcatgggaatgtctttggttagtggatggcaagcagaactctgcttcacatccaagcagaaccaataagaggcacatagttctgccatttctcgctttcttctgacacatgaatacccgtgcccagatgccacctgctccttccaaagagacgagaccatggagcagagtcatagctggcctccaaccaacaagtaacatgaataagaaataaatgtggttcttataaaccgctgagatgtggatgtggtttgttaggacagcatcacttagcctaaactatacaacaactgtgaggtatggaaattgataaccaccccatttcacagatgagaaactgcagctgtgatttgcagacactgcaaagctggagaatgagagcacaagcctcctgcgcatgcttttgtttccaaaccttgtactcatcctactacgctatgtgcttcccaacaaaatttggttcctttgtagaacttctcatagttcagatttttatttatttttacattttttttttggcataggatctcactctgtggcccaacctggagtgcagtggtgcagtcatagctcactgtagcctcgaaatcctggactgaagcaatcctttcacctcagcctcccaagtagctggaactacaggcacatggcaccatatccagctaatttttatttttttgtcagactcacccatcagtctaagctccatgaaggcaggagccatgcctatctttttcaacattttattctcagttctgagtacatattagacgctattccttgatgaacaaatgaatgatcaaatgaatgaatgtatctgcccattgaataacttgattctttcatttctatgttgggaagaaaaaaagtgaccacaaaacaagtggaaattttgcattttaattttttaatttttaaaattatgtttaaatttttttatatttagggggtacaagtgcaggtttcttacatgcacatattgcatatgggtgaagtttgggcttttcgtgtaaccctcatgcaaataataaacattgttcccaataggtaatttttcaaccctcactctcctccaacctttccaccttttgttatctccaatgtccattattaaaggtgggaaatgtttagattcaaagtggacattagacccagtggcccagctggaatcaggaggtgtggatggatgacacccttaccgtccaactcattaactttctgtaagtattactaccatcatcactcaagctctgcccaggaaagggatatctgtaatcttagactgtgctgcacagctccacccattggaccctcaaactgggtgcatcccaaacctgcctcttcattttcttccccaaacctgcctctccacctgcattgctgtcttggtaagggcatcactctgcccagtcacccaacccagagacgtgggagttaaccagagttttcctttccatccctaacctagttagtcacccagtccgactgatatgtgagattactcttcactttcctagctcttctgacctgattttcagaccttatcttctctcttctggacctcaacaggcagctgcacttactactctctccatccccataccctggatcctctaaaacactttccatatagctgtagggagacattaaaaataaaccatatatccatatatacatatataaataaacaaacatatcattttcctgcttagaaaaggtaagggatgttagatattatctgcgtcagtgtttttcaaacttgtttagtcataagaatgattttagggcatttgtttaaaatataggttcctgggccccaccctcaacctacttacttggaatcttccacggaggagcctgggaatctgttttgaataaatatttcaggctgcgcttatgattgggccagtttagaaaacatttaacattgacgtagcctactagttagaatgagattcagctgtgagtaacaggaatctctaaaacaacagctaactaaacaagataatggtatttctctcctaaattatgctggccattggtccagggctgatagggcacttcctggtgtcaggaacacaggctccatgtcatccaccgtctttggcctcaaaatcatggcccaagatggcatcatccacattcctggctcaggatggaggaggaatgaaggatgcatgggcgttgagtctcaggagggctcctagaactgccatgtgactcttctgagagaccactggcctgaagttggccacacagtcgctagttacaagagaaactgagaaatgcagtctgcatgtcctatcagaaaatgtgggcaaaaacaatattgggaagtaactgtgaagaccagtactcctatttaacagaaaaataatctgaggtccaaagagattaattagtttgcccaaagtcacaggactaggtagtgtccccaaatacggctgcagtttgtttactttcagttactgaaaaataagccatcacacaaggagatgttattgctgatggttcacacagggttggcaatgctgtccagatggcatggaacaaaggaaccatatctatatctctgaaggtggcctctgtctttctaggtatctctgtgagccaagaatcttgacttttcaggaggtgacaatcggacatgatacttgcagtaagagagaggtgctgacctaaagcagaaagatttttcagctctgaacccttcagtctattaatgtctacaccacctgttaaatgagatgatcaaatgccttctatggtgtcagcctctctatgtcaaggtttccattaatcttaaagcaatgctaaagagttcaccactgcaccactgcctcctttgcctgattcccctgatgccttttgttccccccatttttggccacaactaaccattcagtcattcaacaaatccctcttgggcacctcctctgtgccagacacgatgctaagcattgggagtaaatgaagaataaaatgcagactaaaccctcagagcatcccccagctagtagaagagacaggcaaataaagtgattgttacagaatcataatctcactgcattgggaagtctgagaggcctgaggtcaagtctcagcgttactatttattacctgtgtcatcctgggaaaatctgcatttgatttctcatcaataaaataaggataaagttccctatcaaatagggtttgggtgaggattagcaaggtaatgtacaggacttggcacattattgaatgtagatggtaataatgtattgtatatttcaaaatacctaagagtacattttaaatgtttcactataaaaaatgatagttaaacaaggttatggctatgttaattagtttgatttaatcattctacattctatacgtatctcaaacatcacattataccccctaaatgcagatggttatgatttgttgattaaaaaaatattaatttaataaataataactttttaaaaagaaagagccaatgcaagctttaccatattccttttcctgccttgaaattcatggaaccatgcatcatgatagagcttctatcacttgggtctttgagtgaccaaaatgatctgagtagtcctgccagcctccaagggacagatagcacaagcaataaataaacctttgtggatctaaatcactgagattggggttgttactgaaacacagcacagactgccaagctggaaagagagtcctatagaccacaccagccaggaaatatacctgggaaacacctgctgggaagatgcacataaacacctacaggaaattttcatttgcagcagctggcatgacagctggagcaggtctctctcttcactacagccttgctacaaaaagcatttctccctctgaaagaagcaagtggtacccatgggggaagatgaagccatttttctttctttcccctgctaattctctcaaaatccagaagtcgagcaatctctaaaacagaaccacgtactaagtgcttattatgtatggaggccagtgctgagcaattcatgtctatttttcacccagcaaccccaggagattactgctgtgatgatcactcctattttctaaacaagaaagtcgaggcttaaagtatttaactaacttgctctagatcacacagatggtaagtgtgcaagttacgcttccaagcaggtttgtttgactccacttctgcttgttatgctacaaggaactgtgtccaggggccaaggagagctccagctctgaagcctgagaagctaccgcaggtgcctctttttcctaggattctagtaagtctaccatctgaagtgatcctgtcacatggtacatccaattcatcacaagaacaccagatcactaggaaaaggcacaagtaggccgggcgcggtggctcacgcctgtaatcccagcactttgggaggccgaggcgggtggatcacaaggtcaggaggtcgagaccatcctggctaatacggtgaaaccccgtctctactaaaaatacaaaaaaaaattagccgggcgtggtagcgggcgcctgtagtcccggctactcgggaggttgaggcaggagaatggcgtgaacccggaggcggagcttgcagtgagccaagatagcgccactgcagtccagcctgggcgaaagagcgagactccgtctcaaaaaaaaaaaaaaaaaaaaaaggaaaaggcacaagtagaggagggttagcaccctcccaagcctttctcatgcccatactgcttttctttttctctgttccacctctaccctcagcagcagctacacaatgatgtcataattataagggcaacagcatccagtaagataatgtaggcaggcccaacctgggctggtccaggttataaggaatagaggtgcttagcctctggggatgtgcaggaggagtccagacaaacaaacacagcaatgctcatggctcgcagggtgaaagatgaccctgtggttgtcattcaccatcctgcatctggatcttgacatgctcttttttctgtatgaaatgctcttccccacaacacctgtccttgtctacacttctttatacatctgtcacccctcctcaactcaacaaatgtgaagcacagggaatacattttattcatcttcatatcccctgaacccagctcagtgcctagcacacagtgagtactcaatgaattcataaatgaacactatagcccaagtggggatcttcatgtatctacagcatttgactccctatgaaatactgtgacttttatgcttctcaaaaagtctgtgaatcaagcaaggcagatgtcattctccttttatgtaggagaaaccaagattccaaaattttaagtgacttggtcaagatcaccagtgagcaagtggtacagccagaaatgaaactgtgttaaataacgggaccactttaacacagtattaaactgtgttaaatatttgttggagagacaggaagagaaaaggagaaatggagagagagagagaaaaagaaaaaaaaaaacacagaggtgatttggattcaaacccaaattcaatggtctgaccatctgccagtaataatttggtgagactcacactgagaggctgaatcaatgattgtttgtataggcagagataagtggacacatttcgcgttgaggaattatcaaacagcaattttagtaatgtcgttagactgtaatagagatagagtgcaatttagataggcatatcctctttctaatcatcattcgtccatcagccttggaggtcaagttgagtttaatcttcctcgatggctgtacttttggtttcagtctctcatactcactgcacctcctgtaacttccattcagcatgcaatgagagaggcatgtgtctagagactgggaaggcacggtggttctgctttgttaaaacaaaaaaggcccattgtaacactggttttcctcagatagtcagccttgtctacacttccacaaatttacccacttgaatacgctgtagtatatttcaggaaactcacaatgtttctgcagaaaggactgtttacatggaggttttcagcagccttagcaggcatgatgtttggatcctggaaatcatctattttttatgtgtaaataaacagtgggaggaaaggagaaggcatccatacaattttaatgaacaagattcccatcagtcatcaaaagaaaacaaaaggtagcttaaagggcacaaggaagctattcttctagtgatttctctgctcagctctcctgggaaaaggagtggcttctaaattaaaaaaaaagaaaatcatgctctagtatttttttttcctgtcatttcattgtctttgatcttgcatttcctaagaaagaagcacttaacctctagtatcagatcaatgttggaaatgcacgctttattttaagatccttttctaacacatggaaactctgtatcttcacaagtgaacttaacatgattcaaacagattgcattccacaaccaacgtgcttcaaaactattggctgaattcaggcataaagctggtttttttcatcaccactaatgaattatttttgaaatagcaagtcttttccaaataaaagttacttaactaaattcgagccatgatgttttaaaatcaatttttacatggacactacccaagtggattctccttgcaccaaaatggcagattctccatggatttctcctgaagggaggtgaaagcctcctccagtcacacaagtagtctatcatgaatctgcctgaattcccttcccagtgaatgaagtgtattatgttggcagaaggatactccatcatctataataaatattcatctgcatgtatcatgcacttgagctgcatgactgatgaactccggctccggaaatgaaagggaaatgcaccaagacaaatgtcacctttcaatgcttctccaacagataaattgtagttagatttaaacaaagtcagtaatttcatgctttccaactggtgcctgattcagctcagatggcccctactctgtttaagggtgctaatacccaggttggttagttgagttttggcaatctctactagagaacagtcaacaatttctacttcatatgcttattgaaatacaattatgctaaatacacttccccaggtatttatgcacgttggataatttaaaatttgggcagcttaaaagccaacataggtatagctcttttgaaaaataatttggcactatgcgataaaaatgtatttcccctttaactcaggaatcaccctcctggggatgaatccaaaagctttacaaggggtatcatttatctcccagcgtctgttttcttttgatgaggggaaattccacatcccagaagatactctctttttctctgcagtcccagagggaagggaggaatttggctgatgagtggatttgggagaaggagccacagaagaatgctcatacatatgttgggctaattttctttctccatgctccatctggggagacagtttggtctgtactgaacaataagagatgtgaaattcaattcagaaaaaaaattttaggaaattggtatacctgataccttattctgtatctaactggccttaacatctctcattcatttgtatcagatcttgtgagagaaagagaaaggtttcatgtcttagcccttatcaaacaccaacaagcttcagacttaaagatgtccactgtgaaattatttgttacctaacaatggaaacgtttgatgagcaaaatccactcagtgtgatgcataacactaggcagccactacagatcatgtaaatacaatgcctagaatatacttgataatattgaagcaaaaaacagaaggatagataatacttgcaaaacattgataattatgaaaaaaggttggtcaagcttatcagagcgtgcagagtggtgccatggatcctaggaggggaatacccagtctcaccactctgacatgttctttgcatggccaaggccaagagaagagctcagtgacatctgatattttccctactgggactctgcctactcccacagtacctttacacttgggaaaacatacatagtttaatataagccgtaatgtaaagtatgtgacaaggtgtgaaaccagacaacccatacattcaacaacaatgatgataccaaaaatatccattaaaactaagcagcaacattaaaatgcttgtgtattgctgaatacaaaatggaaaacccaggacacaaaaatccacaggcacaaaatgatgagagtatgttctgaattgggtattactgctagtatctgattctgtacaactgcggtcctaacgatatgtgaaatttgatgggaattacatttaaaattgtacttgaaaatatgatggtgaaaaaaagaattcaaagaattagagggatgttaaaatgctgggattatgacttctgttatgtaaatgtattttttggaagtgtatccttgatcatttgactatggaacaagaattctgtgcaagtattacacattcttagggagtgagtccttaggccaggtaaatatcttttatgtctttggttgaaacctgaaatgaggaaattaaggccagaaatttgatgaagtcctatcattagtagaactaggtccttattttttctgtttgaggaaacacttataatgttgactccattgccctttattgaagtttttgtctacagacaccactagactgtaagctgcattcttctgattcatttctttatcaccacccagcctagtccctaatacttagtagatacccaataaatgaacatttgagttctactccattgggttgtcctctgattgcttcagagacctttgacgtgatttcacagcaagaattgtaaattatttggcagccaggatgactttggccaatattcttttagcatcttcccaacacacatagcacaggactaggtacactaccaatgaattgattgacagttgaagagaaaatttaaagctaacaatagttttaacttttattttacgtgcagaagtacacgtgaaggtttgttacataggtaaactcatgtcatgggggtttgttttacagattatttcatcccccaggcattaagcccagtactcaatatttatctttccttctcctcttcctcctcccatccttcaccctcaagtagaccccagtgtctgttctctttaaagctaacaaatttactgatacatttggcttcttatgggccattgtccttgagcactttcaacactcattgaacatttactgtgtgcccaacattctgacatgcactttacatgcattttcttatttagtcttcataactccatgcagtaagcattgctgacatccctgtttcctagtttaataaaatgaggcatggaagaagcaaggacaaaattcacagctactgaaaagtgagactgtgattcaaatgcagagtgtctgaccccggagcccaagctcatgggtacccctatgtcatgctgaatttttgctagtcttccctctggcagaatttgcatgacaggagtaagaattttaactacagagggtcctggcatattttcgttattaccaactaaatgtaactggcatcatagtgttgttcatcacagtttccatctaccataacatctgccaatgtgctgccataccattggcctaaacattgacacaaagagagaagtcagatcacagaggtaacctgtcttgattttcaaataggtaaactctggcaaacaatatatttttgcactcaacactgattccgattccaaaaattcctggaactggcaagaagatggcagaagcaaaatgtaaacattgtcagtgcttgtaacaaatgatagttaataaaacctgaaaagattatagctcagaaactgatttcttgtgtttcccgttatttaataatttattatacgaaatccattgacctttccatggctcttttttttgaggaagagagaaacctggaacgttaattatggcttagctattttattaagcagcattagcatacaaataggacatcaataaccaattacaatcttcatcttgggaaagcaggtctcctccatcccctctgtgagtgctaactcagccacttaaaggtcttgggcacttcatgatgatggcattcaaggctcttctcaatcaacccccaggtggtctctctaacctgacaccctgcccctcccctctgcatgctgctttctagccaagcaggggtctacctgctgcactccaagcagagcctatgcccatcggcctgtgtttcttatctcctgccaatcctggccacccaatctctgactctttaattcctcaattctgtgcagtcacctcccattcttcatttattcagcagatgctgaggggatactagctaaataccaatcactgagtgactcaggggaaacaccaggagcaaagcagacatgattcctccctgcctgaggcctacaggctagtgcaggggtcaataaactttctctctaaagggccagatagtaaatattttgggctctgcctaacacagtgtctgttgcagctcctcaattctgcctttgtagtgggaaagcagccactgacatgacacaaatggatggaaatggctgtgctccaatgacactttgtttatacaaaaataggcagtagtctggacttggtctataggccacagtttgctgacccctggtttagagcattgaactctgaaattgaagagggctaggttagaaattcgaaatccagctactccacctatcatcatgtcgtcttcagcaagtttctctgcacctcagtgtcttcatctgtaaaaaggagaaaatgaagtatacaccaggctctgttttcccagtgaaatccatcccgtggttcccatgagtcatatccagacttttcaccatgacctggagaggccttcaatgatcttcctcccacttacctcttctttttttttttgttttgagacggagtctcactctgtcgtccaggctggagtgcagtggcgtgatcttggctcactgcaacctccacttcccaggttcaagtgattctcctgcctcagcctcccgagtagctgggactacaggcacacaccaccgtgttgggctgatttttgtatttttagtagagatggggtttcaccatgttggccaggctggtctcgacctcctgacctcagacgatccgcccacctcggcctcctaaaatgctgggattacaggtgtaatcccctgtaggattacagtggccccacttactcttctaccccttcgttactggttcttgagcccctgactccatttctgtggtgctgatcttccttcccaccccagggccattgtggatgcagcaccagctcctgggattgccctcctgctgtggtcacatgtcagctcctatccttcagggtccaatttcaagtgcagttcccttcaagaggctttctgtgaccatccggtctatattcacccacacacacatggaggaacagccaccagtccttccccatcttcactccttgtttgtttctttggtagcatttacgccaatttgtatttgtttgtttaactcttcattttatgtccctcgactaaattatccgtcccatgagtgcatggacttcactgtacctctagcatccagcccagtgttggcatgaactgattaatcaatgaaagaatatttgtgtcattagtaagtccatcaataaatgatggcaggtgaatgcgtctcaatttaaaaagcagcatggtgttttttctcttccacagtttcatcaagcatggtggaccaatgcctcatgtctcttcgtttcctctggcactaattccatcttagagctggttacattttgatttctgaaatgattaaatcgttgacatgtagcatttaatttgagtatgtcccaaataccctacgctgagatacccctagggtttctagggttcccttcttcttattcctggtgagttttcttctttctctgaagaacccgttcagacaaaagacagcaagaccaaggtatgaaaaattgaccaggggttctggtctcagctccctcaggttggctgtgtgagcctagacaattcaagcaacctctctgaacttgtttttttttcaattgcaaatgtagaagatgaacagattaagcaacaaaaatctaatactctggagcagtcaccagctcttgagccaatggtgttagcagatacaagagaacaagaaaaaaaattgaacatacctgcttcaaaggagcacaccactttaaagcaagtaatccaacgttacccccttttgtggagctctcagccagagtggactggcttgggccaagccagtccctgaaatgattaattattgtaacagcagagagttaaatgaagaagcgacagatggcccatgtgaaatagtctaaaatcacctgctatgaaattaattccacatcttggaggcttggggctcagaacaccatgcaaaaagtgactgttgataaattgtgtgtgtttgtgtgtcagcctctctgcaaacacctaaataatatatgtcgtgtcatgttttctttcctccatctccttttaatgtattatcatttatagaaaactgcagggaaacgtgaaacatcaatcaagccattaattcctgagattatgctaatgagatgcctggagcgtttgtttcccagaatagctgctcctcccagccccaggaaggagctcttggctccccccagctcagccctctctgcttagatcaggagccattggcacccagcggggtgctcctcttaaaagggcactgcgacgtcagcactggcacggggaggatttgcccagccagacagcaaaggcaagccacagatgaaacagaaaacgtgtgagacaaaaagaccagagagatgtgagagctcagctaacgagctcaggaggcctctgccacagttatctgtcctgctggtgagcacagtggaagaggaagacaaaaatgaaataaaagcagtaagagcttttcgagggatggggagataggcgtgatggttaaaaggtacaaaaatccagttagacagaaggaaaatcattgttttgttttgttttaagtcctaaagcacagcaaggtaaatatacagatattcctaaatgtacgatagggttatgtcccagtaaacacggaaagttggaaatatcctaagtcgaaagcatttaatacacttaacctacagaacattataacttcacctcacctacctgaaatgcactcagaacacttccattagcctatagttgaggacagtcatctaatacaaggcctattttataataaaatattgtattaaatatctcacacaatttattatatactgtactggcagtaaaaatagaatgggtactcaaaatatggtttctactgagtgcgtatagcttttgcatcatgagaaagtcaaaaaagttgtttgtctcacctaagtagtcaagaactgtctgtagttggtagtttgtgtgtagtattgagcatttctaaagtattcacagagtaaatttcaaatgttctcattacgaaataatgttaagttcttgaggtgatggatatgttaactagttgatttaattattccacactgtattcgtaaattataacatcactttgtgctccataaatttacacaattatcaattgtcaatttataatttttttttaaaaaaaaaaagatggttcatcagctgagatgacaagcagaggccagaacagccatgatttctactcatgtggaagcaaatcagggtaatgaggttggtgtcagaggagaaacctcaattacagtaactaccactcatgaggcacttattggccactgtacagcaatgttgcctattattgcaagtactgtctccccccaccctcttatcagtgaggctcagaaagggactcaaggttgcccagctggtgaaaaactgtgctgtgtcgcaaatccaggtgcaccagattccagagcctgtgatcattctgctttgcatattgtatatgtatatttaaaaactgtgctaatgaagctgacaggggttaaaaagaaaaaaaaattaaaaaattaaaaataaactgtgcatttaaatttactctttggaagtcatccagagaaacagaaaatgagtttagctgtagtgtctttaacatgcttcaaaacaaagtcacaggctacgaacagataggatgagaaagcttgtggtgacaaagcagctctgtagctcgacagtggtgctggctgatcaaaactacatttatgaaaaaactgcatagaacacaggcacgcgcacgcacacacacacacacaaaccctgtggcttgaaccaatgtcaatttcctgactgtgatgatattgttctatagctgtgcaagatgttactactggggggagctggtgttgtgtccttgggaccaccttgcacgttagtttgcaacttgctatgaggatataattatttcaaagttaaaagttgaggccgggctcagtggctcacacctgtaatcccagcactttgtgagaccgaggtgggcagatcacctgagatcaggagttcgagatgagcctgggcaacatgatgaaaccccgtctctactaaaaatacaaaaattagccaggcatggtggcgcacacctgtaatcccagctactctgtaggctgaggcaggagaatctcttaaacccaggaggtggaggttgcagtaagccaagatcgcgccactgcaccccagcctgggcaacaaagtgagactctgtctcaaaaaaaaaaaaaaaaaaaaattgaaagttgaaaaaaaaccccaacaacctcacagctaacccttccaagagaacttctgccagaattctcaatggtgtcagcttctatttattcctgcccccattactgactctatttcctggttattagaggtgcatggtctttggtggtaagaattacacaaaaagttcaaactatgaaaaaaaagatggcagatttgactactaaatataatttcttacaaagacatcataagctacatgaaaaggtaacacataaactagaaaacaatatttcaaagcatataatcaacagaatatgtataatacagaatatataatcacatatatatacgtgcacatatatatgcatatacatatatatatccagaataatataaagaattctttggcaatcaataagaaaacaatatacaacccaataaaaaagtaagcaaaaaatagagaaagacaattcacaaaaaaggaaacgcaattagtcaaaaatcacatataaagatgttcatccttactaaccatctgagaaatacaaattaaaaataataatgtcatttcacatcatcagatttgcaaaaattttaaagtcagacaataccaaaagtgaatggatagggaagaactggaattttcctagattctaatggtagtatgaattattgcaacaagttggggagccatttggcagtacctagtcaacctaaaggtgcgcatacctttaagccagcaatttctctctgagatgtgtactcccagagacactctcacaagtgtgcacgaggatgtgcatggagttttatgtataacagtaaaacacttggaaacaagctcactatctattctcaggtggttctaaatcaaggcaattggatgccaggtctgagttcttcatttcagaaccattctgccaggttgcagcttagtttaagaacaaactttctgacagaaatggcatcccacaaagcactcaactggaaccaggctgcgggaggttaagctgaggctctagttcctctgatgccagctctaggaaattcaaacacatttgtggagtgtaaacacactttcatgttctaaaggccactgtcaagacagggaactgggctcaatcagtgaccgcacaagaatgtgggcatgctgaatccctgcgaagccaagaatgcaccggggattggaagagataagccagagaccagcaagattcaaagcagatgagcaggccaccttttgttggcatctatgaagagagagtggaaaaggcagcttgtggggggcatgatggaaagatgtgaagtgggggtctcttggtcagaggaagctgttgagcagccattgaatgggaagcagggtgaaggagccacgtattggccagcctttgtgctatgctctgtgctaggtgctttctacaggttatctcagttaaagttgaaagcattcttctccctccttaatagagatgtggagatcaagttccagggaggctgaactatttgcaggctataactgacggatccaggtttcaaacccaggccagttggatcccagaagtcacttttctcccctgtggcttcactgcctttacttaaagtgaccgcttttgtaagcaatccattcatttgcactttaattcccgatattttgaaccatgaacccagattcagagctggctgggaagacccactcattgagtttggaagtactgattagcaggtggttagagtgtggcctttagagacaggtggacagagttgtctttggaaaggcccttaaactccctgaacctcaatttctatgctgtgaactaaggataaaagaaatagtacttacctggtgggaataagatgatatagacagcgggctccacctggttcctggcaccaaacaaaagcttggtgagagctaaatataagtactttatgtgtatttgttttttttctccaactagattctaagttcatgtttggagacacactaacttctatttattttgcatgccctacaatgcctagaacaatactttctatctgtaagggttagtccagagtgcactgcacaaaaacagtctttactagactgcaaaatctgaaagaatcctttctataccctaaggctttacattgagaaactggtgttgttttaaaacctcagcccctgctaggcttggtggctcatacctgtaatcccagcactttgggaagccaaggcgggcagatcacttgagctcaaaagtttgagaccagcctgggcatactggcaagatccccatctctacaaaaaaaattacaaaaattagctgggcatggtggcacatgcctgtagtcccagttacttgggaggctgaggtgggaggatggcttgagcccaggagacagaggtttcagtgagccaagatcatgccactgcactccaccctggttgacagaaccagactctgtctcagaagaatgaaagaaaaagagagagagagaaacagagagagagagaaagaaaaaagaaaagagagaagaaagaaaatctcacacccagaacaaatattagagcaggctaaactggcagggttgtcacaaaagctggaaattgtatccgtttcagaactagaaggcacatctcttagatgctgcttggtttaaggtggttgattcactttgtgtgtatctagaaaagacttctgcctgttcctaaattgtgaaaccctagtaactcgttctattataataaggaaaacatccctttaaacacaccttaaaatgtagggaatgaagtctctcaagaaacaagctgcaaaggtggctggtcttctgaatatcttatcacagttaaagtaggaacatcagacagaaaaatgccagtgaccaaagtaccccatatttgtctagctccagcacatatacggtttcatttgaccttaaccataacaccggagaaatgtccttgttagacccatcgtacaaaagaggaaactaagatccagaagactagtcaaataacagatacagaaccacaaaaaggaagaggcagaatgtaagcccaagactaccaactccaaaccaaagttcataccttaggtgttattgcagcaactttatttctgaaagcacctttcctatctgaccgacgattgatctctttcatattgtaaagttcaaacagctaatttatcaatgagtttcaccttcctcttaatccccaacaattactttttcactttgggttggcggggttcagccctgctgaacaagatgcttccttcttagaataccccaggtgagagcaggcacacgggattctcgtgtgagcactaatgttaatctgctacacggctcacttctccctgcctttatcatctccaaatcggaaccccaacccttaaccataccatcgggttgttctcaaactgagataacagacataagtcattttgaaaacgttacaagcactatacaaatgtaggcatcattattaccaaggcaataaaagtatttatcacactgataaatggtgagtatgtttctgtgcctctgtagtttccaagaacaggagtaattgcagttggcagataaatccaaggcagttaaccaaacccaggagtatttgggaaaaggcacaagttggccaaatccaaatgattttaaaacacgctataaaaataaacaagtattccaatataataattccagtttcgtcaatccttcctgctacttggagcaatgtagcttgttatgaagcaattaccctttggatccttttaatcccagctgatcattttcagctttaattgtcttgctgggtttgaatgttgttgtagttcaaatgtagccaattagcatggcctcagccaccttgtgatattttgcatgcaaagaacactccttaaaatccctggtggactttgtcccagattgtaccagtagccacagttcacaccctcaggtgcttattaagtagaaaaaaaggccagcagaggctcagagaaagccctggaagcagcaagccaagttcaccagggctcaaaaacaaagatcaagttttcataatgctggtgtcaaaatgtggtccaggatgcctggacagagagggtagccctcatcactggagatgattaagcagatggcacaggagagattcacacatctggatggggctgggaggggcagcgaggtggcctttgtgatcacaaagatttctctctcccccccttgggtgtctgtgatgcgaggtgatttggtaagcgacaaaacaaatacagcttggcatttaggatgtataggctcacatcctggttctgcaatttactggctgaaaactgtaagagaatcttacaggtgtgaacagggaacatcgtttcagggcttattctattatgattggaatgattattacttaactcttctgtggcttaatttcctcatctggaaaatggtgatcatagtagcattggcttcatgcagttgttctgaatattaaatgagcaagcacatggaatacactaagcacagtgtctgctatacataactgttcagttccttcagccgcctcgtcaccatcatctttattctctctttcggtggtgtcataactactgttcctgactccttcctcgcccacagccatctgccctccacactgctgctggatgctcttcctaaatataagtccaatcctgttctgcatttgaataaaacccttccaccattccccaacacctaccggatagagcccgtgttctttaggctggtagttaacacccttcaaagccagcgcctttctcttctcctcatcaatgtcccccgtccctgcctcccttgtagcctctaccacaaaccactcattgttcaccaggtccctagtgcctgccacacagtaagtgcttaatgcgttttagctatatgtttcctaagtaaatgactttggcatatcttagatacttagggagggaggttaaagtattgggaaaagtaggagtccaaatttcaattctgctgcgtggtaacaagttccctaacccctctggaatggttactactgagtgtcagcttgattggattgaaagatacagagtattgatcctgattgtgtctgtgagggtgttgccaaaggagattaacatttgagtcagtgggttgggaaaggcagacccacccttaatctgggcacaatctaatcagctgccagcacagctagaatataaccaggcagaaaaatgtgaaaagagagactggcctagcctcccagcctacatctttctcccgtgctggatgcttcctgccctcgaacatcagactccaagtccttttgccttgggactcagactggctctccttgctccatagcctgcagacagcctattatgggaccttgtgatcatgtgagttaatacttaataaactccctttatatacagctattccattagttctgtccctctagagaaccctgactaatacaccctctgagcttccatttcctcattagtaatagatgggaataatatttccttgttgcagagtaatggtgaagagtaagtgggatagcctatgtgtggattcctgccatgatgccttgcacacagtgggagctccagagccaccagaggccctcctttcaccttaatcctccctgaaaccagaaagcagagcaatacaaggcaagactttaactcccagagcaagcttcacttggcaacagatttggctgtaagaatagtcattgggcaattactaggcactagacaatgtgcttgtttctagggaggcaagtgaggaacacagaccaacttctcactctcagggagtttagtctcacttaaaagtcccactgcatctcaaaccagtcttgaaggtgatcacttaaggaggcaggttataaggggaggagaaaatgctatcagccaggaggctctgaaaggtcatgagtttcagaatttagcccttctccaaatttggagaaattagtcaaccctgacacttttcttctcaaaaggcagtgcagtagacgtgaagcatgtaagtgaccccctcagggacctcttgataagtggagaaaataaagccacattaacagagaccatctttcatttccccatataaaaatgcgaataccctaggatagtcaaaaaaacaaaaacaaaaacaaaacactctgtaaaaacagaacaaagttgaaggactaatattacctgatcctgagaattattataaagcttcagaatcaaaacactgtggtatttgtataaagacagacaaatagatcgatggaagagaatacagggtctagcaataaactcatgaatattgacagtgaacttttacaaaggtgcagcggaaaaaaggattgactttgcaacaaatgatgctagaacaattggatcttgatatgcaaaaaaaaaaaaaaggaaacttggatccatacttcatatcacaaacagaaattaccttaagatagattataaacctaaacatgaaaccttaaactctaaaacctatagaagaaaacaggagaaaatcttcatgaccttgggttttgcaaagatttcttacatatgatgcaaaagcattaaaaaaatagaatgataaatggaacttcatcaaaattagcacttcttctgggcacagtggctcaggcctgtaatcccagcactttaggaggccagtcaggtggatcacttcagaccaggagtttaagaccagcctggccaacatggcaaaactctgtctctactaaaaatgcaaacattagctgggtatgcctatgcatgcctgtagtctcagctagtcaggaggctgaggcacaagaatcacttggacccaggaggcggaggttgcagtgagctgagatcaaaccactgcactccagcctgggcaacacagcaatattctgtctgaagaaaaaaaaatccacttatcaaaagatacaagcacagactgaaagaaagtccttataagtgacatatctgaaaaagaatttatatctagaatatatgaagaatcctcaaaactcaacaataagaaaattaaaaactcaataagaaattggcaaaagatttaaacatgatttaaacagatactccaacaaagaagatatgtggatggcacataagcacataaaatatgctaggccaggtgcagtgactcacacctgtaatctcagcactttgggaggccaaggtgggcaaattgcttaagctcaggagtttgagactagcttgggcaacatgacaaaacctcgtctctacgaaaaatacaaaaaatactacaggcatgatggcacgtgcctgtagtctcagctacacaagaggttaaggtagcaggatctcctgagcctgggaggtcaaggtcacagtgagtcaagactgtaccactgcactccagcctcatgacagagtaagactgtctcagaaaaaaaaaaaaaaaaaaaagatcaacatcattaatcattaggaaatgtacgctaacacagtgagatgccgctacacatgtattaggaaagctaaaattaaaaagtctgaccacacaaagtgttggcaaagatgtgaagcaattagacctttcatatgctgctgctgggaatgttaaaacggcaccatcactttggaaaacagtttggcagcttctttaaaagttaaatacatacctacctcatcatccagccattcttctagatatttacaaacaaaaaaaaaaactgaaaacagggccagacatggtggctcatacctgtaataccagcactttgggaggcctaggcaggtggatcacctgtcaggagtttgagaccaccgtggctaacatgatgaaaccccgtctctactaaaaatacaaaaattagctgggcatggtggtgcacatcagtaatctcagctactcaagaggctgagacaggaaagtcactgaaacccctggaggcggaggttgcagtaagctgagatcatgccactgcacttcagcctgggtgataagagcaagactccatcttaaaaaataaataaataatttttttaaaaaaggaaacatatgtccatgcaaagacttctacgtgaatgcttatagacactttatttgtcatattcaaaagctaaaagcaaccacatgtctatccctgggcgaatgaataaatgtattgtggtatatccgtacaatgaaataccaactcagaaataagtaaaagagccagacaaaaagagttcactctgtatgcttccatttatataagattttacaaaatgtaaactaacatatggtggggaaagggtgcaacaacagaagtcactacaaagggacacaggatgcttttgggggtgatagatatgttcattatcttgattgtggggatggatttgtggatgtatacatatgtaaaaacaccaaatcgtatactttaaatacatcagcttactgtgtgtccattatacctcagtaaagttgatttaaaaagaaagatgcggccgggcatggtggctcaacactgtaatcccagcactttgggaggccgaggtgggcagatcacctgaggtagggagttcaagaccagcctgaccaacatggagaaaccccgtctctactaaaaatacaaaattagctgagagtggtggtgggtgcctgtaatcccagctactcgggaggctgaggcaggagaattgcttgaacctgggaggtggaggttgtggtgagccgagatcacgccattgcactccagcctgggcaacaagagtgaaactctgtcttaaaaaacatatatatatgaagaaagattcctgatatactgaaaaagtgtcaagatgggggaaaaaaaacaaaagcaatgagatacagaagaagagatataggggagacttgaatcccaagtgctctaagagcagacaaatgctgctaatcactttatcacccaaaactggacttcagtctaccagagttcaggcagatggaaagtagactgagaaaatgctgaaaacaaattgatgtgctataaactggaataaaattcaaagtatttgcacaaagctgttctacacagagagctgtatgattctaaaaatttaattacttacttagaaaataacacacaatacacacacacacacacacacacacacacacacacacacacacgagcttaaaaacagtgccagtaactggtatgacaagagatgaatacatttaaaaccaacccaatgtctggctggaagcagtcattctgagcttctgacattgctaatacatcagacagaggcagcaggaagagttccactgaggaagattcaaatgcaatttgagaaaccaaacaggtaccagtgagttaagggatcagcccttgagaatgaggggagatgagacccagcagagggaaggcagggaagaaggcaaagcaggtgttaatttcactacctagcagcaaggctgaaactcttgacagctacaattgccaataggcaggcatcagcttctaatgtctgctcttagttgttacagatcaacaggtctgaaagggttcatctggtgttcccctcattttttaaatttttatttcaatagtttttggggtataagtggtttgggattacatgaataagttctttagtggtgatttctgagattttgatatgcccatcacccgagcagtgtacactatacccaatatgtagtcttttatccttcatcccccttccaacttcccttctactgagtccccaaagtccattatatcattgtaatgcctttgcattctcatagcttagctctcacttataagtgagaacatatgatacttggttttccattcctgagttactcacttagaataagggcctccagcttcatccaagttgctgcaaaagacattatttcattcctttttatggctgagtagtattacacagtgtagatatgccacattttctttatccactcattggttaatgggcatttagattggtaccatatttttgcaaatgcaaactatgctgctataaacatgcatgtacatgtgtctttttaatataatgacttcttttcctttggatagatacgcagtagtgggattgctggatcaaatggtagttctacttttagctctttaaggagtctccatgctgtttaccatagtggttgtactggtttacatctccacccgcagcataaaagtgttcccttcttaccacatccgtgccaatgtctattgtctaggtgtgacaaacgagttcactaaagtctcaggatataaaatcaatgtacacaaataagtagcacttctctacatgaacaatgatcaagctgagaatcaaataaagaactcaattccctttataataggtacaacaaataaaataaaatacttaggaatagagttaaccaaggaggtgaatgactgctacaaggaaaactgcaaaacactgctgaaagaaatcatagacaacacaaatggaaacacatcccatgttcatggacgggtagaatcaatattgtgaagatgatcatactgcccaaagcaatctacaaattcaatgcaattcccatcaaaataacatcatcattcttcacagaaatagaaaaaaaatcctaaaattcatatggcatctaaaaagtcccccttgttttgaaaacaaagaaacttaaggtttgagggttaaggtggtcttcaaaaaaaaaaatctagcttttcatgactgtgtaccacagcaacaccctctttgaaaagactctgagagtcagctcaggcgatgctagagccagactccctggtcttacatcctgtgtcttgtgtttcccctactcctgaaagtgcaactttgggcacgttattaagcatctcactttctttaactgtaaaatgaggcaactaataataccacctcattagggttgttaagtcagggttctctggagaaatagaacccatagggcatgtgtgtgtgtgtgtgtgcgtgcacacacacgcgtgcacacatgcacacaaagagaaagttttaagaaactgtcccacacaattgtggaggctgagaagtccaaaatctgtagggtaggtgggctggctgaagacccagagaagaatcacagttccagtccaaaagctgtctgatggcagaattccttcttccttcagggaaatcagtctttttctataaaggccttcaactgattgaatgagacccacccatgttattgagggttatccactttacacaacctccactgatttaaatgtctacctcatctaaatgagagaggtgtagaataatgtttcaccaaatatccaggtctcatggcctagtcaaattgaacacataaaattaacagtcacggggtgctctgagactagccctcatcttctcccttctcaccacttcttcctaacaaatttcacaacagttctcaggcttagattaagcatgagtgaaattgtcttctcctccttctccctctcctaccctctcatatttcctctttgaagaaaccctggcacctcatcttccccctccccttgtttgctcatcacagattcccaaatagatctgtcctctctaacagtatcctgtgctctaaactagtggcttccaactttggctgcacatgagaatcatctggggggagcttttttttttatttttgagatggagtcttgctctgttgccaggctggagtgaggtggtgcaattattctaagatgctcattcctcacattttaacatctctgacactggaatgccacttgcaattcatagtttcctacaactataattggtagcatttaaaaaattatcttattgatacataaagaagcatcacacaatctattgtgccttacatgaagtagaatgtggtctattcaaaaggtccagggcaactctaggcatgattggtacttaacaaaaagttagttcttttaagtttttgtttttgtcttttgtttttgagatggagtctcaccctgtcacccaggctggagtgcaatggcgcggtctcagctcactgcaaactctgcctctgggttcaagcgattctcttgccttagcctcctgagtagctgggattacaggcacgcgccaccacatcttgctagttctttgtatctttagtagagacggggtttcactacattggccaggctggtctggatctcctgacctcgtgatctgcctgcctcggcctcccaaagtgctgggattacaggagtgagccaccacatctggccctggggagctttataacatctccaaaaccaggccacactacagagaaatgaaatcagaatttctgcaggtaagtcccatgcatttagttttaactccttgggcaattccaactttccaatatgcagtcacatttgtcctgtgcccttttccttcaaagactaatcccacagcagaaggtcagatatctcatctgcttctatctagtgatggattacatgtttgttttcatgagtttcctatagaaacaacaccctgattaatacacaatacatgacccaaaaaatgagaatcccagacagaccagtgggtgaagggtgtaatttaggatactatcccgcgaattacatctcacagaagctcacctgcttgaaggatcagccttactcatgccctatgtgctcatgaaagagtgcatattcatgagccatggatgtcaatggcagcaagaaagaagagaaaataaacacactcaaccagtcggatctgctgagtcaatcatggaatccaatgagacacgaattcaaatgccgcaagtaaacaccagtagtaataagaaccatcgttaattgggtgtcttgccagacctaatgctgtagtgctcagttttctttgcctctaatcttcactactctgaagtgcagatctttttatctccaagttaaagaaggaggccaggctgagaaatgataagcaatgtggccaaggctgcccaattaagaaaaccagaatatgatttgcaaagcatcttcacatccattatctcatttgactccaaaacgtcctgacacacctctcttttctcagcaagttgtacttcttttgtctgccattttactaagtattcatttcacagacaaaaacccaagatgccaatacattctgaaatgacttatcccaagccacatacccggttagtcatgcaaccaggactcatgcctcaacttgcccatgccagctctccttcgctttcatttatatatagggctgtctttctatccactgacttttcagaaagttgaactgctgttatctggctctttattaaggtatattaatattgaagtaacttcaccaacttaaaataactcccctaactttcttcacaattcctcctccccccatccaaaggatgggctggctcccaacgactacattcgtacaatatgataccccaaccctcttcagttaattaaaccaacaatggatctctgactgagaatgaaccaatcagattcttttcctctgcaatttgaaattacactgagtgtttctttctccatgtggtcctagctgtaacacatgacttggatgcctagtagtaggtaacaataaccattggtaatgcttgccaaatgtgcccagctccctgccttctaggaacctggtaggattgtcctgcctgggccctttgtgaatagttcagtctatgtgcctagtgcctgccagtcactaggtttgtgagcagatgtgacctgtgcacttctagacaggatcacatcaaaagttttctctgtctctctacctctctcttacgaatcagaaatctttgaggtggtggctgctttatcagcctgggtctcagagtcgtgaagcaggaactggagttcccctgccaacccacattggacatgtaatgtgagccaagaataaaatccttatttttgtaaaccactaaggtttgggggttgttcgttaatatggcatagtctagctcattctgactgatagttgtagaaataatagtaaacccttataaaccaatagggtttgggaattataactacagcatagtctagaccaagaattggcaaagtatagtctgtgggctatagttttataaactacatgcaatggaatgcagccatgctcgttcctatttacacattgactatggttgcctgcatgctacaagggcagaattgagtaattgcaagagagacctaagagcataaaaagcctaaattattttctatctggctctgcataaaaaaagtttgctgaccactgacttagaccattctgactgattacaacaaaaataagaacaatagcaaatacttgtgtagtgaccattctaggcatttgacacacattaactcactcaatccacacatcaaccagtttccctgcctccgtgcttgcatccgctgccttccttaaatccatttttcacataagcaaatcaaaccaagtgagttttcaatcattcagtgtctcttcatcacttatctcctacctgttataaaaatttatccaaattccttatctctgtgcctcagtttcctcatctgtaaagcaggggcgatatcagtaactacctcatagacttattagaaaaattgaatgagctcattcagccctgacacttggcacagttcaatgcctggcacttagtactataagtacgatcatgaaccacatgatgttttggtcaacagactgcatacacaacagtggtgccataagataataacagagctgcaaagtttctgttgcctagtgatttgttacaactgcctacagtattcagtcagtaacatgctctacaggtttgtagcctgggagcaatgggctttaccctacagcctaggtgcgtattaagctatcccatctaggtttttgtaagtaccctactctctacgaggttcccacaaagacagaattgcttgacaacacatttctcagaacaagtccccatgatcaagcaacacatgactgtattactcttaataacaaaacccacaacactgaaagcagactcaagtatctttatttaacaaatgagaatattcatactgccacataataccaatacatagtagggactcaatgagtatgcatgcaataaatgaatgtttcttgttctcatacctgacactgacttctaggatccttgctaggggacatcccctaccacaccccaaaataaatactacctgcatttttctcctgccagataaatgcagttgagtgattccttctgaagccatttctaataccatgacgctataaagaaggtcattcagcaaactagatggtagttactgtgtcacttttaaacaatggatattttgaattccagagaaaatggtgttaggtaaagagtgacattttattataaatttcctccaatgtcatctcatttacttttaaattgaacttaggtgtgtttgaacttgtccctgaactcttagtcactcaaaacacaaacacacagtttgtaaagaaagtttgcctcctgtgagacccacaaggcagagggatttgatgggttttttttctttcaaatctgtaatgaagatttttcttcagacacactttctccttctgtcactgcttagctctgcttagctgtacctacattctctctgaaatgttacctctgtgaatctcatcttgcccatttgtttaagctgctgtcttttaagaagcgtttcaagggaaatacaccctgaacagcatcatcaagcctcagtaatgtcttctgattacacatgtttgatctgcgtgaattccatttctctcttgccttcttcatcctagtaactacagcctctccccgataacatcaacacaccagcctgatagggccagcaggagaaacaccattccagggatgagacagaaaatctctaattgttctgaatttcataacaagtagcaggagagaggagaaagacaagaagacaggaagcgccctcactctctttgaactccaggttggggcttcgctcaaaacagaaaggctggctgaagagtatcgcatcattcccagaagaccagcctctgttattgttattgtcacttcttttttttatgagacagagtctcactctgtctccccagctggagtgcagtggcacgatctcggctcactgcaacctccgcctcccgggttcatgccattctgctgcctcagccttctgagtagctgggactacaggcacctgccaccatgcccggctaatttttgtatttttagtggagacggggtttcaccatgttagccaggatggtctcgatctcctgacctcatgatctgcccacctcggcctctcaaagtgttattgttacttctaaacctgctctcctgtatgttaattcccaaaaatcaaccaagaagctaaaattctaaaattccatattcttgataatccaccacttaactctgtgcaccggccaaaatgatttatctgcgaggtttctattatgagttgaactatgtcccccaaaaagacatgtgaaagctctaaccccgaggacctgaaaatgtgaccttatttggaaatatggtctttgcatacataatcaagttaagatgtgattatactgaattagaataggctttattccaatctgacttgtgtccttataagatgagaagcagcgtagagacagatacacagggaagagggccatgtgaaaacagaggcagagactgaaacgatgcatccacaagccaaggaaggccaaggattgctctttggccttctgtgaaggccagaaaagaaaagggcagaagctaagaaaagggcattaaacacattcaccccaaagccttcagaaggagcacagctgtagggccaacatcttgattttgggcttctaccttctagaactgtgagaaaatacatttttgatgttttaagccacccagtttgtggtactttggtatggcagccccagagaaagtaatatagcctccaagctgccatctcctgcctcttttccttcacgtaggacaatacctcacctacatgagctcagcatcttctctcaagcctatcccatatcctcggataagacatttggactcctgtaatctccgcttccctcaacctaacactctccacggtgcattctaattgtctctctctacccacaagactacatctcagtcatctttgaatgctctgcacagagccccttgctcagtagacatacaaccaaaatggaaagatgagaaaagtgaagaaagtggtcagatgaaggagatgggtaatgtctgaagtcaaatgtgaaaaggttcaaacaaagatatgacagaaaaaaatattcattctaagggtacaaatgactaaggctataatctagtgaaggaaatgtagatgatattgaaaaaaaaactgaagcaggtggagtttgggaaccagaggaatataggttaagggaaattccatttcaaaatgcaaaaacagagttgtggaggcaaattaacgctggtgaagataataggtttgggatatagaacacgagaggggaagcaaagtcagcagaaatagcaagggaactttgaatcctgcagaaaacaatactggcctggagcacttaccttccagattcagctatgagcccatcttaaagacagtaccctccatctgacaagcatacataaggactagtttaccaaaccccccacactcaaactaggggacgccactaggtgcctcatccaggaagcttagttggggaacctaggacagacctgctgatacaagtgatggtggggttccgaaatgtcatacccgtaaccccactggatatatcccactggaatagcaacggcgtgaggtgcacagtggtaggtcagaaagaacctactatggatctaactacaatgattttatttagaccttgcccaccaggtgacataagggtcattatccccatttcacagataggaagactgaggctcagtgaagctaagtgacttttctaagatgacctagctctagtgagtgcttacctcattacgtcttgctctacatgtccacccagtttgcctaagatgaccaatacatgggaaagcactttgatatttgttgaatggcttagaaacagaagaaagtattcatgctcagaacttgctaaggccagaggtgctcagtagtgaaaaatggctgactcaaaaagtagtgtatttgcccaccctcactgaaaggtcaccatagagaatcttgcctctgtaagtgcagtggatacccctcaaaaacccaccctactgtcatgtttggtccgaacaatttgccttcgcctggtcatacatggcccttcattgctctcctcctctttgctgaatctcatttctttcttctccctcaccttagctctccacttttgatcatgcttccaggagctccccctacccactccacctcccatgacggattaatctaattactttgggactcagctcagaagtcccagagaacactgtggcttctgcttactgtttcatatcccagcacttgccatctgctgcgtttgtctattgacatatctctcttccccattagattgtaagactgtgggagctggggtggcatctcatagatatacccctagtgcctagcacagagcccagcatgcaggttgccttgtggattctatattgaaagcaccagtatatgttgaactgtggcagtccatccactctctgatttctcttctcccctctcagctgcacaattcctcacagatctgttgataaagacactatcaatggcaagctgcagaccttgccttatctgccattcttctagaaaacatctatcctctacaaagcccaacatacaagatggtagaaaagaggagaatcatggccaattcctggagcatccataagatctgatggagactgagatgggtagggtccagatcctcttttcttccttaaaaatggttatctccatgaggatgaggatctttagaacagcactggctgggccaggcatttcccagagttcttctgatcccagggtccctgtgggacttctcttcatgtacagctctgaataacttcaatgaaaaacaaggaaagtaaagcaagttagagaaccgttccaaggggcctagccaaataattagaaagattggtctggaaagactttgaaaattccaacctttatattattgcaacagacaagaagaatccagacttctgggccagagaagaatatgctgaaaagtccacacatatgacacacaagctggaggctcagtattccacttaggaaaaagaatcacaaggacaatcctgaattggttccacatctgtggaataagggacagtcactgggctgacttttgaagacagaaagatgaattattaaagcagtgcttgccctgaaggaatcatagtaattttaaaataaaaaagtcaaaagaattacataggtcaacatcttgactccatgcccaatatgctgttccaattcgtttactgaagaactattcattctttggggcctttcaaatttttcacactgtggaccacttcataaagggcaaaaaacagggatcatattagcagggtgtaaaaggggaaattactaagaagtcagggatggattcacttgtgatgcttgtgaatgcattcttcttctttttattaattattacaaacaaattaatcatttatactcaaaaccagtatgaaaagaggccaaccctgagatcatcaactccatcagagttggagagcattcattcctatttaccctttcagactcatctaggatttcgcttcctccaggaagcctccttgagtccccgccttatccaacagaatgaattccttcttacctgggccttcagcatgccacacaaacctatcatttctgtgtgtttgtttatgtctgagtccagtattgcaccatgagctaactcaacaaggactgagttttgcccctgtctaatccccagatttatcacaatgactggtacatataggtgcttcatgagtcatgagggtctgttgaatcaaatcaacacaagtctagaaggagaaagtcagtccgcaggttatcagatctctgaaataaaccatttgaaagcattaacccaaggctcagcataaacaaataaattaaattaaattgccttggaaagtccagccacccaaatcttgggccacctaaagggataaattgccactctgcactgccagacaaaatgacagccagccagctttcaccaaccactctgaagtcacttacccgtgcaaaattaaatcctcactaaaggcatggaaaaattaactgagtcattcttgaccaaaatgtggtttccagttatctaaacttctcccacaaagagatgacccatcatatgaaggttcctaattctctcagggggggttaatagattggctattgaccagacacatcatccaataaaccttcctacctgatctcagccaagatctcccgccttctccttgccaggggcctgattcatgctctaggacacctgccagcagggctcttgacctgattcccagggaaggacagggcagcctaagagaacaagacagaggcagggtggaggcacagcctgaaggccagcggggagggaggcttccctagaagacagacgtaagtgcagctctgggcacacacattggctgtttacctgggatcctcacacaatgtgttgcaagagttctttcacgggcagattgcagcctgcagattactcagcatcagcaagggtgagcctgaggggaagccacagccttcacaaggaaaccggcccacacccaggttgcaccttttaccccgggaactcgccccgggccagttcctatggaggctgccaagagagccccacttgaaccttggcagggaggtagtgcttgcccggggtgctggggagctgctgtggattctgggacttgcttcctgtcctttctccattgtccacctttctgaattttccagtgtattctggggtgtgttccaaagaaggttttacaaagggaagatcatagtggaattttgcaacagccttctagccatcctcttcctcagctgctgtcttgtcctgtctactctgtctccctcaacactccagagtgaactccctagaggactcacctgagcttctcactcaccttcaggaaccccatcaagagctccctgtttgttgtggtcctaactcattaacaggacatacactgccccacccaaccttagcctccacagatttacctccaagctcaaagagggggccaaggagcaagtttagggagtggtgactctcatgacctccattagcagcaccctcattctttaatgcgcattgtcagctgtttccaaatcttatgcagagaactgtgcaaacacagcttcacagtcccctcaatttctcttcagagccccattactgtagagaacctagaggcaccctgccatgccctcatcacattgccagcttagaggctaacttgtagttttccaaatatatcctgcattttttttttatccaccaaataatctttctggagccagttaccagcaatcccatcaggaaccacagtcaggcacagtcttcccagattccccagagggaacgatgccactgaaccagcaactgtgcctttgccagaaattcccttcctactcagcttcctacctgttgaccaaacttctacttcctcaaaactcaagccaattgccatttgctccgtgagatcattcctggccttctcttagtgatatgccctctgggctctcatcatctctcggcggacttgccttggtggtctcttttgctatgtgtctctccccatgcgaatgtaacctccttgaggacaggaatcactgtctcatctctgtatcctgatggtaggagcacaatcaatattggtggcatgtaatagtccctctcacagcctttaagatcccctttgaaatgtggacccagtctgacctgtagctctgtccaaccctcctggttacatccaagcctccagacctctacagctgccacctcctggcctccctgcttcctgttcaattccctagtctctattgcccctacaacataaatccaatcacatctccccagctcaaaatcttctgcacttagagaaacatcccaagtccctaccacagcccaccaggccctacgtgacgtggccccaggtaactcaggtaccccctttcctcttccccaactctccacacctcacgacagccacactgacctcactgcttctgaagcccacccaaaagcattcccacctcaccccattgctctgctctctcctctgccgaaacacagtttcttcaacatggtcacccctcatttcttcccactctgcagtccctattcctgtggtgtcgctattttcatagatttctcattgctaggtagcacaggcattgctaaatatgctccttgatttgctatcacctgttgcccatactctgtgccctcagggctcttacagttgtcccaggccatacatacagcaagcgtctcctgagtaagctgctctgggcgcacccgttttctgctccttggggcagatcctgaaagacccagggtgaaggggatagaaggtaccaccttctctttttctcccagttctgatccatgtctgggcacagaggtgtggtcatggagctgccagggcaacagctgggctgcaagagcctgcacatggcacgcctagtacctgctgagaggctcattcctgagccctgtatcagcacccaggactgctcgcagaggaggagctgcaaagccagaaagcatcctgccttggctaaatcacactcctcaaaccatttcctggcaatatatggggcaacttgaaaggtgacaactatataggttaacccttgtctgcactccagccatgacaatagtctggtcacaattcttctctactagaccttactcgagaacctccaattcctctttcctggagtttccaggggctacaggatctttccagtcctttcctgactctctctatccggactctccttgctccattcctgtaataaactgcttgtggtcattctcccagcatgccataccctctaaagcctccacacctctgcttatgcagatccttcctcctggactgccctttcccctctcctttgattaataagttacattcatctttcaagcctcagctcaaatgacaccacctctatgaagtatttcctgacacctccttcgagtgggttccagtccaggccaagtgctctccttcatgctcccatccctgggacaaattctatcatatatcggtagcattttatttcactttcataaatgtttccagggctttctccccaactagggctatgagctcttagagaactgaacctttggccaggcatggtggctcacacctgtaatcccagcactttgagaggccgaggcaggtggatcacttgaggtcaggagtttgagaccagcctggccaacatggtgaaactcgttctctactaaaaatacaaaaattagccatgcatgatggtgcacccttgtaatcccagctacttgggaggctgaggcaggaggatcccttgaacccgggaggcggaggttgcagtgagccaagatcatgccactgcactccagcctgggcgacagaaaaaaaaaaaaacagagagagaaagctgaacctttattcaccagcactaaaaggccagagaaaaatgagaaaaattgtaaaatgcaaatcagttggtgtcactcccttgctcaaaaagcccccagtggctcccacctcactcagactcaaagtcaaagtccttcttcttacctacgagaacctacacaatctttatcctgactatcctgtccacccatcagctctctgcctctacctcctgggacctgcctcctcattggctcttctccaggtacaccagcctcctccctgttatttgaacatatgaggcacgtgcccacctcagggcctatgcactgctgtccttgcttctggaacaccctgtccctcagttatttatgtgaccatctccctcacctcctcctatccctgcagtgagatcttccctaaccagcccacttaaaaccaaagcccaccacactctaagcacgttgtcatttcctatgtcccttctccaccttgcttttctctatagacttcatcaccatccaacatgctatgtgttttatttatctattttggttattgtccatattgcctcactacagcttcagaggggcaggaatttttgtctgtttacctcgttattagagactcaatgctttgaatagtgcctggaacataagaaggactgaatattttttgaaggaatgaatagtatctctagcatctagcatatttcctggttcatagtagacatccagtaagtaattgggaataatgaatgaaagaagtcaggtggagaaggagagaagaaaggaaggaagaaaagacagaagggaaggagaaaagaagagaggcaaaaggggagagagaaaaaaagaaagagaagaaggaagcaagaaagaaacagatacagtagggagacagaaatacaaagaaaaaccagcccttatttgcctaaagtcctcagacaattgtgtgtgttgtgggcttagacagtattaggttggggcaaaagtaattgctgtatttactgttaaaattaaagggaaaactgcaattacttttgcaccaacctaatagaatttttcatcctagaactacctatcttagatttcctgggaaatttctctgccctcagcttcttttttttttgccaacacagacccacccagagatgaaaacatgaatgttttacaaggatgcttggtcattagtttgtgactcacactggcaaattctaaacttcagcttgctacctgggatacctgcatgcatgcagttcctccaaacctttggccaagagctcttcacttaatattttaaagagatttttgtttttaaaaagaatgcatttcatttttattttttgaaatggatctcgctctgtcgccaggctggagtgcagtggtgcaatctcagctcactgcaacctctgcctcctgggttcaagcgattttcctgcctcagcctcccaagtagctgggactacagacatgcaccaccctgcccagctaatttttgtatttttagtagagacggggtttctccatgttggcaaggttggtcttggtctcttgacctcgtgatcctccagcctcagcctcccaaagggctgggattacaggcctgagccaccgtgcccagccttaaaaagaatgcatttctttataattgtagaatacacacaaagacacaatgaaaaaaacaaccaagtgttaatccgtgtttgtttcctgtacttatatacatgtatatgtagttatcaagccaggcgcgatggctcacgcctgtaatcccagcactttgggaggcgggtggatcatgaggtcaggagatggagaccatcctggctaacacagtgaaaccccgtctctaataaaaatacaaaaaaaaaaaaaaagaatttagccgggcatggtggcgggcacctgtagtcccagctactcgggaggctgaggcaggagaatggtgtgaacccgggaggcggagcttgcagtgaggtgagatcacaccactgcactccagcctgggtgacagaatgagactctgtctcaaaaaaaaaaaaatgtagttatcaaaatacatttacgctgtgcatgtatatcacttcttatgtctggagttctactattgctggatacgtgcttaggacatagccagggaagcagcaggaaggtgtacactctggaaactgacatacttcagaccagtccaaactctgatacttggtggctgaagaccctagttaaattacgtaagtaaagtgatgttcccccatactctgccaggactcagggactgtccgagtttacacctgctgtttcagtgtaattaataagaacatccctttaatgctcaaaatgtcccagtttaaacaataagttatatggtccttctatccttcaccctgtgagctttgcttttctctactgtaaaaatatagaaaacaatatccatttccaaagaactattatgggaattctattaattatctttgctgtgtaacacaaactacccccaaatttaatggcttaaaacaacaagcacatttttaactcacatatgttccaaggatcaggagtctaagcatggatgagagggtggttctggcttagggttcctcctgagtcctctgtcacattgtcacctagggctgcagtcatctgaaggctggattgggctggaggatttgctttcaaacccattaacctggctgctggctggaggcctcagtttctcaccatgtaggcttcaccttggggcttctcatgacatgtgaatgatccaagagagaaaaagagggaacacaatggaagctgccaatatttctaatctcaaaagtgagaacgcagcctggtgccgtggctcatgcttgtaatcccagcactttggcaagtcaagacgggaggtttgcttgagtccaggacttcgagactagccctggcaacatagtgagacctcgtctctgcgaaaaagagaactaaccaagtatggtggcatgcacctgtagttgcagctactcaggaagctgaggtgggaggattgcttgagcccagaggtcgaagctgcagtgagccgtaattatgtcaccgcactccagcctggatgaaaaagcgagaccctgccctttaaaaaaaaaaagtgagaaaccaccaattctgccacatagacccaccctggtacaatgtgggaggggactacacaaaagtgtgaacaccaggagggaggcaggatcaccggggccttcttcaagactggctaccacagaacttaacgtaaatactgcttgtaaagtccctggaacatagcagacatgtagccaatgttagctacttcagagcaggatcagacaagaaaatcttctaaaaataataggcagccctggtaagttcttcacagctaaggatttaaatattatgtctttcttataagccaattcaattcagttccacaaatatgtattatatacctactgcttgttattatgtccttgaagccaacggcaattcacaactaactactgagttgttgtagatccttaaactcattacttatataaacaaaaaggtactgttttctaattcaagatgtttctttatattcttaaacttctgaagatgtaatcttagcatgtcatttgagtgtcgctgtcagaagcatttgatgtttactcctacaaagtaagactaacagagttttctgtagtcaatgcacaaataagctaatttgcctggtgtttgaatatacatcatattgaagtcaaggctgcaattctaagcatgtaagaagaagaagagaagttaagtaagaattcatctagccctatggtggacacagtcgttgatgcttaaaaacaatgagttttgattgagcttacagaatccattcaaaaggtaagctaaactaaaatttcagacttcaacactaaacaattcacccatgtgaccaaaaaccacttgtactccaagagctattgaaacaaaaatgtgttttctaaaaaagtgagcaaaacatattacctccactacctggggctgcagtcatctgatccaagttaccattacatgaattattgtgataatttttcagctatttccctttccttcttcctttgccctccaccctacctattctcaacacatcattcaaagtgacccatttaaatatatctgatcacatcattcccctgctcaaaaactcccaatggagtcacagaggcattgatgccctggccatatccattctgcattcagctgtgcaagtcaattaggctctgcaaccctctgcctcagggcccttttcctggctggagaagcacacataatcaagtccagggcaaacagaatgtgccagatagttaacacctttggacatggccttcaaccaccaatggtcagagagccggtggatcagtttcccaggtccttcggcctgggtggtgatgacatgcaagcattctctacactgtctcccagtggtcccttgcaagacagagttgcagttgcttacaatcgcaaccagcttgatattaccccttttactgggttctttttctttcctgtcttacctctccacacctattctggtgcttcctggaatcactttccacataaactacttgcattcaaattattgtctcaggatattcctctgggtgaacctccacccaaaaaaatggcttccccttccagggcaaaggccagagtctgtgccgtgatccatgaggccctgcacactctgccctcctatcgttcttcctcacgttcactacactctagccatcttggtttcctggatgttcctggaacattctaagcatgccttcaactgagcagctttcctccctgatttcctgttcctgagatatttgcttatgtttatatgttatatgtttatagccaacactctaccaccagcccctccaagtagaatataaacacagaaaggaaagtgactttgctctgggttttttcttttctttttttttttttcctttttttgagataaggtctcactctgtcaccctggctagagtgcaatggggtgatcttggctcactgcaacttccgcctccaaggctcaagcaattctcctgcctcatcctcccaaatagctgggactacaggcacacaccaccacacccagctaatttttgtatttttagtagagatggggttttcattattttggccaggctggtctcaaactcctgagctcaggtgatccacctgcctcagcctcccgaagtgctgggattacaagcataaggcaccgcacctggcctgctctgttttagtcactgcatcatttctagtaattaaaatagtgctggatacatagtagatgttcaacagatacttgttaaattattgaattaaggatgacttgaatgaaacctgattaggtccagtaaaaatacttgtgaaatacctgccaggcccctagctgttattattggcgcccctgcaaggaaccttctacttcaccatgaataatccagtcttttcactttccacatgatgaggaccagagaaggtaagcatgttgcctaatattacagagctccccagtggcagagctaggagcaaactctagctccatctgggttgtggagggatgagaaccagtctgtctcggtttaatctcaggtgtaccacttataagctttgtaacttgtaaataacccaggcaaatttcttaacctttctgagaaccagttttctcatcggtagaatcagatgaagcacccatttcaacaaattcagatgattacacaatataatgagtataaaagagcttggcacatagtacgtatttattaggtgctcattgaatctaaagaagtactaacttaaaaacattcagaagagcaggcacatgcttacaataataacagtaatactttattgggactaaccaagtccaaagcactatgctaagacattttacatgccttatttcattcaatccttacaacaccctctgaggttgattctaattttatctctttctacagttaaagaaactgaagctcagagaggttttctaacttgcccaagatcactaagacaaaggccattgctctgaccctggactctgcgttcataatcactgtgctatactgcttagagacgtggctcttaggtccttagagatttcttcaatttcaaagacttgtgaaatataaaggacatggtctgcttcccagcaggaccagggtaaaggcatttccaaagtctgataattgctgtctctttgaaatctctgttgaaggaaactgggctgcattcatcgtaggttgtaggatctcacagtgctaaaatctagaatccaattcactatcattgaagcccaccttcaccctgggtagcaagcttcccttcggaaagtaaagtcattgcttgcctgggtgtgtgtgtacctcggtatctctcacacacacacacacaccagctcaccttcatttacttacacttctagcccagcgcttgtcagtgtggtctagatcctgaccttcagcgcaacacctggaaattctttagaattgcagactatttgccatctgtggtggctcatgcttgtaattccagcactttgggaggctgaggcgggcagatcacgaggtcaggagtttgagaccagcctgtccaatatggtgtaaccgcgtctccactaaaaaattcaaaaattagccctgggtgtgctggtgcgtgctggtgagtcccagctactcgaggctgaagcaggagaatcgcttgaacccgggaggtggaggttgcagtgagccgagatcacacccctacatgccagtctgggcaacagagtgagattccgactccaaaaaataaaggaaagaaatgtagactatcagccccaacccatctaccccactgtccccaaccagaccgatggaatcagaacttctggggatggggctcagcactttatttcaatgatccctccaggagatttttatacacaggatactgaagtctgagaaccaaagctttagcctgcaaaaagcaatttgtccaatctccccaccactttctccaaattgagcttcagtataaatcacggctcctcttgccctttaaatgtcaaggatcctgagctcagagaacaaggacctcagctggaaatgccggtctgaggctttggccctgggagtgttggggccccagtctctgccaggcatttgcagcctactcaaaaatcatagcttctcggaaagccacctccctttcacttagaaatacaataaaattcatgtatggaagaaaaagatttttaaaaaaacagacctggtaaggcagcaacagtctccaaatagaacgagctggctttggggagggccgggggtgctgaaatgaaggcactcctgggggcttgttgcctcgccaaagttaggctataaacactccctccgctcagcgaccgcgatggcctcatttggtgctgctcacccacttcagtcatataaagagcgataaagaaagacaagggcggaataacctctaaataaaagatgaggtaattttgaaggcgcattaggattttatgtgtattatggcttgtggttttctattcaaacccagggagggcttgcgctgaggctggccctgcaaatggtccagggctgcgctccgcagcttggatggtttggggaaggcaggaaagagaaggggagagagagagagagacagagacagagaaagccatttttcatccctttggcctgggttttattgcaccagacgttaccaccaaaagaataaaaatgaagcatcccgggtcagcccttcctctcaggtttatgttttcctgaaggggaagtttggacagaaacctcaataggacaataaagaccagtcctgaaatgaaaggctcactgctggtggcccggtgcagcctcaaagctcctctgaaaatgcagcggggtgatgctttgcaattcagacggggtagcctttgcagcaccaacatgtctaaatgccacaggaccctggaagaggacaaaagccccctttccaagggtccaagaggactcagggtggggaagggagaaaggggaaggctggcccactgcaagttcttttcacaaagtgtttttaggcagctcaagacagtaaggaggtctggttgtcctggagggcaaagccctgaaactaatcaccaagtctccttgctgcctctatttctcatgtacaaaatcaagattgtggcatggacatcatcaaggccaccctcattccctgagcagtcactaaatgtcccccctacactaaggctttacttgcatatctccagcaccctgtagaatgagctttatccccacttcacagacgtggaaatcaaggcatacagagctgtaatacctcacctgagaaaaagcaaaggaaccaggattcaaatccaggtctctttggcttcagaactcacgctatacctggcagatgtttgatgatactgactatgttaacaatattaggaataattcatattcttggagcactttccatgtgccaaacactgttctaagttctgtattatctcatttaatcctcacagcagccgagaatgttttaacccagttgacagatgagaaaactgaggtccagaaaggcaaagtaaatagccaagttcacacaagcaggcaatggatcatttctgccacaaaccacacagagatgcctgcaggaaccacattctgttctgaagattccacattctttactccatcaatgtgtttacatcacctactatgtgcagagcacctaaccaggtgcttgagggggacagaagcctgcaaagatgacagcaatctggtgcttgccttcagagagcctagagtctagtgagaaaggcagatacatgcacaggagagtttatgccacagtcttctctaaatctggggtcttcttacaggaggcctctgtaagcctgtctcctaggaagttttagtggggttgttcccgtaggcacatatagactcaagcaagcttcccagtgtcaaccagcctaattccctgagtcagcagcagcaaaatatagatacatccaaaattctttgaaggaccaggtagcccagtgtgtttcaaatccaggaaagggcgtcgcaggtctctatctcaaaccctgaaatataacaattggcttgcttcaaaattgtttggccatctgtgggtacccccatcccagcctgaatcaccccaccctaacagaaagggacacggcaaaaacagaaccagaaagatataagaattggatattcagaattggaaagacctgggatgtctcctaggcaggacttcccctccctagctgaatgatcttgggcaagtagtttaacctctctgttacagacgttttctcatctgtaaaacacggataatgtatactccgttttagtactgttgtggggaataaatggattaatacgtggaaagctcttagaatagcgcctcatgtctgataagcccttcgtaaacattgccaattgcaatttaactaacaaatatgtattgaaaaccagctagaactaggatgattgacatagatagggtccatacaaagcactgtgcctgatgcattccaggggttcagtagctttggaatgaggaatcccagcatctcagcatggggaggcttccagcataaagaggtcagtgctttctcagtggggcttagtggtgcacaggccccagatccaggtagcctagggttaaatcccaattctttatttgatagctataaaaccttagatgagctaattatccactcaaagtttcagtgtcttcgtctgtcagagggaaggtggataacgatagtacctacttcctagggtttgtcgcaagagctaatccctgacaagcacatagttcagaggacatagcaaatgctccaaaaatggaagctattattattgttataaaataataataattatagtgttatattacccaacttttctgacccagttaaatggtgtctcttgcagagattctcccaagttctctcctgctaaaagtacttaccccttatgtttatcttcatctgtctcttggaaaatatattaattttattttatttaaattatgtttctcccattggactataggtttcttcaggttagagattttgcctatttgttatagtatgatctgaccaacatttggcaagtcttagatacccaataaggtttgttgaataaatgaatgaatgaggtgataaggatatgactagaaggagaggtaagtgtaaggcaggtggatactgggaaaaggcaagagtgaaagtgtgcaagggcatagaacatgttggggaatgatatgagtgcaggtttttatttgtttattttgcttttagctaacactttatgccagaaactgctctgaagacttttttctttttttgagatagtcttgctctgtcacccaggctggagtgcagtggtgctatctcggctcatggcaacctctgccttccaggttcaagcgattctcatgccgcagccttccaagtagctgggactacaggcatgcacccctatgcctggctaatttttgtgtttttggtagaaatggggttttgccatgttgcccaggctggtcttgaactcttggcctcaagcaatccacctgcctaggtttctcgaagtgctaggattatagatgtgagccactgtgccagacctagagtttacatatattaaatcatttacttgtcataagaacccactgtggtggctactattatcatcctcattttcaagaagatgaaactgaaaaaggaaagataaataatttgctgtcagccacatggccaacaggaggtggagatgggacttgaacaccagcaattaggctgcaggggccattcaggttgaatgacatagcagatatagcccataaatggtctgcttgacacccaccaactgccagaccatcactgcagccccagcttctctcctctggctcaggggtgggcccagcccttctcatttccccccaccccaccatggccaaagacaagagtcctcttcaaagtcctccctgatagaagctccatccaggtcgctccacaggtacagtcctgcagcaaatgtaatagccaatacctatcccggagtgaaaaaaattgggcaataccatatatgggggtgcctgatgagagagtatgatgggaataccacttcgtgccagcttggctgagctctacatacctggccatgagcttcccctggcactttcactggaacatctggaatcctggaaatggggccacattttagtccaggcaggaaattctactccttgttccattgctctgctcagctgggtgtcaggccaagacctactgctggataaggcagatggcagaaaggctgggcaggcacaaagccaccactcctacctgagggactcaagaatgatatcgagacacaggcagcattattctttctccttaggcaggctgctcattttgtttgtttgtttgtttgttagtttgagacagagtctcactgtcacccaggctggagtgcgttagtgtaatgtcagtccactgcaacctccacccccaggttcaagcaattctcatgcttcagcctcccaagtagctgaaattactggcatgcaccaccacacccagctgatgtttatttatttatttatatatttatttattttaggtgttttttttttttttttttgagacggagtcttgctctgttgcccaggctggagtacagtggcatgatcttggttcactgcaagctccgcctcccaggttcacgccattctcctgcctcagcctctcaagtagctaggactacaggcgcctgccaccacgcccgcctaattttttgtatttttttagtagaggtggagttttgccatgttggccaggctggtcttgaactcctggcctcaagtgatccacctgccttggcctcccaaagtgctgggattacaggtgtgagtcactgcacccagcctgttcttttgaatatcctgctcaagtaagcaccttctatctgccagactcagacctgtaagctcccctctatccctgcctgcactccatttttctctcaggaaatttatttctcctaggttctcatcagaggcagcccctgaccttgggccttaagtcaatgagtcagcaagcaaatatttattgaagacttccacaaaccagggcccctgctaggtactagggacaacccagcttcttgtccaacaagcattaaactggtgctcacaaataattaattactaatgtgatgagtgttacacaacccaagaaacaaagggagaggacaaaaagaaaggcatgtgaggagtagggggccccacagggactcattagctgagcactgctattttacagaagggaccggtttgcctcgctcttcgaaaggccctgcctggtgtctgtgaatacctcccataaccccatgtgttgcagaggacagagcagacatgatctctaccctctaggaacatctcctttgatggctcattaacatgagaagatggagagtgaaacctacaagaggctctgtgcctgctcacttatccgggagagttactcagagttcactgatttcatctctggaggaagaatccttctttctttggaggagaaatcctggattatgcatccctggcagcccagaacctcgaatagaggggaccggtaaataattgtccaataattggatgagtaaacaattcagaaaaaagtgaggaccaaaggaagaattcaattagtgagaaggatgactcgtaggtagggtgaccatatgacccaattggtcagggttagtctccatgtaagcctgtcatcctaaagtaattatgattcccacacccttttactcttggaagtgtcccaagttgtatggtctatgatgctcaccctacttagagcacattttgtaaagaaatgcagctttgctgttcttcagatcataagtggggctagcagccaatgccatttgctccaggtgggctagcagctcatgtggcgggtccattgtgtgcccctgaatctatctaatcttcagctgtgaacactcagaaacactaatgcagatggagattcagggaaaacaactacaaaagccaaaatcaaaatgcacggatccaaaaccaaggtcctccaatgtcttactgacaaagggcattgtaattcctaaaaatcaaatcattcacttaatttatttttcctcagcttcaatctcattgtcttgaaaatgcgggaaatcatacctgttctacttccttgccaagctgctgtcatagccaatgggctcatgcgtgtacctcctaaactgttaagtcctaaaccaatacaaggtgctattataagctagttcgatatcattattaagtcttatgtattcaactacaccagcattcacagatccatctgactcctcaccatgcccctcctccactgcactcccaagacagacatgagaacaagaccacgctccttccttcctcctcggtcagaacctttgcctcctctgttcccctgtggcttccttcagggcaggaaccttctcctggtccctcctttaccacggggcagagcctactgcttgacaccatgtagatagatattcaatcattcttgctaacaagtgaataaaagaaagctcagctctggtgccacctccagaaagcctgcttcaacttccctgggcagagccattagccaaggcctctgaacaattccagctccttctctatgtttcttatcaaactggactccagggtcagtaccaatttatatcatctgactcctactcttctggggctaatttctcatgttgtgtctcgcttttctagtgcccgacattctttttaaacaaggaacttggaaatggttgctgaatgacactttttatctctttagtttggggttttctgtacatgctgtcccctctgtttggtgtccttttccctctcttcttcacccacttaccttgtatcatccttcagatcccagctaaagcacccctccccgctaggagcccttgctgacctccctgacttagaagagcgccttctcttagctagctcagagcatcgtgaacctctgttttctagggctcaccttggcaggaatagtacataactgtatttttttaaatgtctgactccttaactggactgtaagccaaggtggaaccagagaatagagctctggcctccttgtgctttgttgtattcccacaacctagcacagtgctggaggataatacatactggtcaaatgaatcaaggtgatagaagggcactcaagaggaaatgtcaggagtcctttggaagatgaaggtgggcattcttctggctcccctaaaatcatcatcatcaccccctctatcaaatgatgatatgggtctggccctgaaataagtgcttttgtataaatttactcctttaatcctcacaacaactctgaaagaggggtcccgtgttacagacgagaaatataaagcatggatttttaggcctgaatatacctgtgaatcattcaactgaacaattttctcaaccttgtaacctgtaagttctaaaaaattgggaagggaggtatacatttgagaatgcattggggggactttaaaataactaagaaatatctgaaataacatcttttttttgtcctaatttctgttttttatatgtatgagggtataggaggggggatggcaaaaaagatctgatttgttttttctgctttcttctaaagacatgttttggcaattctggaatgaaggtgggaatggacacccatctagacattgccctgggaaaatcaccgctctttgtgcctaaatgtcttcatctacaaaaggtggataaataatatttatctcatgaggtgtttggagatttaattaacacttgcaaagcactttgaataggagatgaaaggccctgttaaaggaactattagtgtcagcacctagcgctctttggccactgaggaaatttaatcaggatggggaagtcggtgcaggcccctcctaggccatcctctcctccaccagaagccatattggcctttcattatcctctaagcctggaattctctccaccaagctgctggttatgtcatttccctgcctacaattccctctcttcaattttctccctcctcttttccacgtattaaatcctccaggaccgcttcaagccccatctgctctgcaaagtcttccctaaccattcattgactgattcattcatttacttattcatttgacaaggctttggtgagagcctcctctgtcccaggctccacgaagagccctgaggttgctgtaaattgcatattcttgacctcgtgtgccggaaggggagactggagctcagacaggctacaacgcgtccaaggtcacacacctagttagtgagtgaatctggattgaaacttacatttcccaggctccaaagcctatggcatttcctctcctttgtgccgcttcccgccacagatcaaggtacatgatacaacagagaaaaagactcacctgactaataactcacaagctcagtacaaactatgtcactaaatctgacatatgggttgtccttgaaattcctttcataactaggtccctctcagtggcatcaccaagggcttacttgggggtaggaggagaagaagggaaagcacctcattctaagagaaaaaaaaacaaaacaaaacaataagctgtgcctgctctataggcactgctttacatgccccacagcctgaccctcctccgatcagattgtcattgctctgttcctctccaataagaactcagaaaccccagtgctttctttttttcagctccagggagaaaaattacagcagagtagataagaacatagacttaacagtcccagaagagatgcctgccctgcctcttattggctgcaagaccctggacaaatcagtaagcttccctgggactctgttttctcatctgcaaatgagaacaatgataacaccaatcttccagggctgttgggaggattaaataagcttctgtatgcacagccccatgtttgcacacaggaaggcttccataaactcactgtcctctttctaagatatggacactcccacagccacataccagtgtcttgaaaagtcactaggtggccaaccctggatgctatcagtaggtatcgtggcttcagaaatgcacaaagtgctcactgtccaccagattaactaccttacattctgtaattttgcttcgacacctttaccataatggtgttgggctacagagggctttgctgaggagctatggaagtctgcatgtgaataaacaccaactttctttcccctcctgggagatcagtggagctcaagtgttacatgccaccacttagaaaactattgagacaattagtcattgcaccagtcacacaggactcaagctaaccagaaggcagaggacaaagttttgcggtcagcgcaggagagaagctgaagtctccaccagccaactcatggagctcctgaacagaaggctggaaagagagaaatttgacaacaagtttgggctggctgccttttgaaaattaggagactttatactaaaatacaatttctagatatcttgataaattggaagatctggccagatttgggcttacattctggcatgccagctgacaactggagctgagaaatggtgggcctttcttgggaattgggctctccgcttctctctggcctcacccctgactcccagtgcaccactcagcttccctggcttgcattacttgcctagcccttgtgggcatttgagttttctatgcctaactgagcagtctcagaatatgcaacttacagcaaccccagtactctgcatggagcccaggacataggaggctctcatcaaagctttgtcgaatgaatgagtaagtaaatgaatgactcaggcagtgaatggttagggaagactttgcagagaagatggggcctgaagtggtcctttatacatattgttcctcctgcccggaaagccttagcaccccaacactctctgcctcactaactcctactcagaactcctcctcattctacaagacatagctcagctaacacctcctccaggaagcctctcctgattactatctccatcctccccagactgggctcctgtttacagagtttccattatctactgctgcataacaaatgaacttaaaatgtaagtgacttgaaacaaccataaacattaattatttcacagtttctgtggatcaagaatatgggagcagctcgcctggacagtcctggcttgaggcctcccatgagatggcagtcagcttcaggcatggctgagacaagaggatctacttccaggatgcactcacatgctaagtaaattggtactggccatggattggaggtatcagttcctcaccacatggaactttctacagggttgcttgagtgtcctcataacatggtgcctgacttctcctagaggaagagatccaagaaaaagagtcagaagttgcaaagtcctatatgacccaccttgtaagtcacacgccttcatttctgcaataccctatttgctacacagtttacaaggtgggaggtgactgactgcataaggagacacacaaggtggcaaggaccgttgggtgcagtcttgggattggctaccacactgaatgttggtggcctctctcctccgtcacagcacttttcatgtggactgtagatgttgccctatatttctctcttagtaaaactgtgacttactaagagattgtttctttaatcctgatattcccaacactgacaaatagtagctgctcaataaatgtgtacagactgggtgcagtggttcatgcctgtaatcccagcactttgggaggctgaggcaggcagctcacttgaggtccggagttcgaggccagcctggccaacatggtgaaaccgtgtctctactaaaaatacaaaaaattatccaggtgtggtgtcacatgcctgtgatctcagctacccgagagggtgaggaaggaggatcacctgaacctgggaggcagaggttgcagtgagccaagagtgcagtgagcaccactgcactccagcttgggggacagagcaagactctgtctcaaaaaaaaaaaaaaaaaaaaaaagcataccacattactccttttctccaaaccctccagtatctttctatttcactgagtgaaagccaaggtcctttgaaccgtctagaaggccccacactgcctggccgcatcacctctctgccttgctcttgtgtttttctccgtgttcactctgccccgtcacctggagctgaagcctgtggttcctcgatcactccaggcaatctcctctctaagatcttttgacggactgctccctcttcttgacgggtatccctaggatttatcccatcactttcttcaaatattgcccaaatatcacattgagagagacctatactgaggcatcctcagtaatagcgcttctgattcccttaaccctctccaaatttttcatatagcacttgtcactacgtcatttatttagttgtcatgtttattgcttattttctgtctcctcactccaacacataacctctctgaggggagaagtctttgtctatcttgtttgctgataaagttgtagcacctagatcaaggtaggtgctcaaaaaaatgtgttggttggccgggcacagtggctcacacctgtaatcccagcactttgggaggccgaagcaggtggatcatgaggtcaagagttcgagaccagcctggccaacatggtgaaaccccatctctactaaagatacaaaaaaattagctgggagtgatagtgtgcgcctgtaatcccagctgaagcaggagaatcgctcgaacccaggaggcagaggtggcagtgagccaagatcacaccactgcactccagcctgggcaacaaggtgagactcggtccaaaaaacaaacaaaaagaaaagttgatgttggccaggcacagaagctcaggcctataatcccagcactttgggaggccgaggcaagtggatcacccgaggtcgggagttcgagaccagcctggccaacatggtgaaatcctgtctccactaaaaaaatacaaaaaattaactgggcgtggtgatgggtgcctataatcccagctacttgggaggctaaaacagaagaatcgctccaaccggggaggcagaggttgcggtgaactgacatcaccgcaccactgcactccagctccagcctcggcgacagagcaagactctgtctaaaaaaaaaaaaaaagaaggctgatgtaaatgaatgaatgaaccaactaattcattggtgccccaccccttgagaatagatgtcaggaaactgccaaattatttaaaagtgtaaattaagaaaattcaagattctcttttggtttagacagaaggttctggggatgcccagaagtaggtgaaccttgttctgaatttaaaagaagactctgtaggaaaaagatttagccctttgctcagcatgcagtaagcaaacttcgaggattagctccctttgcttctgtcacctgccacttccagaacatgaaagaacttccctgccccacagctgcaggtatccccatcattcaatagcgtgtgaccatcaagtgcagaaactcacagaagaaacttgacgtcaatccccaagaagcttccttactcatgagctaaatgggtttcagcaaattgttgtactttttttttgcctcaagtgtctcatcggtaaaatgggaattgaaataggtgtctcttcacacttgtgtggtaaggataggatgagacaatgtgtgttacttaccacagtgtctggcacaatcatgacaagcattcaataaatgctgaacattatcattatccagcacttatgctgcaaggctgcaatggaatatattaaaagtgtcaaaaagataaatttaataaacagtgtttttaatgcccccattagtatggattggaagattaaatctgttctaattcctgctgtctgggtaatatgccagccaggaaacctcaaatataaaactgcttcatctacctttcatataagaagaaaaagaaatcaatgcatttttgttctcctctcttatccttggcttatttatatgcccaaataaggttactgtacaaaacacaattgtgtggtctataaataatgaactgcttctccatgtagtcagcatcagcagagaaaagttctaaatggatttcctttgccggcatcattttctgccctacatctgaccgtcaacgtaaatacaggcagccctggttggcatataaaaggcccaattgacctgttgacccagtttgcagagacggctccatgcacaaccactttagcagctgctgtagaaaaaccttttggccacacaagccaaaagctgctcgttcattcactgcaattactccttgagcccccagtgctcccggcactggactcagagacattcctgcaccatgctttgagacacccacttcagtctagcactggtggacttgagtcctgcgtctgttatggacaaagaataacaaaggctttttagtcattcctaagagaagtggctggcctggtgcaatggctcacgccagaactttgggaggccaaggtgggagccgaggagttcaagaccagcctggccaacacgatgaaaccctgtctctaccaacaatacaaaaattagacgggctttgtggcgcatgcctgtaatcccagctactctggaggctgaggcatgagaattgcttgaagctgggaggcagaggctgcagtgagccaagaccacaccactgcactccagcctaggtgacagagtgaaattctatctcaaaaaataaataaataaataaaaaatagagacagaagagagggagagaagtggctgaccgtcatgcggcaagatttagtgagaaattctaccttaatcctcttcaggatccagcttttcctagtgaagtagcagatcttctctatttagcaaacttccatatctttttttcctttctgttgccctcatctgccgtattattccagctgagtaatatagaaaggcaaagtgattctataggcgtggttataacctcacagaaataggaggcagtgaaagaatgggggctgtgggctgggggctgagtcccgagggtcactgtaaaaaagagcatttcacgcacacaacgttgtcttgtggaggctggcagtcaggtagtcacagcttctctctctccactgccattggaaatcagagtcccatggtcactgaaagaaatcatagtcagtcttccttctaactttttccagttgacaaacagccatcccatgtttttatttcatttgatacatacgtccctctgtcatgggaacactaagaacttgtgaggaaaaatagcttacccaaagccacagggttagtaaatagcaaatccattagtgaaaactgtgtttatccattctggaaccctccatacagcatggtggtggttagctgtgtagcctgtaaagctggcttgccaggggtcaaatccaggctctgccctcgggcctcctcatcagtacaatgggcatgccgctaatagtgcccatctcatagggtgactgtgaaaatattataataaaagcagttctgtaatacatgtggttggcacacagtgagtgcccatgaagacttccaggttacgaccgctatctttgcaccagactttccactgaggcagaagctgctacttgtcccccttcttccaataataaaatcccaattttccagcctttctggcggcaaggtgtaaatacaaactcaggtttgtccaaagggatataaatggaagtgaggtaacttccaggcaccatcccatggatgagacagcccatctctccaccctcctgctggcccctaagcaaccaccttggactgaacaggaaaaccacatgttgaggattgtaaagtatcaggatagagccaccatgccacaccacaccgtgggcagctgtattttgatgagagctaagtcaccttcatctccttctcacagcagggagaacaaaagaagttccatccatctcgaagcagcctctgtctcaggaccagagctggtgtcctcgctcactggtgctccagacaccttggatgctgagggccagctggtctgcctctgccaccagatgggcccagacaggctgactgcgacatgaaatgactgcctgccacatgccaggcatgaggatgaggactgcacatcctcacagcaggtctataacagctctgtaaagtggctatgcagcccattccacaggtaaaaagtctgaggcccaaggaggagctgtggcactgtcctgagacacagcccagatctaaaattcaggctgcctgactccacatcctgcactcttctcacgggagtccctgcctccaaactcaggagcaccccagagtcctgcaccctcatgcagagctcctcatgccccagctcttgagccctggggtgtatagatttgaagttgccatggagcacttgctatcagggaaccaaaagccagatttcctaggtgtgactcccagcttagcagctgtgggaacttgggcaaaggaactctaacctctctgagtttcagcttccttgtctgcagaccaggaataacaattcacaaggtgttataaaaattaaatcagtgaacatgcacaatgctgcaaatatcaagttatgagtagcagtactattgttgttgtccttgttggtttttgtcttaagcctgaatccctagaagcatagcccaaatggggactcttgtgtaagtggtatattggggcactgtctggagagaaacataagggaaaagagaggggagaaagaccaaggagctaagccacgtggtgacttcagctgaaatctgggttcagcccgagctctagaatgtgaatggcaccacagagctgccgtactttgagttgaggcatgaataagtcattatctgggagccatccatgtggcgagaacacagccactcatggggatggggagtgggggcttttattagcagagggaaattcttcagagaaaggcgccactgttggccttagaaaccaaccaccctggcagctggacccagtgaaggggaaccgagtgaggcatgaacaacattgactaggttagtgtgagtcatcaaatgccacctctttcacaagttctgtccatcctctcagctagaagtcatcttcacatgcccataacattttctctctaccatgcctactgaactgaactttgcttaatactgtgttatagccattcacgtacaattcttgatgagtattctccttgctccatgctcatccctctgagcccttgagagctgagatggtgctgaagatggggctgtccatcatgcctgcactgtaccccagtaaggagcacagggcttggcatgtgacgggctttcagccaacctgaccagagactgaaggatgcccttatctcacacatgccaagacacggggtaatataatgtcagttcttggaaatacatggacaaaaattaatattcaagttttaaagcccagatgccagtaaaaattgtcttgtgcaatgattgtagatgaagagtctgatgttttcagtaactcagagtgtccatcatgagtgtcctgacgcacctccttaaatgttgtgttttaggctgggcgtgatggctcacacctataatcccagcactttgagaggccgaggcaggtggatttcacttgaggtcagagtttgagagcagcctgactgatgtggtgaaacctcgtctctactaaaaatacaaaaattacccaggcgtggtggtgcatgactgtcatcccagctatttgggaggctgaggcaggagaattgcttgaattcagaaggtggaggtggcagtgagccaagatggcaccactgcactccaacgtgggcgacagagtgagactccgtcttagaaaaaataaaataaaataaattaaattaaattaaaaaaaggtgtgccttaggtacctcactcatttcaacctagtgttaaccgtgacaccccaagtcatcagattgatagtcattatgtgcacccaaagcagcattaatttattcaccaactgcttattctgggccaggtattatggtcacgaatatggaaaccacatttggtcatttcctcaaggagctgccggcatttggagaatacagacatgaatgcagactatctcagcatcagatggaaggcagtgagaaggaagggtatgccggcaacacctctgatctctgctataggtggaggtgatcacggcaggcttcacagagaaggtgacgctccagctttgtcttgaaggttgaggaggaatttggcacaaaaggacaatggagagaagtgcaatgtgcatatgggtgggaaaagggacaggctacatggctggggaaggggagagtgatttggaatggccagactttctgggccagaaaatggctcatctcagattcctgaaagaaatattcattgaggagcttccaggttggtgaacacatgggcatattgagagcacagcacacctggagaggacacagaagctccacaccacccatgtttcttccatttggctgtttatgagttgtaccctttataataagggtataataaacaggtaagcaataaaaaaggaaagtggaggagccgggcacagaggctcacagctgtaatctcggcactttgggaggctaaagcgggcagattgcttgagctcaggaattcgagaccagcctgggcaacatagtgaagccctgtttctaccaaaaaaaatacaaattagcaggatatggtggcatgtgcctgtagtcccagctactcgggaggttgaggtgggatcacttgagtccaggaggttgaggctgcggtgagccatgatcgcaccattgcactccagcctgggcaacagagtgacaccttgtctcaaaacacacagagagaaaagaagtagaagaaaggaaaggaaataaggaaggaggaagagggaaaggaagaatgaaaggaaataaagaaaaggggaaaatcgtcactaaggtaaatagtagcattgtaatattataacaatcaataatttgttgagaatcaactacatttcagaacctttacagtcattcattacatcatttaacctccactacaatcctataaaatccatattagaactcatccccccatctgacaggtaagggcgcccaaaggttacatgacagcctatctttctctaggtactaggaagcaaggccttggcctttctgactctccagagagggaaagcagttaccccttcacattgaccaggcatctaaaatctgcatatctgtgcccaagaggtccataaagttggttgagtccaataaatttctgaatagacttcctcctatagttgactgggatttttttgtgggagttgtttgtttgtttaattttttttagcgagatggggtctcgctatgttgctcaggctgctcttaaactcctgggctcaagcaatcctcccacctcagcctcccaaagtgttgagattacaggtgtgagccaccatgtccggccttctagttaactgttgattctttaaatgttttttcccccaccttaaaaggatgacagattcattaagctatgagacagtatctgctcattaatgtgtgctaaattgccatgcaatttctatagaattaaattacacctcaatgaataagcaaataattcgtcaagactaatcttactcccatgaatgccaaagtaagacttggaccatttacttatcaaatgctgatttaaaaaaaaactcacaatgaaataataaataaatcatcaagtcaaaagtttaatttggtattccggctcaatcaggaaaataagcacagcaccaggtaccctcctcggtttccaaataaggtagcagtcagaaatatgagcccattcattttcatacagctgtacaattacctgcgaaggctatgtagctaaaatacaagcacacacacacacacacacacacccgtcactcatacacacacaaagccaagcaccacagcatctatgctacttgataggaaccatattcaaatgcaatagaaatattcagagcaaattgggtattttgtagaatctgcctggccctgaacacccctgtagatcgagataaggaatagcatcatcttcctactctagagttctcaaagtgtggtccctgaaccagcagcaatagcatcacctgggaacttgttagaaatgcaaatctcaggtcactcccctcccactccacccccagacctgctgactcagaaactctgggggtggatgattcttccaggtgatgctaatacagctaaagtttgagccactagtgtatatgcataaaataccaaaggagctagggattttccctcacatagacccaagtttgaattctagtggctaaacactagttatatgacctaggctgattatttcacttctctgagcctcacttttatcatctttttcaaaagaaaattaagagatgaatgataccaccttcctaacattgctggtgaggtcactgagatgacccaagtgatgccagtggagcgaacacagacctccatggattcggcatcatcccctctcccttctaagttcccattctaagggctcatttccaagaatccccttcccatgtggctcccagcaagagtttgccaatgagaggactcggctagacccagaaggcacagaggaggtggggtcattagccttggaggtagttgcagccgggcctctgtggttcacagcagcttcccacagggttcctgagaaccaccagctttcccaccatagtctaagaacattagattggcatttccacacattcttgagcattagagctcatgagaacttctgttatggcacttcaggataagatcagccatggtggagatccaaatgtcttttatagtcctaagtcctttgaataaagcccttactccctggaatctagtgcaccttctgctttccaatcaaaccctgagatacacatctaatttccacatttacccaggaatatcttatttctataaaaagcagaaaaacctactttctccagactcaagggaaagtcctgggatcaaagaaatccccctttctttaaagaccttccttcaaagaatcatacatgttcactgtcacattacactcatatatccataacctattttagtattttaaatgactgcttacagatttcctgcaattttgaatgtgattttgcttcgttgcaagccacctgcccccatggaaaccaatcatcattatttatgcaaatcaatggagaaatatgattcaattaacagaaacttgcttaacagtcatcatgcattggcttgttttttatttgacttttcatatttttataatgtcacataagccgtttttctcccctcttgcagaaaatgactaaatgtaaaagacaaaataataatgaaacctcaaataggtaaagcatttacagcacttcaaagcctcccgatagtttatctctggtcaacagatattctcagactcctgcagagaaaaagaacgagatgcagacaggtcacacaggttgttaggaagagcagtaactagtactgtagttccctgaaggcactaacaaatcccaggtccttgttccatgaaaataagtctgtgattagatactaaataaattatctagtcctcagtaataaattccttattagcagaattaggtcacagctacaaaagtggttctctctctctctctctctctgtctctctgtctgctaaaaaaagactttttttggaattttacccatgaaaatctgaatgggaatttgagttctttggctaaaaggtttttctcagaacatgggcagctttccagacttccgttttataatgaatattcctactatttttgacttctcagttttccaaggccatggctacccaatttggctgtcataagaatgtcgttactctaaatccgttaagctctgcaacgcagaagttttcccgaaaccaattcacagagatggtatcactgaggatatggaggaggaaaatatcccaagacagtggttccattgattttcaagttgggtaagaaaatataactggtgatgaaaatgaaagctgaggcatattctaaaatgaaaccttagaacaagatagaaaaataaaaaataaaaataagtggcaaagatatctatataaatctctcacactaaatttttaaaatctctcacactgagttgagtgtagaaacaggatcaatgctatccagacaactgcagcttttctctcctggggttagatggtccctccaggcagcctgcttcatcaggatctaacatgacccttcaaatgtctctcagagatgaccagccatgtctggtccatgggaagcatggaaattgagagacaggatgcttgaagatttatttgaaaagagctgtttcctacctaaaggaaggcttgctttctaatactgtattagttatcctttgctgcgtaacatatcatcccaaagctcagtgactcaaaacaaccataatgatctgtaatttctcacggttttacgcctgcagaattcaggagcaacttggctggtgagttcctacttcgattttcacgaggttacaataaaatgtccttcaggactgctgttatatgaaggcttgatgtgggctggaggacccactcaaaggtggattgttcacacagatggcaaagtgggtactggctttcgaccagttcttctctgcaatgtcatctccatggggttacttgagtgtcctggaggcatggtagctgacttcctcctgagtaagcaaatcaggaaaacaaagccaaaatgctacaacaccttttaggacctactctcagaggtaatgccttgttatttctgccgtattctattggtcacagaggtcagggctaaatttttatgggaggtcataaaaatcaagaggcaaggatcattggggaccttttagaggtctggctagcacaaatacggacgcaggctgggcacagtagctcacatctgtaatgccagcactttggaaggctgaggcaggaggatcacttgagcccagcagcttgggaccagcctgggcagcatagtgaggcccgcacttctaaaataataataataataactcatgcattgcatatgacttacagtgagaaatctagaaaaggctggcaaatgcagtagtgtcaacagagtgctgggcaaaggatgtggcatttcatgggccaaatgtgaagctctctgggagagacctgatgtggagttacctaattggaaacatgggtataaaggccagaggcagcgatagattcatgaatatgaagcctgtacagccacacagagtcctccactaagaaggaccccacgcttcagtgtaatgcactgctattgccttcttgaaattctgaatactttctgaacaaggatcctgacattttcattttgcactgggccccacaaattatgtagccattcctaccttagtagccaagggtgaaaataatgatccatggaaataaagaggtgattgctctgtcaagaaaccatggatgagaaatccccagggatagggttttctaatgaactcataaaagcatctagaagaaagtaagttctaaactgctgcaaaaactaaacagatatctaattgctagatttctccaatagcctgagttcctccaaaaagcagagcttaagacaagagtttgcatgcaggtagtttgttttgggaaatgaccgctaaaataaaaaatgggagttagaaagagtaaaaggggaggagaaagagctggtccaaggttgcctcattgaactcattgctctgtgagcaactggggctcaatctcatcagagggctcgctaaggagctttgtaggatgctctgcaagactgaccttctgagacaaagaaagaggaagcatttgtcctccaattgccaccctgatggtcaaattgctctatgggtttacaatgctctcatgcatgcatcagaaaggctgagtgggttcctttgggatgctgcagggtggaagcaaagaggccctagagcagaaagcaaagaatacactatgtttccaagcgaatcccattacagctgttcgctgaagcaagagatggagtgaaaaagtggatgcgaggggctcccgtggcactacaatctccatgccaaagtcagccaaggaataaatttcttgctcctctactcactccttccctgagctccatccctggggagatgggggagggaaaaactagcaaagatagaagaaaccatctctagcccttccccagttgaggcttccctcttgagcaaggagaaggcaaaagcctcaactgtaatcaatttggaattacatgagaaaggggaatttaattcctccatttgagacatttctttatgataaagtgaaaagagcctaggaaagtcctggggcctgcctgagttttcttctagggccatggggattaacaagcccccagagtggacttaaaaggggttggatggtgtaagctggagaaagctgctttgtgattacctcctccaagcttgttcctcctaatcgaagacattagaaatatccagaatgcacttgatagaacaagaagacaatgttaagggggtgagggggaatgtgctgttagttgaattc

SEQ ID NO: 50 - DNA, 203467 bp, Homo sapiens
gaattcagaattggaacataaattggggccagattgtaaacaactttgaatatgctaagaaacattagttttattctattaggtgaaatcatatgaagttatcatttttgtaagtcaaaatggtcgattttcagcagctgcatataacctttcctaatgtaagccagtataattttttaaaaattgaacagaaccaaagacaaaaaccacatgattatctcaatagatgcagaaaaagcctttgacaaaattcaacaacccttcatgctaaaaactctcaataaattaggtattgatgggacgtatttcaaaataataagagctatctatgacaaacccacagccaatatcatactgaatgggcaaaaactggaagcattccctttgaaaactggcacaagacagggatgccctctctcaccactcctattcaacatagtgttggaagttctggccagggcaattaggcaggagaaggaaataaagggtattcaattaggaaaagaggaagtcaaattgtccctgtttgcagatgacatgattgtatatctagaaaaccccattgtctcagcccaaaatctccttaagctgataagcaacttcagcaaagtctcaggatacaaaatcaatgtacaaaaatcacaagcattcttatacaccaacaacagacaaacagagagccaaatcatgagtgaactcccattcacaattgcttcaaagagaataaaatacctaggaatccaacttacaagggatgtgaaggacctcttcaaggtgaactacaaaccactgctcaaggaaataaaagaggatacaaacaaatggaagaacattccatgctcatgggtaggaagaatcaatagcgtgaaaatggccatactgcccaaggtaatttacagattcaatgccatccccatcaagctaccaatgactttcttcacagaattggaaaaaactactttaaagttcatatggaaccaaaaaagagcctgcatcgccaagtcaatcctaagccaaaagaacaaagctggaggcatcacactacctgacttcaaactttactacaaggctacagtaaccaaaacagcatggtactggtaccaaaacagagatatagatcaatggaacagaacagagccctcagaaataacaccgcatacctacaactgtctgatctttgacaaacctgagaaaaacaagaaatggggaaaggattccctatttaataaatggtgctgggaaaactggctagccatatgtagaaagctgaaactggatcccttccttacaccttatacaaaaatcaattcaagatggattaaagacttaaacgttagacctaaaaccataaaaaccctagaagaaaacctaggcattaccactcaggacataggcatgggcaaggacttcatgtccaaaacaccaaaagcaatggcaacaaaagacaaaattgacaaatgggatctaattaaactaaagagcttctgcacagcaaaagaaactaccatcagagtgaacaggcaacctacaaaatgggagaaaattttcacaacctactcatctgacaaagggctaatatccagaatctacaatgaactcaaacaaatttacaagaaaaaaacaaacaaccccatcaaaaagtgggcgaaggacatgaacagacacttctcaaaagaagacatttatgcagccaaagaacacatgaaaaaatgctcatcatcactggccatcagagaaatgcaaatcaaaaccacaatgagataccatctcacaccagttagaatggcaatcattaaaaagtcaggaaacaacaggtgctggagaggatgtggagaaataggaacacttttacactgttggtgggactgtaaactagttcaaccattgtggaagtcagtgtggcgattcctcagggatctagaactagaaataccatttgacccagccatcccattactgggtatatacccaaatgactataaatcatgctgctataaagacacatgcacacgtatgtttattgcggcattattcacaatagcaaagacttggaaccaacccaaatgtccaacaatgatagactggattaagaaaatgtggcacatatacaccatggaatactatgcagccataaaaaatgatgagttcatgtcctttgtagggacatggatgaaattggaaatcatcattctcagtaaactatcccaaggacaaaaaaccaaacaccgcatattctcactcataggtgggaattgaacaatgagatcacatggacacaggaaagggaatatcacaatctggggactgtggtggggtggggggagaggggagggatagcattgggagatatacctaatgctagatgacgagttagtgggtgcagtgcaccagcatgacacatgtatacatatgtaactaacctgcacaatgtgcacatgtaccctaaaacctaaagtataataaaaaaaagaaaagaaaaaaaaaaaaaaaaattgaaacatttttctggcttaaatacctacctttggtcttatcctaattaggcaccaatattcatgcaataatagattatatgcagtaattttttaattaaaacattaaaataattttgatccttaacaattaatgatcatttactcaccccgtaacaatatattatgtgctacaagtagagacaggtactgctgtaggaaactgtgccgtaagcaatggggatggatccactgcagtctgaggataatagtgtaataatgaaataagggaggggagtgtttttaaaagaagggggaagaagagaggaggaagaaactacagagaagaaggaaaacgtggagaaaaaagagaaggaaaaagagaaggaaaaataacaacaaagtaggaagagaaaagagaagaaacagagggaagaaaaggcagtaggagatgattactatgagctcaaatttgtttctccctttgttcccaagttccactccaatgctgcagtacaatcagctcagagcctgattatcatggctgacatagcctagcgcctgcttatttttagatgaaattaatcattttcatgtgttatttttggtttagataatagctcgagtacacagcagcttcttcattagctgccaacaagaatgtaaacaaggttgcatctctccttggcaggttctatattcagctctgccatgaagaagctgcgttcctacagaaactgagaaactgcttctcctgcagcccgtgagagattgcagagaggggcttaggcagtcataagagtagctggatggaagggagctggaactgctttgattccaatgctctctttgttcagtttcttttaagtcaggaactatttgtcagtattattggcatttgcactggatcattctttgttggggccgggggcactttcctgcactttgcagatgtttagcagcctctagacaatagatgccaataacatccccaccctcacccaaaaatgtctccagacatggacaaatgccccctggggagatactccaagacacccccagttgagagccactgatttcaatcaataaaatgaaaccgtaatcgagtaacccaaattacggtggaacagactcccaaccactttactgcagaaattaaaatttccagggctgtcttgtatatgtgaaagaacagaatgctcatatttgtctcctcctgcctccgggtcactactgggtatccttgagagacaactgctccagtgggcacagactccaagctttccactggtagccacagctggtactgccctgtctggccttggaagattcctcagctcactccttccttgcttcataccaggcatgcaccatgtcttcctctttaactccacacagcagaagagagaaccaaatgtaattgtttcttaagtttttttttaaaggctcagggacactaacaacaggataaccatgatctctactctggccttccctggccagcgctgggctggcttgtcatcgcactcctagcttctctccatggggccagacatagcatgctctttccactgaaatctgtctagttaaatccattgcatttaaacgcagccaaaccatgactgctccttgcacccaatacccacaaaagaaggcatttttctcagagtccagaatcacactcacttcccaagtcctcacttgccactccaggactcacctcctcccaggatgactgcaaattggaatatacataaatttctgctcttatccacaggagtgtatctcaatgttgcattttcagaaagataatcacccaataggctgatattagtgccccccccccccgaaactgggcacatgggacacaaattactcagaaaaagtccatttttccttagtttctcctcatcaagcccaaagggaaacatctgaagacaactctataagccaatgatcatattaaaacatgaagaagtttcatcaaaacctagagaaaagcacaaagccaaggccaagacaggaaagaagaattggtggcagaggtgagacagtagggggaataacaaaaacagcccaggagtcagccagataaagttcacagggagctgggcaggaggggaaccgcaaggtgattttcaaagcaagtgccccccatggtggaaaacagctttgggaggccaaggtgggcagatcacgaggtgaggagattgagaccatcctggctaacatggtaaaaacccatctctactaaaaatacaagaaattagagggcatggtggcatgcgcctgtagtcccagctactcgggaggctgaggcaggagaatcacttgaacccaggaggcagagcttgcagtgagccgagattgtgccaccgcactccagcctgggcaacagagcgagactccgtctcaaaaaaaaaaaaaaaaagaaagaaagatacaaagatacaatacagattttcaaggatgtcaaggatgaacagtgctgagagatcagacttaggccaggtcagagtctgatctaagaagactagaggagaccaggatctgatgacttgattttagaagatgatcccaatgttcctggctgggctgccctacgatggtccctctgacagctggctactccggaaatgtgccagccatactaccctttaaaaataagtaccaactcccattttctgttaaaaagttactcttaattttcctaaccataaggatggaaaaaagaagaacattgttttcttgtattgattaggccagagtgaaatgagagcttactatgagcactaaggtgaaggctggctggcatcaccctgatccccaggcagcttgttcccttgggacgcctcttcaatgaccctgggtgtgattttaggacctacactcacccctgacttacagacacaaacgcacacacactcaggcattcaggctaagtgttatagactaagggtttgtgtcccctgaagttcgtatgttgaaatcctaaccttcaaagtgatggtgttaggagatgaggcctttggaagacgattgggtcatgaggctggagccctcatgaatgggattaatgcccttaaagaagaggccccatgagagctctctagttctccaccctgcagagacagtgagaagtcatcaatccgcaacctgaaagggtcccttaccagaacttgctcatgctggtaccctgatcttggattatcagcctccataactgtgaccaataatagtttattgtttgctgggcgcggtggctcatgcctgtaatccagcactttgggaggccaaggcgggcggatcacgaggtcaggagatcgagactgtcctggctaacacggtgaaatcccgtctctactaaaaatacaaaaaatagccaggcatggtggcgggcgcctgtagtcccagctactggggaggctgaggcaggagaatggcgtgaacccgggaggcagagcttgcagtgagccgagatcgtgccactgcactccagcctgggcgacagagcaagactccgtcacacaaaaaaagtgtattgtttaaggcacacaattgatggtaatttggtatgtcagcccaaaatgactaaaacaccaagtcaaggaatttctactttcccagtttagactactagtttccaccttctctgtccggtactgaacgtgaataaaatatcaagggggagagagctgctaattttcctctgggacacttatccagtgctgatgctgctgtctcctcctagccacagccttgtggttggtggtggttttcaggtagaatttcctaatccagatccaaatatcagatacagataacagctttaaatagaatctaaaagaaaagtcagattgggctatcccagtaagcttgccagtagaaatagtgactctcacatactgaaggcattccctgcagaagtaatgatcaccattaggttgggaaggatggctgtttctacatgtgccaggagtttttccttcataggatgggctgttactcaagattctgtaagtttcaaacaatagaaacacaacgagaattagtttatgcaaaaagacaggaacttaccagttcctataaaacacagaatgtggagagatgggtctaagctgtatgatgggtttctgccagagcaaaaaacctatcagggctttctgtcctttcatttctcagctatgcttctattgatgtgctgacttcatcaccttctattgagataggcatcttccatgcaacacagaccatgccagaggctgatctagaagcacattctaaggtagagatgaacacatctcctccttcagctcctatttgaaaccatagagagagatgctgattggcctggtttaggccatgtgctcatccctggacaaatcagaaaagcccagagtatagggcattataattggcccaggctgaatggagccgtttagatctacagtgagaaaggcagaagcaatccttacctattagtatatatgaacagttaccgctcctatcgaagccaggtactgtatcctctcttatatactcaaaggttttgcatttcgaataatctcataggtctcgtatcaatcgttcctccctcttattagtgtacatataggtgcatacgtctgaatgtttggaaaggcaggggaaaaaatcagtatctcctactacagataagatcaataaagcccctttaaatctaagcgaaattttcaagtttcaaaatagacttctaacttttctaattttgtgttacataatttttacctgttaaatcagcgatttttccctcttgttagatcattctaattaaaatataaatatactgatatataaatatatccttctatcttaaaagaaaaaaaaaaacttccttaacctcatgccccccttcaacaactgccttagttttttctctttacaaacaaagttattgagggttgactatgctgtttccaactcttcacctctctttctctctttaacctgcttttatcagattttgtctccaccacatcaataaaactacttttgtgaagctcatcaacatcctccatctggcccaatccaatgggccccagttgactgacttctaagccttatttgacaattgtgcacacctccctttctgaaacatttttttcatttggctctgtgaccacacattcttctagttctgcttttgcctgcctggctactccttcagaatctccttggctgggtcctcctcttgttcacaacttttaaatgtagtaatgtgcttggcttatacgcactctgcactctctctggggaaacacatccatggctttaaataaaatccgtgtgctgactactctagttgagaactctcccttgattatcaggcttgtgtttccagctgtttattgaatgccttcattagcatgcctagtgatcttaaatttactaaggccagagcagaactttcccacctccacttcacatttgcttctctccaatctactcaatctcctttaataatagtactattcactcagttgcccagccatcagcaagtactattgattctgcctccaagatacattttgagtagcagcatttttggcaacctccactgctaccagctggtgcatgttaccaccagatttctcctggaccactgcaagagcctcctagccatctccctgcttcacctctttctccttgacagttcattctccatccagccacaagagtgatcttctggaaacacatttaaatcatgtttctctcttgcttaatattgaacaagctctccacagtatattctgaattatatttatccatgcttttattcccttttacttctccattctttcctctctggcattttttctgttcctcctccataccaagcttattcccttttcgggacctctgttctgtttattctttttaaaaagtgtgtcctgtaccacagttctttacccagctgtcttttttgccattcaaatgtcacttcttagagaacctttcttcagcaattctttgtacaaccggaacacttagctggtacctcaggaaatctttatcccataaccatattttatttcctcggtagcactcttttaaatgatgccatttatttatgtaaatatatttgtgcttttcatcttcccccccactggagtgtgaacaggtaccatatctgtcttattcctttggtttcaactcatttgcctgtgtgtccacaactctttgatcaatatctggcaatagtaaattctaaataatgcgaaagaataaacttgtgtctcccattgcccttttcatagtagatgtacaataagttcttaagaaatagttgaatagataggatggtgggtggaagagtggctggctggctggccggttgtgtggacagaggtaaatatgcaaaatcaaccaatttaatatctccccattacttgcaaatataggatagtgagcaggttatttaagtaatctatagctgcattaacaacccgcccaaaatgtcatagcttagaaaagtagttgattctgtctcataattccagaagttcattgggtgattcttcgggtccacatggtattggctggaatgctgacatggctacagtcatccaagggctaggttgaacagaaacattcaaaatggctcattcatgtggctgttgtggcagagttcagctgttcatctgggactgtcaaccagaaaaactacacatgtcatctccatgtcacttgggtttctcctggcatggcaggtgggttccgaggcttcccagaagtgagtgttctaagagattcaggcagacactgtaagacttgttatgacctagccttgaaagtcccaggacgtcatttctgccacattctattaaacaatcactactgtcagcctagatgtaagactccacctcttgaagtgagcagtgttggtgaagccatcttggaaactgtctaccatacctgtaaagagacagcccactgggttctgcagggaaatcacatttatagattttgattcttctgttctttttattgaaaccactttgggaatatgcatctatgtgttttactttcagcagatcagatcttactaatcacaaccgagtaaagtaacagactttcataactccagccttcataattcagtagctgcatattcattatctgaaaactcactcttcagaattccttgcatctttttggttccaaaaatacaatcttgtttcactttctttaaagtagtctgtgtattctaatcagggttctctgttttttccatcgctatgttcctgccacctgttccctttccgcaaccaaatttccttctctttagcgcagataggctgatacagaaagaaaagtcagttttaaaattaagagctagaaaacaagatctgcacaatcaaatgaagacatagtcaaggcaaaatattaagagttgaactattaaattagtgattgggttctgttcagttaggatgctactgtcttccctttcagtgtttctcacataagtatcatacatggagtgacaacaaacaaaagcgcagaacatcctgcacttcacccctgacgtacaaatcagaagcttaaggggcatagctggacccctgcatatatgttttttttttatcatactttaagttctagggtacatgtgcataaagtgcaggtttgttacatatgtatacatgtgccatgttggtgtgctgcacccattaactggtcatttacattaggtatatctcctaatgctattcctcccccctccccccaccccacaacaggcccctgtgcgtgatgttccccttcctgtgtccaagtgttctcatgttcaattcccacctatgagtgagaacagacccctgcatatatgttaaagatccacctaggtgactctgatgttctgtcggcatgcattccttcttctaggtatcaagataccacattgcaaaggaaaacctagctcttttgcaattttggtttatctcattagcacacttactattttcccattgaagcagtgactggaactattggttatgtttcccagtgtgttttatatctcagtttctggatgaacatatttgtacaattataaagaaaaagtaagaagagagctttcaatatgtgaagattcacttcccaggcatcttttcaacattgatcctaatctgcaaaagacattgacctcacaagaaacaattgcaatcaggttctcactgagctgagtttcttcaagtacacccctgtaagtgggccacagctgcagccagcagattttgcacttctcttgttcctgctgaggatgaaatgtgctgaagccaataacctggtgaataattcatttttccaagaaacaattgctaagcctcagaattgctttttacccagacagagagcaaattatttaaccaataataatactttctgtatgtatagaatcttgtaatttttaaaatcattctcctaacaataaggataatgaccatagctaatatttatcaaaagcttatcatgtgccaagttttgtgctatgtccttcaacatagatcatctcatttaatttttgcaacattctgagacaggtattgccatttttatctctctttttcagaggaagaaactgaggcttatgaaggttaagtaactttcccaagtccacacagcatttaaatccacatcacagccatcatgctagactgcatcccatttctttattgatcagtagacagatagaagcagacatatagactcatttgataattatgaaaaccctgggtgacaaaaagtatcacatattagggctaccaaatcagataagaaaatttaggctacagatttaaaacaacctgttcaagtaacacattagcaaggcaaaatcagttttctgatctgagtcctgtggtcctcccatagccctggggcaactctaacagaatcaaaaagatttatttaatttttgccttgcagtgtgcatgggagtgtgtcaggggaaagggaccggatacggcagtgtaccgagccctacgatgacattttcagccaagaagaagaagaatgcttcatcaaatctcccatcagcccaagactagattgtaccaagattttgcaatatgaacataatgttctctactgtccaggatctaatccttttccatcggggaacacatttgcaaacaatgactcctaactgatgaggaacaggatccaactgttactccacaaactaggacctttacaccacattggaggcaatagccctgaggttaaagggccgttccgtgtctaaccactgaagctcttgcttgaaggaaggtttcccaaaatgaacccccaaagaaactgaaaatggcatgaacgtacatcctgttactcaacactccccgagtttcataacgtgaagtcaggaagaaaaggtgccaacattcctgaatgttattatcattaaggagcaaactcttaatgttcccacacttgaacgttaaagagatgggatcattcagtctcctctttacttatggaattgctgcaaaaccatatgggctgaattaggcatccaaggctaatgtttcctaccattccctctggggggcctttggggctcatcccaggcacttggctttaaagacaaggatatcctatttggaaacacagtcatgagccctgatattaataagcacttcctgacttcaaagcatctttataaccattgccctaattaaatctcgtaacctcccagagagaatgcaggcttcatcatttccactttacaaatggagaaactgaggcagagccctatggaatatgaaaccgtatcccacctgattgaggaaccactggagattttaatcagtttcagattaaattacaatgttaaagttttaattttttattttaccatttggtgagattaaaacaaggcatttaattgtgtattctgatggttaaaaccaccagacctggttgtgtggccttggcatagggatcaaacttctctaaactttaatttcctcattgggaaaaatgaaaataataacagagtctaccataatgtttttcaggttaaataatgtatgttaagtttctggcatgcaaataagcactcaataaattgtagcagtttaagtcagcttattttccttcagctacccattcattccttcattcactcgtttcctagtatttattacagcccattgagtgctgaaggctgtgcagtccacaaaggatacagcagcgaacaaagcagaaaagggactatttcctacatatggaatatatcttatttatgattataaattaattcacacaaaatgtgggttattccctattgattttgaactgatctcaccacttacttataaggtctctttgattgttctttcagctgaaccatcacattccttatacagagtgggacagcattggctgagttctactagcaaatgccggagatgtggttcctgttggccttttaactgatgtgatgaaataaagtcttccataatttgacaactagtttataagtggcagagtttgaatttttgtctcaatgtatgcagttgtgggaatctgtattagatttctgttgcttgcaggcactgtactgggcactgtggtgagaaggagtggcaggaggaaaggcttagccaatgtggtaaggctaactgaggccctacaggatccatagcatttttaaaagaaatagtatcagtaaaaatgtcattccaggggagggcacaggatgagcaaacccatggaggttctgttctctggagcttcttgcctggggacctcaatggtctcagctactccaaattgtcttctgcactcttctaattatatttatatgtatttatataatgtttgtgtgcatacgtgtatatatgtgtgtctaaaatatacatatatattttttcatcaaacaaatgcttgttgaatagtaactaaaaaaggcatttattgagcttttattctaggtcagaaatgctgaaggatgccctgacatgtattagtacatttaatcatcctgagattcctatgtatataattatttttctcattttacagagaaggaaacagatgtttggagatatgaaaattttgcttgtggtttataagtggcagagttggaatttaaagccagttgtggtcactgtattcaaacgatcatcataacagaaaggatgaaagggaaggagggaagaagggatataggaaatgaggaaaggagagagggagggaacaatttaaaaaccattcaggctgggcacggtggctcatgcctgtaatcccagcacttggggaggccgaggcgggtggatcatctgaggtcaggagttcgaggccagcctggccaacagggtgaaaccctgtctctagtaaaaatacaaaaattagctgggcatggtggcagacgcctgtaatcccagctacttgggaggctgaggcaggagaatcacttgaacccgggaggcggaggttgcagtgagccaagatggtaccactgcactccagcctgggtaacggtgagattccatctcaaaaaacaaaaaacattcagcaacactaatggatggcaaaaatgagctacacaattcatatccacattttaaggcccaagaatttagtgtttgggcccactgagagaagatggggagacacatatcaagagaagctatgtgatgagagacgaaggaggcggtgtaggtaaagatggaagtgtagcctcagtcctgcaagcctcactcagaagagcaccataagctgcatagcaatggcagcagcaattattttccacaggagaacagacatacaactgacacctctcagcacccagtggccaggcagagccttcgatatgtcagtccaagccaaggagtcatctctgtccagccaaatcttttcatccttcaagatctaaatgaagtttctcttctctgaagaagtcttgttttaattcaatatttgcagaaaagcaacttccaaaaaatctttcatgaaaataccaagcccccaataccctctcctttgtctgaagcccttgtaaataaaaaagttataaaattgacaataagtaatatttactaactgtacacgaggttctaggcatgttttcattatttaggcatcacattttaaataactgcaatgatctttggaataagttgctttttattcccgttttacagaggccataatggttaagtaatttcccaatgtcacttcacactcaagtggaagagcaaggtggccaacccaaagcccacgtttcttctcctatagaagtcttcctcgtggctgactgcttgaaaatttagccaggtgttaaaggatcaagactggaagtgactggtgaaccatttgcagtggttccaaaggagccctgcaatggaaaagaaaggagagagagaaactccatgtgtggaagcttgatctcctttgaaaagagctcagcttaaaggatgatatcatggggactgtcaacaggaatcagagatgcatatccaagggcagaatctaatttcaattccaggacgtttcatgaaacagaatgcaaagcaacaattatctgctaaatggaaaattaaaggcataaataaagtcaaagctcaaaccagtgaggcaaaaatcacacgggctccaatttccttttgctgcttgtagctgcaagtttgaaaggaaggacacatggggatagtaaaaatatgagagcaatggaccacgtttaatcgatagtgaaggctctgatcccacaaatgctccccttcccactattagcccttccccacctactgccaaaacccagcaagctgaatggagcaagacatctgagaaagaggcccctgttctctccataggaacttcactttcctataaatgtgctccagcactgagtaagttctggtaaaaaagagctttatttccccagactccttgttcctccacttctgccaaaatacatttcttaagtattccaacctgaaacacacacatgcacacacatacacacacatatgctgccaatttcttggtattttgtcaatactgactttgccccttttctaaatcttcatctccaattaaggcttcctgtttgatagacaagtggtgacacatgacacagaataagcccagtggaagactttgtttcccacgggtccatatgtaagacactgggtcaagtgtcaaatgctttgggccatgatttacaaccaatgcttgtgacttccacccctccctcaccctctgtcttccctgctctcctttaaattcttccccacaagtgtgtttccaatcttttccctcctcttgatccccactgcctcttttacttggaccactgcaaagttcaccacttcaattccactctcaaaacagctgcaacaatgacttttctaatccataaatctgattatatttttcctttgttcagaaaacacaatgggctcccattgcctacaagataaagaccaccctctatggccatgcctaccaggaccttcatcaataatcccccttaacctcctccaccactgatgtcattcatttatcttttcactcattcattcaaaaccatgaagcatccactgtgtgccagccatcattctggacgcacagccaaactaaacttctctttcccaaacacttcctgccctcttacaacactgccttctcacagcgttctctttgccagaaacgcttctattcctcttctatcaaactctcattcacctttccagattcagcctcctcggtgtgtcctctgtgaagctttgcctaagacagacacacgcatgcacacacatgttccaagcaggttctgtcttctgtatccccacccaccatggttttatgaaatgaccatgacttgtatcactttgagaaatcactgcctgcttgtctgtttcctttctaaggcaaagattgtatcaacctcaagggcaggagagcattatatacttttctgtatacttaactcactgattggcacataggaagtgcctgtgaatgtttgctgtgaatgtgaacctgcctccaccacctggcaaaaaaaccacttagccattccaagctattctgaggagtgagcaaggtgagtggctacctacccaatgacacctttcccatcatgaaattttaccatcaccaccaacctacaccccagtctctgcaattgcgccattagatatttagttctctgtacacaccacctttttttatctttccactcttgttttctgatccgggaaacacagtcctcaagaagacagaacctgaagtcagggtgcttctatgaacccaccagctttgccattctacctgggcaacctggtatcatttccatccttcactcatgaaatagggatcctcataatactcagcctcacaaggtggttgtgaggattaaggaaggtggtacttatgaagtgcttaaaatagtaagtggcacactgtaagtgccaactatgctaaagtatttgctattattgttgttgttgttcttattttctacccagtcctaccttcaccttccaaaccaagtttttcataacccttaaactcgtctttccctttcaggctttcctgctatttcttaccttgaacgtccttctctttcacctgttcattcttcatgatggagctcaagtctccttcataaaggcaccaaagaccactcctcaccgatttgtctcaccactggagcctgtgcatgcccagatcccagcatttcccacttgtggtttacagtccgtttctcctagtaagtccagagtgctgtgacttcagggacagtgtctatgcacctagcatagcttttctgaagtccttccctgggctaggcattgcggcagcttctgaggataccatgtagctcaagcatagtccctgccctcaagaagcagacaagaaactaacctgaaagtctatggtgatgataaatgtgatatcatatggtccctgccctcaagaagcagacaagaaactaatctcaaggtctatggtgatgataaatgtggcattgttcttggcaactacaaggaaatcagtgaaaaggggaggacagagagaagaaagcccagaaaaaggaaagaaagcaagaaaaagaaggagggaggaaagaaagaaagaagtgaattgaggccatggagttacttcagttgtcaaatgttccactggaatatatttacaactatgaaaaggaatcactttcactattccagacacatttttgctgattcctttagcacagtgtttcccaaagagtggccaccatgccccaggaggcatttgaccatagtgtgcagaaggatattttaaattgtaataattgcgtacttcaacgtgtgttagtactaagtttctagcctttcaaacctatcttttcatggatattattgctttgtttagagtgagtgtaaacaaattacaagtgagtaaaactgaggggttctgatttcatgtcttgcctagaaaagagcttctgaggagaaaaaaatctaggtctaccaccaagggaagggaagagctaaaagccaagatttcagaagccaagggcagacctttggctctcactctgcctgaccagcaccttcaaaacatctatgcacactcaacagttagaaaggggctcctcgtctgtttttggtcagcagacttcaaaagtctcaaatgctctcaattcatagatagagagatgaaagccaggaaaattaaatgttattaatatttcactagtttagactaaatccatctgtagaaaaggtagtctgaccaactgcgctttttaaataaactttgttactcccatcacagaacgtgttccacaaaatcagcttatgtgagtaattcttttccagccttaatctcaaacccccaaggaatctcatttggactcagcatttgtgtataagcaacagcagaacaaatggtgcaatagctcattaatatccttcttggcaggatatgccattaaaacatatacatcaagttatagtcatgataggatcacacctcattttaaacagtacatggggctctgctacctgcagggtgttagccctgggaaacaagcagcttccaaaaataaaaatgtctaacctgctcattatcttgcagataaatgactttgtgcatcttcctctttttctcatgcttacttttcccttgtattgtgccaggcttcctgtaccctgttattgtaggatattgtcctgacatgctacaacacaacgtagtatagtgaatattgacacaaccagagcaccatggcaaacacacacacacaagaagagcaaactgaagactttctctattgattcaggtagcagaacagcctgaggccaggcagtaacatatttgattaaccttcagtataccagagattcctaacaatcctcagctgagcattattgctgtagccaaagcaggaactcctctgaaccaaagaaggtctattgacatcatgctcaggtagtcggtcaggtagattgattgctcatccactcctaactcaggtggattgtccacatctggacgacctcatccctggtcactgtcaaagccactagttgagtgaagacaggcagttggtgtcattcaagactaaatgatcaccagactaaattaaattatgtgttcgtagcatccctaaatccccttctcagtacagaaattgtcttgcgtgttagacacaattttatttggaactggcaatgaatttttttcctggctctcacccttcaaccaattggttaactcctatttcttcttcagatttctgttcagaaaacacatcttcaggaaaatcacccctgactcacccaggctaagtcacaagcttttgttataaggtctcatcacaccatatgcctctctttcaaaaccagcacctgcagaaatgtaagtgtacattgatttatgtaagtatttgaattatgactgtttttgtatatgtccatgagctccctgaaggcaagtactttgtctgcttccgcctgtttcataactatcatgcctaacacacaataacctctcaattaatagccaagtttattagcaaaaaaaattgactgaaaaagtgaatgaacgaaaatgttgctaccaacataggcattataatgagatgatatcagtgatctgagctctgaacaaatttattcttctcttcctgggtacatacctgaattatattatttcccaatctccttagagttaaaatatagtgatgtgacttttgagacatgtgacttccaggtctggccctggaatctccaacatgtgcttcttcaagcccctttgcccttttggctagctgagattaaaatcaccatagcaatcttagaagcagatgttaaagatgacttagttctgtcagcctaggtccctcaatgagcacatggagcagaatcacccaacaacatattcagccatcttcagaactgttaaattgaacaagaaagaaatttctgataagtgtgagcctttatgtatatggaatttatttgttatatcagttagggttacttgaagtaatacaactcttcccagtgatcctcaactagaaaagaatttggagggcatgttagaatctcatgggaaaaggggcagttggaaaaatcttccgaagtataatcactgtcttatgtactttacaataaacgcagaaatttaaagacatatttgactagatgaaaggatttgtggaggtatggaacacacacattcacccacatgtgtggacatagaaggcagatacaacaaaaattacggttcatcaccaatagtggcagaggatgggtttcgagccacttcctttcaaaccaaccacaacgtcataagtgatcaccatcattctagttcctgtgaagaagagagagctgtggaaaaaatgctttatgccctcaaaagagacagcacaaaatttcagtttaaaaggcttgcctcctatgtgattcactagcaatgaaaccttggaaaaattatttcaaccctcttttccttcatttgttaaaagaaagtgtttaaatttgcaactcagcattgttttaatgttatatgattcaatttatataaagggtcttgtggagaggacataaaagtacatcaaggattatagccaaatgtttcttatgctggaacagagttaggtacaaagggttatagaaacatagcctgccaggttgaatagtaaagaggagggacagagaagacttgtagtaggaaataatccctgattccagggccaaatgtgggattcaaataatggaggccctagcaattccgaggtgatcaggtggactttcctggatgttctgggtcttgacctgattgctgaaaaatgaatacaaattcagagaagaagaaagctagtatgagactaccaaatgatcatcagacatttcttgaacaccaattaaattgctaggtatgctaaagtttgcaaaactggtatagacaccaagagggaggtatcaacagagactccccaagagctaagaggaaaccaccttggactggaagtcaagagccaaaattctagactctactctgtaattaactacctatttgaatttggaaaaatcaccatcaactttcccagcctcgttctctgcatctgggaaatgaaggcgtcgtccaaatgattacaagcttcttttcctgctcttattgcatgattccacttccacagccctccagcattttttagcagctgcatcgctccatagagcctgcagagggcactagactgggaattagaaaacctgatttcccttccagctccacctctgaccaattgcctgaccctggtcaaattgcttaacctcttcctatctcagctccctatccataaaacagagggacgaataaactctcctcctaccactaagaggtgtagccagagttaataccctcatcgtcctttgagctcagcagatgaaaggcactgagaaaagtacaaagaatttttatgtgctattgactttattttattttatgtgggggagggagccggccccagctggaaagctgctttctctgaatcaaagggcaggaacccagcaagtttctcaggattggggccttagactgggctgtgtatacagacagtgccagccaaccccacagttcagtttcctttaacctggtgctccaggcaataactgtgcaactctgcaatttaacaatgtgttctttgtcccacaactgttctcgtttctcaactgcccaggtaatatgtttgggcctgtaggaagagtcaaatagttaataagggaagggtttggcatgccctacgtaagttctaccagcaagtcccaacaagaaggcattctgtgtctcctgattcctgacctacccccaaaatgtacaaatgtacaaggaatgagcccactttcccagcaggctgtaataccagtttggcctatatcaatgcattggtgagctgtgttttgtttatggttttatgccatctattttcccatggatattatgttttctaaagagcccttaagtttacgtcagcttttaaagctaccagcagcaccatttcagttcatattaagcccttaatatggtatgaataggagagctattagactaaagagccataatcatccctgaggaaaacatccatcaccaacatttatgtggtccctgaacttctaaaaggtgtcatctctctggggtgtatctggtgagagctttctctgggagatgccaaaaagccaatgcattagatgaagcttagaagggcattttctaaccattacaaattgcctagtctagcatctcaatttcatctacgtgaagagccttaattaaatttgttggggtttgatcctttatccccagatgtggcgctgacagagattgcttacataaataatgtgtgctccaagtgcttgccaggctcctggctcagctgggacagctgtagctttttgaatgtcattcccaagatatcctgcaggtgttcagcttcccctgttctactctgggaagagagccgtgggcaacatcagcccagaagacactagtgcatcttgacagagcattcccactggacaggtgcactacctgcagacacctccaacagtgaaagcaccccccggctgcaagtattgtctcgccaaacggaaggcatttcttgtatgagtcttgaatctgatattctttaataagactttctctaaaactgtatacacacacgcacctgaaaacgttatcaggcttttacttatttgacagtaatattccaggaaatggtccaagtagcaaaatcttctctcagtggctttctcgttcctcatgtctgacttgctttcctgctgtctactggagccaacaagagaggcattctcactctggaagttgttagttcattacagcctaggttgatctcatctggctctggttgggggttttattctgaagattggctggtaaaagcctccacaaagtcttagctagaacattcatagccctgtgttgacttccgcctcaactctggcttgaacttagctgacggtcctatcagtttgctcaaaggagcttttttgctgcaggcaacagaaaggagtggaaagaacacactcattggaacccaggagatccaggctcgcctctggctctaggacttgctcatcatgtgatatcagatacatgacttcatcgctgagtctcagtttccttatctatgaaccggggatattcataccttcttcacaggacaagagaggcacatacaagttcatatctgtccctctatttcaagtgattctcccacatcagaaccagtttggcttccccggcctggtcttctttcaaaggatgcacaaggccatttacaactggcctgaggaacagaagaaaaactttggcaaagccgttgcagataaaacaaggatgagacacaaaagcaatttttattctttttctggttgaaatccaatcaaggagaagagtgctcctttgattctgtatgctattattatgcccaaagctgagaaactagtgtttgcccaacacattagagttcacgtgacgagcccatatctatgatggtgtttgatacccaggcttgattagtaagactaaaaaaattgccaccactgcacaagtgaggacagtaaacctcaaaggagtcaaataacagcctgaagtttatgtaggtggatcaaagaaacaaggctagtctatgaatccaaatctggggtgccttctcctcttttattgcctctcttgctcccattggcctgcgggcattcattatatacttcagtttgttaaatgttaggaagaaaatctaaaaagtaaattgctaacacaaagcaaacaaatgaaaattccaaattgatagcctgttttctaccacaaaaacgacattatgtcatataaaaagctgacaccacctgcattgctagttccctctatcaccccttctttctgaccctctctttagacataaaaagggctggtcatttttaaatgatcccatgatccctggactctttgacttctcaaggcttagactcgtgcttcctggaatgtccttcattcctctcaggctggtacattccaagtctcccttcagcacacagcctacatgtgaagaacatgatcgcagccctccagcaaggccgggtgaaaagaaccactgccttagaaccctgcagatgcaactttggtaagagcccttagtcctaggtttgggaccctgggaagattgctttacttttctgagaatcaagggaaaagtatactgtccctccagcagtgatggaagattaaacaagaacatatataacaacagcacagcattgctactcagtaccactcaagaattgctactctacttcccctccttcctgcttcctctgttctccagaaaaatcctatatgcccaccaattatagtgctaatcacaccgtattgcaatcatctgtgtccttttcactagactgctagtaagttcctcagtgacatgaaaacagacatttttatctccatgccccagaactcagctggacattcattaggcattcaatacatggtgaatgaagaagccatataagagcaggaagttatacagaaaatgtttccctttctttgcctaggaaaaaaagtatgttatctctgatttctttaaaccagctttgtctgaactttttgaacttcaggtggctttaaatgttggttctaactggacggctcaagccagcacggatatctccatcaggaatttcccatccacattccacaagcaactgtgtctgtgcacaaagttggagggtaaatatctgagtagagttcctccttcctggatctgccagcccagcatgcatatggctcaacagttcttaagctgggccaagaatccacacattataaaactgacatgaaaataggcactagccagatggaatggaaatcaagcagcagatctaagggaagcagggaatggaaccaaagaacagttctctgcctctcacccctttgtgtccatcttgtgaaaatctaagctcatttgagatcattagagggtgggtgaccacaaagccatgaattatttaccctctctttacatcagtttcctcatcaatgaaatgcaggaataatattctccataaaatagggatattatgtggtggcaatatcctcaccccatcaactatttatttggattaggctttccctgtgcagatccagccttgagtgacatctaccctaattgcaaaataactctgagaacatttcatgagtaccattaggcaccattgcctcctgcgtaaccccatgaataggaccattgcatcatgtcactgtttcttaccccactatgtggggctgttttcttctatcctaaaataagatgttgcaggataaagatgcaccctctatttagtgacggaaaaatgctgggattctttctaggacagcagcattccagggacaggggccttgaggaatagagggacttattataaactctagaatgccaatttcagaaaaggtgtgtggcataagtgtttctatggtttagaagaatacttggtgaattatggagtatgaattagaggagggagatggtggttgctgagagattaattaaaaagtttttctatagatcagaatgagagatgataggatcctgatttaggccactagcaaaagggggaaaaaggagagtgaaatatgtatactttgaatgtaaaagctgcatggtttggggaccaaatttacaaatgggaatacagtagaaagggaaaagaagcaaaatagcttatcttaacacaattaaatatattccaagcctcctttccctaagaagccaggataaactcacctatttgtgacaaatgttttgtcaagataatatttgttcaataagatttccttcttaagatattttatcatttaactcacccccagaagaacagaattaaatagtaaaagtgatttggtcattaaacaagagggttagactgatcacaccagctcttgaaagtcatttctgtagttaatcatataagaacgttgactccttagaatggttgaaatggtagtattccactcagaaaagcctaatctaatcctggagcaccaaggttacgaacctgaggccaaggttttaaattccaactcactcaggacgagtactttgtagagacttcatccctgacctaggtgggccatctccaaacagaacctttggacagttccgtggtcagcttttatcttgcattttagtaaaatagaaacagttgtcttatgtgtgtagcatttaaacattctagaaaaaaagaagaaaaaaactgggttcaaaagcagtggagttggtgtatagaaaaaaaaaaagcataaacctcaggattcctcataaattccataggattctcctaggtaataagaaagaaaaatgaaggagagggagattatcactggatatgtttggacacagggctttggaaagctgatcggattgatgtgtcagtcaggctcttagcaggcaataggagcacacccaaattagggctctttgaagggaaccactgcactctagcctgagcaacagagtgagatgaaagaaggaagggaagggaaggggaggggaggggagggggaaagggggaaggggaaggaagggaagggaaggaaggggaagggggaaagggggaaggggaaggaaggggacggggaaggggaagaggaaggggaagggaagggaagggaaaagaaaaggcactatttaccaagtgtgaacaggaccccaggaaatcttaagaatattgcagtaccccagggttcattatagatttatacatcaaggctagaaggggaaagtggatagagtatttactgaaacctggagtcaaagagggcccagtggagaaaggagcctagagctttggtcaaggttaccctgcagggagggagcatgtgagtcatctttccaactccactcacctactcccttcagtcttctgttagtgctcacccttgtctgaacccaggtagacatcagagacatgagaacctgttgatttagtccatacaggtcagtctcctggggaatagagcaaggtagaggagagtggaaatggcatcagagaactgaatggaagatacacagctcaaatgcgttcctgagaacccttacattctatgacatcctagttaatgtgcactgggttgtaccaaaagctgcgcctattcagcagcagttctcaggctgatgtgatggtagacatatgcagtgagattctcaaagaatgtttttggggtaattcaactgtaatagcagatttcagaattttgtttataatcctaatgaatggcaaagatcctctatgatttaaggggaattttgctttaacatccactactctacaacacatctgtggattggggctggccaggtagtattatactcattttccagatgaggaaacacagcaatctctttgcccatcttagttcacaaagctcagtgaaaacttgtccctgggttctgtgccatgaatgccaatggcctaggtctacttcttagcttgccttgggggaaataaattgaaaacaatgatttctctgaggagctacttgtaggaaactcatcagctttagtttcagatacttgaataagacgctagtgtctcattcagcaagtccatctatcatccaacatttttgtaaccctcccttctgcaagatactttgctagcaaatgagtggaaagaagaggtgaggagtgttaggatttggagacttggtaacagcatatcagataaaaatcttgtcctgcccagtgggaatttacagaaaaaagaaagaaaaaaaggaaagaaaagacaccatttaccaagtgaacaggacctcaggagaccttaagaatattgcagtaccccagggttcattatagatgtatacctcaaggctagaagggacaaatggagagaatattcactggaacctggagtcagagagccaggtagagaaggaactgagagctttggccaaggttaccctgaagggagggagcagttgattctaatggagaactaacccagaggctcatcaacaggagagtggaaaataaatggtgatatatccatataatgagtagtatacaacaataaagggaataaattactcaggcatgctgcaatatgggtaaatcttaaaaataaattaagccaatgaaaccagacccagatatatactgtataattcaatttccatgaaattcaagaccaagcaaactaatctctgttgatagaaattatattagttatctcttgatgtggagactgagttggaaggaccattgaggacacttccgggatggtggaaatgctttatatttttgactcagttgtggttgcatggatatatatatatatatggatatatatatatatggatatatatatatatatggatatatatatatatggatatatatatatatatggatatatatatatatggatatatatatatatatggatatatatatatatatatggatatatatatatatatatatatatacctgcaagagaaaaatcatcaagtggcatctataaaattggtgcaatgcatgtttataaattagatcctaacatttaaaaatagaacaggaaatgctacagtgaaacatgcatagtgattaaaatgctgtccttccagcagttttcttctccacatgagtaatgccctgagagccttatgcatgtgttttggggaactgaactacatggttgtaaagagcatgggctttgctgagtgacagatgtagctcaaattctagctctatcacttcttagatgtgtgaccttgaacaagtcatgtaacttctctgagcctgagtttcctccttggtaaaatctacctccaacatatagtgttgttgtgagaattaagtaataaaatgaacgaaagaacttagccaacttccgggaacattctatgctctcaataaatataggctactggttattatcattgttataaatgctgcttttctgccctctgctccactttacctgcagtgaggacaattcagagagagaaaaggagggtggacagagggaatggatagtatctgtgaattttcttttcttttgcttttccagcagtttcttatagggcacgtttgaggctgactgcagtggaagatgtaacttactggacatcatagggacatggtgcatcctgtccctatgatgcaccatgcctggcctgcgggccttcttaatatgcagggcaatggccagtgctgctgtccccctgcacgcagacttgtcacagtggcactgtggggctctgctggactcatcagtggctccctcacccacagccttcacaactctgactggaattcttcgcagagccagggcacctaaaggcaaaaggtgaggcccccgtggtgtctgccagccagttgcttccataatagagtattgatctccaccagaagagtttcaagccctgtacacctagcattggccattaaaggcaggcttctgcagatggtaaatccatcagctaccagtttgacattaacaagcaattacaatgcagtccctgtgttagctccactaggggatatcagagtgattgcttcaagtggagaaagatgggggaaaaaatttgatcagtccagagtgcttctctagaattcaggccactgagggtgagactatatggtgtagcagaatgagcactcgactctgagttaggaaataagggaggctattactagtgatctatatccatcactttccttctgtgagcctttctgtcttgtttctaaagcagtggttctcaagcctggcttcacattagaatcacctgggaagattttcaagctcccagtaccaaaactatgcatcaaaccattatatcacaaactctgagggcgaaaccaaatatccacagtttttaaggcccttcaggagctttcaatttgcaggcatagttgaaaaccttgaaaatatctggagacaggtagctgaaattagtgatccttaaggtagtaatgcatgactttcaagaacgtgaatccttcaggtgcaaatcatctgaggatcttgttacaatgcaggttctgactcagtagttctgacttagtaggtgagagatcctgcagttttataaaagcaaccagtggatagagccgctgctggtcctgggacaacattttgagtaacaggagcaaaaaggtaccttttctctcaaaaatttgaaaagcccagtgcagcactgtctaatagaactttctgcactgagtacagtagttcacgcctataatcccagaactttgggaggctgaggcaggcagatcacttgaggccaggagttcgagaccagcctggccaatgtgacgaaacctcatctctactaaacatacgaaaattagctgggcacagtggcacacacctgtagtcctatttactcgggaagctgagggatgagaattgcttgagcctgtgaggcagaggttgtagtgaaaagagatcgtgccactgcacttcagcctccgtgacagagcaggactgtttcaaaaaaaggactttctgcactgatggaaatttactatgtctgtgttttccaatatggtaacaagcagcaacatgtgactactgagcacttgaaatgtggctagtgcaactgaggaactgaattttaaatttttattaaattttaattaatttaaatttaaatagccacatgtggcgacttgatatcacaagtctagaggttttaaaacatgaagcatataacatggctaagatggggtgttcatactatctacccacgagcaggattacacatgctcttctccagaaataggccccagtccatggcaagaagttctcttcctggctcaaattaagcccaaagtcaatatgaacagagtgtgttgactctgggtggaccatgggaggaaagtgactagagacgcaactgaagaaataattactgtactgagcctcctagaacaggctaaggaccctgagttttaaaacaagggcaatggcaaagatacggccacaccatcatgacagtagagagagggaacacttaatattacccagagctggcagggaagacaaccagaagagcaacatttgagctgattcttaaaaaaaaaaaaaaaaaaaatagagatacacgagaaatccaaattaggatagaattccagaagaagggagtagcatgtgcaaaaaaaaaaaaaaaaaaggaagcaaaaattagcaaaaagaaagtactaagtgtatgtcagagagtagggaaagtgagggtcttaagaggccttgagaagtccaacctcaacaactacagacaacaaaagacaaaacccatggtgacataccttttcttattttaatagataacagacattattattaagaacatcttaagaggtagcttccaaacagggtcactgcctacagttatacagggggcacactacccaattccaaggcagcggtttgcatcaatataatgtaaatggcatcccatggagcagtgcaatatgccagccctacccccatttctttcctttttaagttttttcattaaagttctttctcttctggacaagaaaaccctatgataatggaatcttcaaactgaaagcatctataaaatgaaccccagattcctggggctttagactttcgttaaccaaataagatgaggaattatgggtgtctgatgtgccaggtactattccaatacttaaaatatatcatcccgtatttctcacagtagaaccatgaagtagagacattactgcattttcctatgagaaaatgggactgagatggttaaggtgggatagtataggtagaaactgttagaacaaacatactcagtcttaactaatttctagatccatgctttgtccgctcctttgttattccttgaagatgttaggggaaattcattagtccattgcaataatgtacaactcctgtggaaataacttacacgcctatgattagaacacataggttcagacatcacaaggctttgatgtgcctgaaattctatcaatttacggggcaatgctagttatctcttggtgatttgtgcctctgtttggcagtagtctctgccttagatcccttggaaagagagaaactaattccttaaaattttgtttatttgccatcctatcaaaatatgactacctaggggaagaataattaagtggatcattaatggtgtatttaccacatcctgactggaatcataattatttgcttacctggatgtataccaccctcagttgtcccgcagtaagctcacccagcttctctatgttaattttcaacaccatctaagtcttcttgggtaatttagtccactacagtagctttacagatcacacacatgatagttatggccaaacctgtatctccttccttaatatttcgttatagcatctaacacatatatccagctgactctaagactcccactcctaaatgtcctgcagctccctctaccttaaaatttccaaaactatgtcaattctcttctcttctaatcttgtttttccttttgtgtattatttctcagtgaatcagaccaccacccaaataacccaagagtcttctttgatttttttctctgtctcaacatctccaaacccctctaccccacctagccacttccagtcttatcttttatggtgagaaccagcttcatgtaacagaaactctaaaaaaaatcaatgatttaaataacttgggtatataaatatctctctcatactagaagatcagaggtgggaagtctgagcatgatataatggtcatcaggggtccaagcttcttcattctgcctcaccatctcgcttgcagcttctgcctaatgttgacttacagttcaagatggcttctggagtgctaccattacatccatgttgtaggctagaaggaaaagggcaatggcctgaagaggaagggagagttcctgttaactcagcttcctttaaacagcctccccaaaagtttcacgctgtatttttgctgattctcattggtcacaacttagtgccatggaagactagtaaatatagtcttttagctggatggcctgctatcttatataaaatgaggttaggttactaagacagaaagggagagcagatcttgggaggcagctagctgtttttgccatcccaagtgttgtgatttctacctgctttcaatttaacctatttgccagtttctctgcatccaaccatcatggttctagttgaggtccaacctcagagaaatagctacttaagtgatactgggatactttgtacagagcaaagaaaccagtctttatgccacttggaatggatttttccaattgtcctgcccccactgaaaaaaactcttcgttcagaagaaataatgaccaatgacgtaagaaggactaatgtttccacctgcctctcaatttaatagcaagagattccacatgtcagacaggaaagaaggctaggaaggaaaatgagcattaagattaataattgatgttaatactgacaacaaagacaaacaatggtgataaatgaaatggcagaaccaaggaaattgttctactgtgatatctttctttcaagcaggtcaactgtataattaccaaactcaatttcatcaggaatttcatcaacatcagagcccctgggccaccagtcttcaatgtttgctaccagtgtgttactgtctgcttgtcattatctagagacaaaaatggaacattacaatgggctttatgacccttctgtacctcagcatttccatcctgcccccttcacctagctgtacctcattatctatcccagtgcctggcctgtgatatccctagaaattattattgcactaaactaaattaaacacaaagacttagttagcggattcacaatttttagttgtactacatagtcaaacgagtagacgttcaggtcacaaaatctagcctgtctccccatgaaaccacaatgccattgtctgaacagattaaataaagcagagcatcacctcaaacgattttcatggttcaaatctaggtagctatacttaccagctgtgaggcttaggccaacctattaaccttctatttcacttttctgctaaatgagacaatatggacttgacttcattttgtgagaaataaataatctaagtaactggtcaaacacattttgtgcttcttaaaaaaaggtggtacacacacacacacacacacacaacacccgatataatacaatattttcaaatgacactagaaatattttagtcaggtctaaaggaacagaagttaatgataaaatgataaacaataaataatagctactgtttcatgagaaaattacacacatcttacttgacttaaacctcacaacagaattgagcagaaagttattaccctgagaaaggggacttaaggttggcaggataacaagtgggagaatctagaggtaaagtcatatctatcttattggaaacactcaagaacgtcaaataagcatgagaatttgagcaagactgaaggagaacgtttaagttccctttccaactcatatcccaattctggaatctaatttctgtaacaagtaactatattccttactacagaagtaaagatggccccatggagaaactggcagcatggcatgatggaaatggaatagaatcaggaattgttttgtacctgtgtgtgtgtgactttggtgttctgactcagacacatatttgagaggtagagaggggagaagagggttgccacattatgtaacagaaaggagcccactgcttaaacacttaccttgtgccagacattgcactaggactttattacctgcaacccatcctgcaaaactgtgaagatttgatatgatcattctcattttatggttgagaaacaagggttaaggacattaaaaatttactcaatgtttaaacatttgcctgtcttattctaaagccccttctcttttcacaatccctttaagaaatggacatccaatatttgagtggcagaggcaaaaacatggcctaccagaaccattatgatagctttacaatatgcccaccaattatttgatagtcctcctgccaaatggtgaaggctaattaccctcctacagaatgtgactcacttctaatgaataaaatatggcacaagtaaaagtgtgcgatttcagagactaggtcataaagaacgcagtggcttcttccctgctctctctttcttaggtcattctctctgggtgaatccagctgacatgttgtgaggacactcaagcagctttatggaaaagcccacatggtgagcaactgaggcctcctaccaacagccaacaagaaaccggggcctttgccaacagccaagtaagtgagacattttggaaagtggatcctccagcccccgttaggctcccagatgacaacatcccctgctctcatcttgaccacaacctcatgaaatacccttatccaggatacccagttaagccacaccacaattgctattttacaaaactgtgagctatgtgttagttgtttttaagctattaagttttgaggtgatctattacacaatgataaacaactaatacacccatccagtgctgaagaaaggggttgtcaggagggtagaatttgcactattaaatcttcatagagtgctatttcccgtcactacagcacacttgtcaccaactataaagaattaggtcagggaatttctttggttgcagcccattttgcctttggttgttaatggtagaaccgtttccccacaatctgcaggaaataagaatcagaaagaaggacacaccattccatagcacagaacacaagtagatggctcccatgaagaatctagcatcatggtatggcagaagcagaatggactcaggaatcatggtgcctacactggaatttcagatcggccactgacacaatggacacattattcaacatttccaaatcttggcattcttatccacaaagtgaagataataattgtcaattcacaggtgattatgatttaaagagattacttttgaagagttcctaacacattcagtcaacatttaatgatgcttcaggcactgtgttcattgctagtgagcgtatgacacacacagccatacggtcacagagctttcaatgaaaagtaacataattgctcatttcaccaggcccccggcttggggcgccttccttccccatggcgggacacctggcttcggatttcgccttctcgccccctccaggcggtgggggtgatgggccatggggggcggagccgggctgggttgatcctctgacctggctaagcttccaaggccctcctggagggccaggaatcgggccgggggttgggccaggctctgaggtgtgggggattcccccttgccccccgccgtatgagttatgtggggggatggcgtactgtgggcctcaggttggagtggggctagtgccccaaggcggcttggagacctctcagcctgagagcgaagcaggagtcggggtggagagcaactccaatggggcctccccggaaccctgcaccgtcccccctggtgccgtgaagctggagaaggagaagctagagcaaaacccggagaagtcccaggacatcaaagctctgcagaaagaactcgagcaatttgccaagctcctgaagcagaagaggatcaccctgggatatacacaggccgatgtggggctcatcctgggggttctatttgggaaggtgttcagccaaaagaccatctgccgctttgaggctctgcagcttagcttcaagaacatgtgtaagctgcggcccttgctgcagaagtgggtggaggaagctgacaacaatgaaaatcttcaggagatatgcaaagcagaaaccctcatgcaggcccgaaagagaaagcgaaccagtatcgagaaccgagtgagaggcaacctggagaatttgttcctgcagtgcccgaaacccacactgcagatcagccacatcgcccagcagcttgggctcgagaaggatgtggtccgagtgtggttctgtaaccggcgccagaagggcaagcgatcaagcagcgactatgcacaacgagaggattttgaggctgctgggtctcctttctcagggggaccagtgtcctttcctccggccccagggccccattttggtaccccaggctatgggagccctcacttcactgcactgtactcctcagtccctttccctgagggggaagtctttcccccagtctccgtcatcactctgggctctcccatgcattcaaactgaggtgcctgcccttctaggaatggggaacaggggaggggaggagctagggaaagagaacctggagtttgtggcagggcttttgggattaagttcttcattcactaaggaaggaattgggaacactaagggtgggggcaggggagtttggggcaactggttggagggaaggtgaagttcaatgatgctcttgattttaatcccacatcatgtatcacttttttcttaaataaagaagcctgggacacagtaaaaaaaaaaaaaaaagaaagaaaagaaaagtaacataattgagtaataattttttaagtgtggtaaaatgtgtggcacgtagtaggtattcaataaatacttgcttttttcctcctttttaccttttcctagagtgctacttgatggtagctgtagtttttcttcaagacatcctatttgtcctgatacaaaacctcttttgaccgctaacggcatagttcggccctcaccattccctcacatattccacaaaaatgtgagcattaaccattccccatgatacagataattcattttttaatttaattttttaaaattttatttatttacttatttattttgagaccaggttatgagactggctaatttttgtatttttggtggagatggggttttgccatattgtctaggctggtctcaaactcctgagctcaagggatcctcctgcctgggcctcccaaagtactgggattacaggcatgagccattgcacctggcccggataattttttttctttttttgaggtagtgccttcctttatagctcaggctggagtgcagtggtgtgatctcggctcactgcaacctctgcctcccaggttcaagtaattctcctgcctcaacctcctgagtagctgggattacaggcgcccactaccacgcccggctaatttttgtatttttagtagagatggggtttcaccatgttggccaggctggtctcgaactcttgacctcaggtgatctgcctgccttggcctcccaaagtattgggattgtaggcgtgaaccaccacgcccggccctgaaaattcatttttaaaagaacatcatatctaccttaaatgcattaagatttcacattagactcattattcatagtgaacattaggaacttaagtccactcagtaataatgcacctattcatgactcttgattcaaagatgtgcacctatttaccctggaccagctccttggaaggacatgaaatagagggtaataatcacatctttccaaatttgctatgaaactgcatcgccaaaaactgagactcattttccgattgatgaatcaaatgacaacaaaatctccagggcattctgaaacccaacagggattaatgattaggcataccagtggtagttaggagacttgcccaaatttccagttttctgcagatggcatctaagttagaagactgtcataaatttattcatggcttggctttctgctatttgctcattggtgacacttttatatacaatggtgtttctatggctaggaaatcccagtggagatcaagaaacctgggttctacaaactaatggggtgacctttgattagtcctaactcccttcctaagcctcagtttctttagacatgaaatgaaagcaatggattacattgccttagactttttcctagatcgaaaatgtgataattgtgcctttccaacaataattgataccactagtgaacattctttcttaagcacatctattaaggacttcatttatattatttttctaatctttaagcaaactctgagataagtgactatgatgtttattccataggtgcaaaagatttgtcaagtaactctccaaagtaaaagagagggctggagtttagactcatgactgttctgctctaacccaagtgattctggatcccagactccccaaatgacaagttattccagaaatactcagaaaaaggagggtgccgtatgtcgcacatggaaaaatagaaaaagtaacagaatccagccaaaggattcccagaaattgaggctcttctgttcttggcatttgcatctttggatgtgtgttttttacattgctctatgcaaaaggtatgtttcaatgtgattttttttttctcctcccatcctaccactgaggaatcacagggaatagactcgacacctgtgaactcaatttaccctagaaaaatgtttcagtcacacttaaaataaaaagggcatcaattagaataagaaggacactttgttgcctaggaggactgaacttttttggacctggggcaccttatcagcttcatttttagctctagtataatcaaaaggtcaggatctccactggaccttagaaattttttatttttcgataagattttctgaatgcctgccatgtgtgaagggaaatgcctggacttctatgcatatgtatttcattgtctccccacatctacccaggaagacaggcacagtgagccttgcatgttgtagataaggaagctaagtctcaaagacagagaaggaatttctcaaggtcacactgtaagtaaaaggcaaaggagggattagaaccctggatcctctttattacaccaagcctgcctcacaaggatgccaatctctcatcacttactgggaaagacccactcctcccattcatgataaggtaatgctatccaataaaaaccccaaagcaggcataaaatatgaagtagcgaaactcaggcaggcagaaagcagagtggtttagacatggctgctgtctgcagcagggagaagttcctggcaacatgaccctgaaaataacaatgagtgactgaagctaagaaggaagaatcttccaaggactctgaaactagatattttctcaagccccacctatggacaaacacaaatcatggagaaataaagatgccagtctccaggaagcaccagagttaaattcattctggaatttaactcctggcattaacagttagctgggagattaaaacaaaccaacacacaaacacaaaaaaataatcagtggaaaaaagttaaaaaaaatcaatggacagtggtttcatagcagatggcaaagaggaatattaaaagctgtattttatttggaactcattttcttctgatttccttattaggtgttttgtatatcgagacccataattccaagcagcctccataaggtagaggctaagaattgcaatttgtaggttaaaaaactgtgcgtgcaattccttgtttgtcccttgtttgtcatttctctacccttctgtacttggcacacaccctaggaagatgacttgtataaactacgtaaatgagctccttgccttctggctcctagttgggtttagtcaatgagacctattagcaggaagatcggaaggtaggagaatctgactttttattactttaaattccttcctgtcaggccttaaattggctgcaatcttcctttgaaagttgcagctcccttcagaaagctctttcttgcagctctagcatctccccagacttcagtaaatgcttcctccctgtgccctgagtcctaggcttagagtgaaaatgggtctctgctgccactaaccctgggatgcttcaccctcccttgtgagtttcccttagttctgcccacatctttgtaaatagtctcttcatggaactttcctcaattgcctcttttaaatgtttgagctggttatgttgggaggggccccactatgggaggaacaatgactaagacacggaaaggttaagtagcttgtgcaaggtcatacaaatagcgcattagttaaagcaatgcttgtttctataacaaataaacccccatatctcagtgattttaagtaaagatacattaattttttacttacgtcagtccaaaatagggttcctgaggagcaagtggctcttcttcaagtggtgatccagagaagaagctccttgcattttctggctctgccatattcaacacacctttcaaggtgaccatgttcatcagcacaaagctggaggagggaaagagtatggaggcttgaacatggcaggttgtgtgtcacgccctccactcatgtttcattggctgaagctcaattgcatggctgtccaattgcaagacagtcccagagatggtgagctcaggaggattaaaaaaagagtttgggaaagctcttgacaatttctacctcagaagtgtgtttggaaacacaaactcaaatccaaagcttttcactcaaaacacaaggcctccagttcatggtgtatacaattatttaatgtgggcataaagtaataagaatcatccatgtgtgttcctgaggggaagagacagaaccagagaaaattttataatgtgatagtgtcagcccatgattctaccatgggaatatctattctgaaaaagtgtaagatgggaaacagggactgctgctgcctccacctatcacagtaatcacttactttacttatattaccgataaagtaatgtataagtaactgcacataagtctagcatttaaggacattgatttttatatcacttgttatttatataaaaataaccatatatatttaatagtaaatatcactgtaaaaggattacgtgaacaatatgcattccatgatgatttacagtcccagttagaaattccaagggtcattttgattatatgccctgttttctttatctgctaaatttagaaccgacatctccactgtattcaaactgtagctctctctctttccactcacatctctgtggatttttctctactgcctgtgagttttatagtgttagtacatactctgagaacacagacacagtgggactttttgcattgctatgtaaatctgcagattcactactcaataattattgacctcttgactttgccttttttccacctcataagcatttccaatgatccagaaatgtgaagaaagaacaagccccaagaaggtaaattttccctgagtaacctggggaactcacataaaaatggactgacacaaatgttatttcaagatttaaaaacaatatatttgaatcctacatcaagaagtaaaatatcataagctctcagcctgctgatcgactctacagcactgtttctcatcattataatatccaaatataagaatgtgaaggaaagagaatttcaagcaccataagattatcatagatattactccattgatctagtcattcactgaatgtgagaccatgtgtccacagcagtgaagaaacttctgttcctgccatcaaggatcttaccgggggtagacagatagtgcacacatcatcaattttttttataaaaaggtaattactgctggcaataagtggggtaaaggaaatcaaattcaggtgctattttagaaagtgctctgagatgagcaagtggcatgctattttagagaagtggtcagaaaagattcccctaagcctcagagccctgactgatgagtgatccaggtagagagtggaggaacagtatttcaacctatgcaaaggccttgagatcaggatggtttcaggaaattcgagaacaccatgagtccatgtggctgcaatggcaacattgaacatgaggtaaaaggtggccagaggggttttcatggcctgtggagtttgtaggccaggatatcaagagtttgaattgtgtttgaagggtaacataaagctatggaggtaggtgggtgaacagaagagaaccatcatctgttttgttttgttacaaggatcgccctatttgctacatgcagaataggctctttgtgtgtgtgtgtagtggtggggaggaggagaattgacaagagtagaagcagagagataaattgagagatcagaaatgactcggaccacaagggtagacttggaggtggtgaaagtggtcagattaaggatgcacttgaaaatggagttgtcaggacctgctgatggctatggcatggctgtgaaggaaagtgaagaatcaggatgcctcccaggttttcaaccttggcactagtgaaaggattggcaacagctgaaatggaagcaactgggaaagatgttctgccctagtggtggaaaacacgccactggctcagctggatacttccaaagggctgctctggtaatacctctagtcaacagatatttgatgagtacttctgccctatcctcaaggagtcccaggctgcaaagaaaaactgatgtacaaacaaatgatcatgctgagagagaaagcccacaagttactctgggaataaagaaaaggacaatgaagccaaatgtggactcaggaatgctttttggaggaaatgacacctagctaagacttgaaagatgaataaaagccaaagatgttgggagaagcagtcaggcagtggaaacagcattagcaaaagcacagagagctggaacagcatgacaacaaaccacacacgtctcaccagggaagtggagggtggaagggagcacagggatgaagttagagacgtttgcaggttccaatcatagatggtttttatgctgttcctcagagataagcatctatcctataagtctaaagaggcaaccattgaagagtttaagataggagtgccagtgtcaggaattaggatgacaagctcagtttctaggaggtccagatagtaacaaataagaacatgtctttggcattcattgcttctaccacatattttgcctttgatcccggttttcttgggtgtgttcttctattgtacgtccataatctcctggtctagaaggtataaaagcttattttttaagtttaattttctgcactcttccagtaaacgtctagcatggaagaagaaatctacagagttccctggtatattgcctggctaggatttaagcaagatattcatgaaccatcttgaaatatcagaaataaagattcactcccaaacccaccaccactatctgcatacctgctgccatttagtatcaactgattttttaacttagaatcaatagcaatcactgagaaatctcaatagctatttaactatgaaaagatagacatcaagtcaagcacaaacttcaaaactctccaaaatactaatagctaacattggctgagtgtttacttatataccaggcattcatctaaacacatttcatgcattaattaaatgttttcaaaacagctctaagagatatttaatttgacaaatgaaaaaaactgaggcttaatttctttatccagggtcacacaaccagaaagtagaaaagccaagattgaacttcagggatcttgaccctaatgccttttctgggaaaacagtccatagttttactcaataattcttaaatccttttatttaagaagtattcttaaataaaaccttctcttccagaatattctccaagtcccactaaccaagttcaattcctacctctcccatgatctttcctgcttaatacgagtcattccaatctgatctccgatggcatatgcattctataccagaaatgtcattaattccactgcacttattcccataaaaacaagaacttgtcaacaaaatgaagacaagtttgttttaagtattaatactttaaaagagttaaaggactctttctttctttttcaccctacacatagaataagtactcctccaccaaatgcaactaccaagtacccagcacacatacactatacatacaccaaatacacacatataagcacacatgtgagtttggccaaaacacataataaaagaagaaaattgcagcaacttctgaaccaaagaaaatgagaaaaaaaatacatgccatacaacattaattgcagcaaagtctgtaggctgcagactacgtgggcacaaacaagattcaactttgtgcatgtagttgaatcttggccttttatttgctatttgtgtgacactgaacagcttcatcatgcctcagtttcctcatttgccaaatttgccatttttttcttgggtgtttatcctgtaaggctcttgagcaacagtcacactctcaagaagattcattatgctctcatattttcattttgtgtcttataatgcattgattcatcttttgctcaatttgacttctaatattctacatggtttagagaataaagtatgtggacctgtccagagcagatgaccgtctgcctctaagcttgaggctcttaattccagctccattgcccattggttgtagtcatagaacagggaaaatttaattcaaaactctcaatccaccctggagaaggaaattaaagcctagaagaataatatgccttgaccaaggtcacagagtatgttaacaataaagccacaaccagaagtcaaagcttcctgtactcagcccaatttctactagtaaatatttcctgaatgcatattaatgtttcagggcctgtggatacagaaatgaataaagcacagtccccacacaaaaatattgccaattgtattgaacccaacagatgaccaattgcaatgcttcctaaccttgtttgtgtctgtgtctgagacacatgatactttcctaacatgggcccttggagagttgattcccagccactcagtatttacaaactggaaattcactaacctgtaacctgtaccagttcccagtagaaacttgcacattcagaaatattttgaataatcctcacatggaagatgaggatgcttctgaggaggaaaatgccaaaagtaagataaatcagaccaatgacttaaagctgctggaaagacatatacatttagcaagatgtctggaagtgggggctctaaagctgatagaatagcttgtgacgtcaaagcattagattgatgtctctcaccttctctcagtctttccctcatgggctcaggttggcattcctatctttaggaatcacgatttcacataactgcatttaaaggcaagaaacacaaggcaatcaagatggagagagtggtgtagcaggaggagagagagaagaacagagagagagagagagagagagagcacttgccatgtatctctccttttaggaaggaagataaatctatcctagataaccaggagtttccttaaatctcactgggcagagctggctcacatagctgccctgctgcaaaggaggcaggcaagcatgcatctggctcattcaacctacataagtagagtcaagtaagggaaaaaccaacttcagcatgactattggtaggcaaacaaaaatgtctgctgcacccaaactgtgtaggtttgttgaaggaatgcatgatctgccctgggagtcataaatagctctaattgcagagccagcatccaggagtttgcaaatctctagtcctcgggcctaagaaaactttctgaaccaagctggaagggggaagaaacaggccaggcagatttcaaggacacctgccattctggaagggggaagaaagagtctaggcagatttcaaggacacctgccattcttctacacatcacattttgccagattttgccctccatgcctgggtcctcaatggcctgtgataatggaatactactattcactagggcatggaattctgccacttactacagctcagaattttatcaactgttgatattggaattctaccccaagcagatcttccatttagccatcatccagggatcagaatcttaccattcccagaacctcaatccccaccccatttatttctgagaacttgaaggtagcaagaagatgtcaaatcccaacctagtgagtcaatgtaattgattcctagtgaatagtcagttgccttgtaacctcccaagatagctgtgattagaaaactggattctcaaagctaactttgggtccacccattgctaagtctgtcccctcctcccccagctcctcccttggaaatgtcccaagacaatgtgccatgagattcatcttcccttctacgagtaataagtcctgcaaggggcatgtcagaagtgccctgacaggaaagcctggtgacctgccagaggaacctttcacttttttccgcatgctctgctctgtttcccttttcctcctaaagggaaaatctgaaggcgttcagtttagtcacccagggtaagccgttttgacttgtcgacagtaaatactgctctgtcctaactccccgtgactgacacacaagcctgttatttcaacatcactctctgaaacctccctccagaaacctcaaggcagttgtatatgtcgtcagtaggtctatgggcctggacaaggcattctggtgtagtgaaagtcaacgtccctggagtcattcaaactgagttggactctcaagtcttcactttccagctcagggatattggccgcttatccagtgagcctcttgttctcctctgtaaaatggagataatagtgcctactttactggattgttgtaattaataaacatcatgctggtaaaaggtttacacctgcaatggtgcctggaacagagcaagtgattttagaaagtatacacatagaggtgtgtgtatgtgtctgtggtgtatgtgtgtatactcattcattcatgcatgtatgcattcaacaagtacctcctgcctactaactgcctggtcttaatctaggtgtcggatatgtaaataataaataaaattgtcaaagtcccatctatgttttagagtggaagacggacaataaataaatagatgtgtattgtgacaagtgtcaataagagctatgaaggacaacaaaacatagtaaagagatgaggaaggctggagaggccaaggcatccatttaaataaggtcatcggggcaaggctctgagagggtggcatggaagggagacctgaaagaaaggagggagaaaccacatgttttcgttcctctccacacactgccaccaaactatttctcctatagccttcccaagctcagtaaatgataattccactctaggagttttccagctcaaaaacctcactgtcagccttgactccttccttcacacccatgccatgccaactgtagatgcagccagctctgtggatatctgggaaggaggcttccaggtggagaatagcaaggtcaaaggctgaagggaggaagctccctggcctgctgtggacagtgaggaggccgagatgctagagaaggacagtgagagaaggccagaggatcagctgaggtcactcacctgggactttgtggaccagattaaggaatttttagttttcctctcaggaagaagggaagtcattggagatgtgtggacagaggagtgtcatgctctgaattgtgttagaaaggaatcactctggctgctctatggagaagagactagaaggccaagtgcagaagcaagggatgcatcaggagtctctagtgacagatcagctgcgaagccatggttgcttggtctagagtggccataagagaattgatgataagacattgtttaagggtaaattttgaggccagagttggttgccattgctgttggaataggcttggatgtgaaagaaaggagtcaaggctgacagtaaggtttttgacctgaaaaattcctagattagaattatcatttactgaattggggaaagctataagaaaagtagttttgtggtggtgagatgggaatggggcagtggaaccaagagttcattcattgaataaatatgttactgagactctcttgtgccagacgtcttgcttagcactgggaatacactgatgactagacagaaacaggctttgctctcatgaaacacaagtagcacaaagagacaacatttattgagtccttactaggagacaagcaccatgctaagtactttttatttaatgaagctgactgtctggtaggagagacagtcattaaacaagtaactattcaaatatttatttaattatgagtggaaaagtacagagcatatccctgtgtataatttgggaaaactgctccccaggctccttagggaaggtgatactgggctagagcagaggagcagcatttttgagaatctggccaatatggaaagatttgctgacatattcagatttgagactttttttttttttagacggagttttgctcttgccactcaggctggagtgcagtggcacaatctcggctcactgcaacctccgcctcccaggttcaagtgattttcctgcctcagcctcccatgtagctgggaatacaggtgcctacccacaggtccggctaattttttgtatttttagtagagacggggtttcatcatgttggccagcctggtcttgaacttctgacgtcaggtgatccacccgccttggccttccaaagtgcagggattacaggcgtgagccacggcacccggcctggagaccacttattttgcaagcatgttgcctcccctcttatctctgggagtggggaggacatgaccttctgtgtgagtccatggattcaatgatcagaacctccatgacagaaattccaaagtggtctagaatctctgcccaggccatttcttggcatggcaggctatcctctctgctccctgcctacctatcccacttgggccaatccaacaggaaacatctagactgcagaagacaacgacttctccctctgaccaccacacttctacgtgaaccccattcctaggctccaacttacctctccaaccccatttaaatgtgttccattgagcctctgatcatgtctcatcttgtatgattctgaaatttatctgattgcttgtttcccagcaatactgcaaaccccttgaagacagggatgggtgccttgttctgcttttgtatccccaacaggcatcacaatgcaaactgctcggggctgataacatttgagtgagagactgtgagccaaagaccttgacatcatttaagagaggatgtttggaaagaaaatcatcttttcaacacacagaattcagcctgactcaggctaaccaacatgcctgtgcagctaggagatataccagagtgtcagtttattaattttcaatggggggaaagaagacaaaagtttcaggttggtctgagttggtgagtttccttccctgaagccaagtcacaggggaaccaaatcatgattggaaaccattttatttttattttctctctatgagaagctacattggcaggaatcagaaaataattgagctccttatgaggtagtctgttagaggactcatggtagcataaattgctatctataactaatggggttatttctccaacctgggtaaccttatgacattgtccatgtatttcaaggcatccaaatctctcctttgctggaaacgtaacaccacccactagagcttaccagattagcctctttaggctgcaaaagatgcccagtaaatgatgaacacacagacatggggtttttgcttcactagacatagcccaaaggaactaatttatgcttcccttttctttttggcatattttgggaggcaacccaccaccatgttgatttcagacttaagaaggagaaattgagggcctgggtgttctacaaacaaactttatctatagataattaagtttcagacaactagcttcagcgactactagaaatatcttcggattagcatcaacaagaaacttgagcatttagaaaccatgatgatttcaggcatgcccacaagaaattaaatgtttcagcacaaaaggcaggtgttgagtgtgtagaactgttcagagtaaatcattctattctttctgcatagtcctctataattgaaaaagtcctttcagaacaatttcgtagggaaagaaaacttgcattttgtgcatcagcttttgtacttaggcttttacatgtgttaacacttatgttccttgtgatggcagatgaagaaaatgtagctgagtgaagttgagtgggttgcttattgtcaacaagtcctgagggacagagtcagtaattgagatcagagttgggggctcttgtccaagcttctcccacaaccgcattctggggcacttcgtggagaaatgccactcagcaatctgcattcagctctgctgttgctgtggttttcaaattggctacacatcaaaaaacacgtgagaatcttgtcagccacagatttctaagcctcacctcagaggttctgattctctgggtatggcatgggccccagaggtctagatttttgcatcaggtaactatgaatattccaggtccctgccttcatacaaagcaccatgaggtgataagtattacattttcttgttcctggtcctagggttcatatttagcttaattctataaaataaaaacttcggacatttaacataccctgcctcatttgatagggttgtccatgaaattgagagacagtggaaaactcattgatcttgctatttaccatgagtcgtagacctagtaacttagcctctccgagtttcagtgtctccattattgaaagcagggcttatagtaactactctctagagatatgaaattcaaataccataatatgtgtattagctgtagtagtagccatttatcagagcaggagatgaagggcacaggttctatagcctgactgcctagagtcatatcccaaagctttcagctactaactgtgtgatctaagggaagttacttaactgctctgtaccttagtgttatcatctataaaataagaaataataatactagtaccaactcagagactatcaggagaaataaatgaattaatatgtaaaaggctttggctgcatcacagagagtttggtaagttgtgtattttcattaattttgtcaggcctctgagcccaagccaagccatcccatcccctgtgacttgaatacccagatggcctgaagtaactgaagaatcacaaaagaagtgaatatgccctgccccaccttaactgatgacattccaccacaaaagaagtgaaaatggccagtccttgccttaagtggtgacattaccttgtgaaaatccttttcctggctcatcctggctcaaaaagcacccccactgagcaccttgcgacccccactcctgcccgccagagaacaaaccccctttgactgtaattttcctttacctacccaaatcctataaaacggccccacccttatctcccttcgctgactctctttttggactcagcccgcctgcacccaggtgaaataaacagccatgttgctcacacaaagcctgtttggtggtctcttcacacggacgcgcatgaaatttggtgctgtggctcggctcgggggacctcctttgggagatcaatcccctgtcctcctgttctttgctccatgagaaacatccacctacgacctcaggtcctcagaccaaccagcccaagaaacatctcaccaatttcaaatccggtaagcagcctctttttactctcttctccaacctccctcactatccctcaacctctttctcctttcaatcttggtgccacacttcaatgtctcccttaatttcaattcctttcattttctggtagcgacaaaggagacacgttttatccgtggacccaaaactccggctccggtcacggactgggaaggcagccttcccttggtgtttaatccttgcagggacgcctctctgattatacactcacgtttcaagggtgtcagaccacacgcagggacgcctgccttggtccttcacccttagcggcaagtcccgcttttctggggaaggggcaagtaccccaaccccttctctgcttttctggggcaggggcaagtacccctcaaccccttctccttcacccttagcggcaagtcctgctttcctggggggcaagaaccccccagttgcttatttccgcaccccgacctcttatctctgtgtcccaatcccttatttccatgccccaacctcgtatctctgcaccccaatcccttatttccgtgccccaacctcttatatctctgtgccccaatcccttatttccacaccccaacctcttatctctgcaccccaccccttttctggaaggtaagaacccccgaaccccttccctccatttctctactctctcttttctctaggcttgcttccttcagtataggcaaccttccaccctccattcctccttctactcccttggcctgtgttctcaaaaacttaaaacctcttcaactcacacctgacctaaaacctaaatgccttattttcttctgcaatgccacttgaccccaatacaaactcgacagtagttccaaatagccagaaaatggcactttgaatttttccatcctgcaagatctaaataattcttgttgtaaaataggcaaacagtccgaggcgcctgacgtccaggcattcttttacacatcagtcccttcctagtctctgtgcccagtacaactcgtcccaaatcttccttctttccctcccgcctgtcccctcagtcccaaccccaagcatcgctgagtctttctaatcttccttttctacagacccatctgacctctcacctcctcgccaggccgagctaggtcccaattcttcctcagcctccgctcctccaccctataatctttttatcgcctccgctcctcacacctggtccggcttacagtttctttccgtgactagccctccctcacctgcccagcaatttactcttagaaaggtggctggagctaaaggcatagtcaaggttaatgctcctttttctttatcccaaatcagatagcgtttaggctctttttcatcaaatataaaaatccagcccagttcatgacttgtttagcagcaatactgagatactttacagccctagaccctaaaaggtcaaaaggccgtcttattctcaaaatgcactttattacccattctgctcccgacattaaataaaactccaaaaattaaattccggccctcaaaccccatgacaggatttaattaacctcgccttcaaggtgtacaataatagaaaaaagttgcaattacttgcctccactgtgagacaaaccccagccacatctgcagcacacaagaacttccaaacgcctgaaccgcagcggccaggcgttcctccagaacctcctcccccaggagcttgctacatgtgccggaaatctggccactgggccaaggaatgcccgcagcctgggattcctcctaagccgtgtcccatctgtgtgggaccccactgaaaattggactgttcaactcacctggcagccactcccagagcccctagaacgctggtccaaggctctctgactgactccttcccagatcttctcggcttagcagctgaagactgacactgcctgattgcctcggaagccccctagaccatcacggacgccaagctttgggttactctcacagtggaaggtaagcccgtccccttcttaatcaatatggaggctacccactccacattaccttcttttcaagggcctgtttcccttgcctccataactgttgtgggtattgacggccaggcttctaaacctcttaaaactccccaactctggtgccaacttagacaatactcttttaagcactcctttttagttatccccacctgcccagttcccttattaggctgagacactttaactaaattatctgcttccctgactattcctggactacagctatatctcattgccgcccttcttcccaatccaaagcctccttgcgtcctcctcttgtatcccccgaccctaacccacaagtataagatacctctactccctccttggtgaccccttaccatctcattaaaacctaatcacccttaccccactcaacgccaatatcccatcccgcagcacgctttaaaaagattaaagcctgttatcactcacctgctacagcatggccttttaaaacctataaactctccttacaattcccccattttacctgtcctaaaaccagacaagccttacaagttagttcaggatctgcgccttatcaaccaaattgttttgcctatcccccctgtggtgcccaacccgtaccctcttttgtcctcaataccttcctccacaactcactattccgtgcttgatcttaaagatgcttttttcactattcccctgcacccctcgtcccagcctctctttgctttcacttagactgaccctgagacccattaggctcagcaaattacctaggctgtactgctgcaagacttcacagacagcccccattacttcagtcaagcccaaattttatcctcatctgttacctatctcggcataattctcataaaaacacatgtgctctccctgccaatcgtgtccgactgatctctcaaacccaagcaccttctacaaaacaacaactcctttccttcctaggcatggttaacgtggtcagaattcttacacaacaaccaggaccacaccgtatagcctttctgtccaaacaacttgaccttactgttttagcctagccctcatatcttcatgcagcggctgccgctgctttaatacttttagaggccctcaaaatcacaaactatgctcaactcactctctacagttctcataacttccaaaatctattttcttcctcatacctgacgcatatactttctgcttcccggctccttcagctgtactcactctttgttgagtctcccacaattaccgttgttcctggcccagacttcagtccggcctcccacattattcctgataccacacctgacccccatgacagtatctctctgatccacctgacattcaccccatttccccaaatttccttctttcctgttcctcaccctgatcacgcttgatttattgatggcggttccaccaggcctaatcgccacacaccagcaaaggcaggctatgctatagtacaagccactagcctgcctcttagaacctctcatttcctttccatcgtggaaatctatcctcaaggaaataacttctcagtgttccatctgctattctactactccttagggattattcaggccccctcccttccctacacatcaagctcgaggatttgccccacccaggactggcaaattagctttactcaacatgccctgagtcagataactaaaatacctcttagtctaggtagatactttcactggataggtaaagtcctttcctacagggtctgagaaggccaccgcagtcatttcttccgttctgtcagacataattcctcggttaagccttcccacctcaatacagtgtgataacagatgagcctttattagtcaaatcagccaagcagtttttcaggctcttagtattcagtgaaacctttatatctcttacggtcctccgtcttcaagaaaagtagaatggactaaaggtcttttaaaaacacacctcaccaagctcagccaccaaaaaggactggacaatacttttaccactttcccttctcagaattctggcctgtcctcggaatgctacagggtacagcccatttaagctcctgtatagacgctcctttttattaggccccagtctcattccagacaccagaccaacttagactgtgcccccaaaaaaacttgtcatccctactatcttctgtctagtcatactcctattcactgttctcaactactcatacatgccctgctcttgtttacactgccggtttacactgtttttccaagccatcacagctgatatctcctggtgctatccccaaactgccactcttaactcttgaagtaaataaataatctttgctggcaggactatgctgaatctccttaggcactctctaatcggatatcctgagttgtcccaattcttagaccttttatacctgtttttctccttctgttattccatttagtttctcaattcatccaaaaccgtattcaggccatcaccaatcattctatacgacaaacgtttcttctaacatccccacaatatcaccccttaccacaagacctcccttcagcttagtctctcccactctaggttcccacgctgcccctaatcctgcttgaagcagccctgagaaacatcgcccattctctgtccatatcaccccccaaaaattttagccaccccaacacttcaacaccattttgttttatttttcttattaatataagaaggcaggaatgtcaggcctctgagcccaagccaagccatcccatcccctgtgacttgcacatatacgcccagatggcctgaagtaactgaagaatcacgaaagaagtgaatatgccctgccccaccttaactgatgacattccaccacaaaagaagtgaaaatggccggtccttgccttaagtgatgacattaccttgtgaaagtccttttcctggctcatcctggctcaaaaaccacccccactgagcaccttgtgacccccactcctgcccgccagagaacaaaccccctttgactgtaattttctttacctacccaaatcctataaaacggccccaaccttatctcccttcgctgactctcttttcggactcagcctgcctgcacccaggtgaaataaacagccatgttgctcacacaaagcctgtttggtggtctcttcacacagacatgcgtgaaaaatttcaaataatattttatttttgccttaattttgatgtttgcccaggagttattcaggagtaaattgtttaattttaaagtatttgtatagttttaagagctcttcctgatattgattactattattattgcactgtgatcccagagtgtgcttggtattatttcaattttttaatttattgagacttgctttatgatcaagcatgtaatggaccttagaatacattttttttgtgcagatgagaagaatgaatattctgttattgttgggtgaagtgctgtgtagatgtctatgaggtccaattggtcaagtgttgggtttaaatctagagtctctttgttggttttctgccttgataatctgtctaataccgtcagtgggatgttgaagtcttttactattactgttttcatccaaagcagtgataagagaaagtttataaccctgaatgccttcatcaaaaagttagaaacatctcaaattaaaaatctaactttgcacctagaagaattagaaaaaaaaagaacaaactaatcccaaagaaaataaatcattaaaatgaaatagaagaaaataattaaattagagaacttaaggaagttgagatgcaaaaatcaatacaaaaaatcaatgaaagcaagagtttattctttgaaaaatagactgctagctaaattaacaaaaaaaatgaaggagaagatcctaacgagcacaatcagaaacaacaaatgatattacagctgatcccacagatatgcaaaagatcctcagagacttatgaatttatgaacaactctatgcacacaaattcgaaaatctagaaggaacagataaattcctggaagcacacaatctcccaagattgaatccggaagagattaaaaccctgaatagactaatatcaacttctgaaattgaatcagtaataaagatcctaacaacaacaacaacaaaaaagctctggaccagatagattcacagctgaattctaccaggcatacaaagaactgatactgattgtactgaaactattccagaaaattgaggaggagggactattccctaactcattctgtgaagccagcatcagcctgatacaaaaatctggcaaagacacaatgaaaaaagaaaactccaggccaatattcctcatgaacatagatgcaaaactcctcaacaaaatattagctaaccaaatccagcaacacatcataaagttaatacaccataatcaagcagtctttattcctgggatgcaaggttcgttcaacatacacaaaccaataaatgtgattcaccacataaatagaattaaaaagcaaaaaatatatgaccatctcaattgacacagaaaaagccttcaataaaatttaacatattttatgatgaaaaccctcaacagactaggcatcaaaaaatatacctcaaaataataagagccatctatgacaaatcagcaaacagtatcatattaaatgggcaaaaggaggaaggaatccccttgagaacagaaacaagacaagaatgtccactctaaccactcctattcaacatagtactggaagtcctatccagagcaatcaggcgggagaaagaaataaaagacattcaaataagaaaaaaacaattaaactatctctttttactgatgatgtgattctatacctagaaaattctaaacactctaccaaaaggctcctagaattaataaacaattttaatgatgtttcaggttacaaaatcaatgtacaaaaatcagtagcatttctatataccaacaatgtccagactgagaataaaatcaaaaacacaatcccacttatcatagccacaaaaaggatgaaatacctgaaaattcagctaacaaagggagtaaaagatctccacaaggagaactgcaaaatgctgctcaaagaaatcagagatgacacaaataaatggaaaaccgttccatgatcatgaattggaagaatcaatattgtaaaaatggccatactgcccaaagcaatttacagattcagtgctattcccatcaaataccaacatcattcttcacagagctagaaaaaactattctaaactctggtttctatataaaaccaaaaaagaccctagccaaggcgatcctaagcaaaaagaacaaagccagaggcaccacattacccaacatttaaactatactacagggctatagtaacccaaagagcatgctactggtacaaaaataaacacatagaccaatggaacagaacagagagcccagatataaggctgcacacctacaactatcttatctttgacaaagctgacaaaaacaagcaattcagaaaggactcactctttagtaaatggtgctgggataactagctagccatatgcagaagattgaagctggaacctcaccttttaccatatacaaaatggatcaaagatttaaatgtaaaacctcaaactatagaaattctagaagacaacttggaaaatactcctcttgacatcagccttggcaaagaatttttgactaagttcccaaaatcaattgcaacaaaaacaaaaatagacaagtgggacctaattaaactaaagaatttctgtacagcaaaagaaactattaatagagtaaatacataacctacagggtaggagaagatattcagaaactatgcatccaacaaaggactaatatccagaatctataggaaacttaaacaaatcaacaagcaaaaaacaaccccattaaaacataggcaaaggacatgaatagacagttctcaaaagaagacatacaagcagccaacaaacatgaaaaaaattctcaacatcattaattgaagaaatgcaaatcaaaaccacaataaaataccatctctcaccagtcagaatggctattactaaaaagtcaaaaaataacaggtgctggtgaggctgtggagaaaagtgaatggttatacacttttggtgggaatgtagattagtccagccactgtggaaggcagtctggagatttcccaaagaacttgaaacagagctgccatttgatccagcaattgcattactgcgtatacacccaaagaaaaataaattattctaccaaaaagacacatgcacttttatgtttatccctgtgctaatcacaatagcaaagacgtggaatccacccaggtggccatcaatggtagagtggatgaagaaaatgtggtccatacacacacagtggaatactatgctgtcataaaaaaagaatgaaatcatgttctttgcagcaacatggatgcagttggaggccataaacctaagcaaattaacgtaggaacagaaaaccaaatatcacatgttctcacttataagtgggaggtaaatattgagcatacatagacataaatatgggaataataaatagtgtagacactagaaggggtagggaaggagggagcatgggttgaaaaactaccttgtggttaccatgctcactacctgggtgatggaatctgtaccccaaacctcagcctcatgcaatattcccatgtaacaaacctgcacatgtatcccctgtatctaaaataaaagttgaaattaaaaataaatgttaactaatatttattgaaggcacactgttttatttattgagagtatactagtatttattaagggccctgtgtcaggctatatatatatatatttttttttccccccaacgcctctgagtcaggtaatattagtttcctcattttacagatgacaaaaataagtcatagtaccttgcccaaggtctgacagctagcaaacgggagagctggattctgaacacaggcaggctccagaacttaaaactactatgcaatattgcatagtagttgcagaacttaaataatagtactattgcatagtgttatgcaataattcatagtataatgcagaactgaaaaatgctgtcacaatatcactatgttgtgctagtcattgcacattctcatctcttcttctggctgtaagcttctgaataggtgggaatgagttgcattgtatctcctgtctttggtacagtgtcctattcatgatagaaaacatgcttaaaagaactagaaagacagggaggaatgggatgacacctgcattttggcagatgttttaaaaattctggaaaccgaaggagcagttggccagtcacaggctgtgtgtgcacatgtgcttgaccactctctctattcccctctagtcagaacttaaacatcttttcatggagctctgctgtggaaagcctagaaatacattctactctctctaaaagcaacaactaaaaatacacaaattagccaggtatggttgtgggcacctataatctcagctactcgggaggctgagccaggagaattactggaacctgggaggcggaggttgcagtgagctgagatcatgccattgcactccaccctgggcaacaacagcgagactccatctccaaaaataaaacaaaaattgagaacataatccacaggaatgaatctccagtgtaagaatggtgacactaagatatccaagagagggatcttagactcaggacaggttatatgcaaaagacagtttacagccttaaaggttatagaatccagcctgctactgagaaagcaaaggctagagacatcccaagatgacacagtggacgaccaaatgctcaccactgttttctggggctctaactccaggctgttgattctcaggaagggttgtttttcatactgccctttcaaattacagcacctttgctgcctccatctaaaactggcccttccaacatctcatcaacttttacattctgatgtccccatttcagagagatttctttgaaacagagccagcccttccagtaagcatatataacagaatggtgatttcagagagtggagcctggtggaaacaaaacccagacatgtaaaatttgacaccttaaccgacataagtgcccacattccctgcgttttcccactctctgcctcaccccaccttcaacatgcccataattttattctgaggaaaaccacaaccagcacttaccaccagagtccaaattccctggcagcagccttgcttttaaaagggagacataaaaaaaattgtcaagacctatggggcttcctaacacattaaaaaggccctcaaaaactgtgttacaccaagcataatattatctttttctttaagagatttcttaattggttccatgcaaaaggtttgtaggtaatgggttttaaataaataataatgttccaccaccctgactggccaagaaagtaaatgcctttttccctgacttgggtaagcactgggatggaaaaaaggcctgtgtgaaaattttggcctcaccgtaaaaaggcaagacctcaatctggggactcagatgtaatcaaccatggtttagtttcagtaatttggttgcaacaattatttggcaagcatagtgctaggtattggtgggacggagatgacagactgtataactgaatgctcagaataattaagttaaatgtatttattttatttattttttatttttatgtttttgagatggagtcttgctctgtcacccaggctgtagtgcagtggctcaatctcagctctctgcaagctccgcctccctggttcaagccattctcctacctcagcctcccaagtagctgggactacaggcgcccgccaccacacccggctaattttttgtatttttagtagagacggggtttcgccgtgttaaccaggatggtctcgatctcctgacctcatgatccgcccaccttggcctcccaaagtgctgggattacagatgtgagccaccgtgtctggccattaagttaaatttattaataattaacaaatacgttaattaatattgaataaaggaattttatttgggcttcagtctttctgggctcctcacagttacaaaaatacagcatacccttctggttctcaaggagtttccaatgcagatctctgatctggagtgcctctcttcctttttgccctgaaggtagtcagtgaggctcatcagaaattttctgattctcttccttccagatacctccttatgcttttgaactcaattgttgccatgggcttgatttggccagtgaaatgtaagtgaaagcaatgtttgtctcttcaggtagaagctgagagccagtgcttactgttgtttcattctctctcttcctcttgtcactttccaaatggtagcggccctatcagcctgggtcctggcatgaagaaacacaaagtaacactctcccaaattacccataacagacatggaatacggaagaaataaatcttattatgatctcaagttctgagagctgtttgttacacagcgtagcataacctagactaactgatttttacctcatctacccatttaccatttacctaactctaatcatccttcagctctctgcttcatggttacttcacaagagcttcataagatgccaaaaagttcatttcaatagtttccaaagcttcctcaatataatgcttatcatgatattaagattgttagttaatttatttatagcccatgattggttatgagctccttgagagaagagtctaagcctcatacacaatcttatctttagtctataatgtagtgcctgatataaagtgctatggtttgaatgtatgtgcccctccaaaattcattttgaaacttacacaacactagtaaaaggtgaggccttttgagtgtgattaggccatgaggactctgcccttatagatgagattagcaaccttataaaaagaccagagggaactagctaggcccttctgtcctacctcttctcttatgtgagtacacagagttcatccttttttgtccccttccactgcaatgagggcacagtaagaaagctctgtcttggaaggaaagagtagctttcaccagacacagaatacacagaatatactggtgctctaatcttggacttcccagaccgtataactgtggacaataaatgtgtactgtttataaattatccagtctctgatattttattatagcagcacagataactaagacagaaattggtaccaagaagtggggtgttcctataacaaatacctgaaaaatgtggaagtggcttgaaattgggtaatgtgtagagactggaagagtttgcagaatcagactaaagaaatagcctgtattttcattaacagagtattaaagtaattctggtgagggctcaaatgaaaacagctgcagagagaacctaaattatcctagagactaagtggttgtaaacacagtattcatggagatacagacagtgaaggccatcttgatgaggtcttaggtggaaatgaagaacaaggcattggaaaccggaggaaacgtcatctttgttataagttggcagagaacttggcaaatggtgcccatgttctaatgttttgtgaaaggcagaagttataagtgatatactgggatatttggcagaagaaatctgtaaacaaagtgttgagagtgctgcatgactgtttataggaaaagacgagaagggagaaacaacttaaagacacagcttataatcaaaagggaagcagaacttaaagcgttggacaattctcagcccagccatgtaaagaatggaaaggtactgttttggagagaataatcctaagggtgaggccaagtgactctttgacaaataaattagcatacctagaaggaagccagatgctattccattaagacaatggaagaatgacaccaaagtcatttcaaagatcttggaagccgccactctcataacaggctcagagtgccagggccctgaaggcagaacaatttcataggtggtaccttgaggcttcatcacccaggactgcctcaggcttctgctccactcattctggcccaacactctttgtctgttgcagctgtagatcctcaagtgcacccaggtgtggttcaaagtgctagtccggagagcatgaggtaaaccctggcagcatccatgtggtgctaactgagcaaatgctcagagtgcgtgagctaagcaggcatggctacctcctcctcgatttaaaaggatgcttatgagagccttggggcgtaggcagagaactgtcacagtggcagggctaccacagatagcccctactagggcaatgcttagtgggggcagggccactcctgagaccccccagcctgtgcagccaccagcatgcaatgccagcctgcaagaataacaggtatgtgactccaacctgtgaaagctgcagcataagccgcgcctagcaaagccacggggatgaggctgcccagagtcttgtggggaccaacccatataccagtgtgtcaagtagtcaggaatggagtcaaataaaattattttcagtcctccatatttgagtgttatttgccttgttgggtttcgaatgggagtgagacctattactcctttcttctttcctatttttttcccctttggaatgggaatatccatcctatgcctgtcccaccactgcatttgaagcacataataaaatgtattcattctatcccaataattccaaaaatcttaattaatccaacatcaactttaacttataaatctagagtatcatctaagtatcatctaaatcagatatgggggaattcttctccagcagtctgcaaaatctgacaagatatagatatctatatgtccacatacgtaactataactatctgttgaattcattctctaaccacttctatcaagtcactgtgctaaaacttcttacttaatgctcattagtgttacacacacacacacaaagacacacacacacaaagacacacacacttgctgctagattttactctcttggtggattttactctcttgctgctagataaggggtacctaatgcaagatgtacctatcttagagtttgcacatcatctgcattattgaacgtaaagtaaaagccaaatgagggaaaagagacgttgactgtttcatgatcattgtcttacctgaaacaattaggaagtcaccgttcagctttgcaggctatgtaattgtcatatatcatgaatggctgataaggggttgaatctgtgaggttttcccatagaggaaagggaaatactgattctcactttagccaacagcagttgtctctaactcacccaaactgctgagaagaacttaagaactattttactgtgctctttttcttatttatttatttagagacagagtcacattctgtcacccaggctggagtgcagtggcgatctcgcctcactgcaacctctgcctcctgggttcaggtgattctcctgtctcagcctccctaatagctgggattacaagcatgcaccaccatgcccagctaatttttgtatttttagaagatatgaggttttgtcatgtcggccaggctgctctcaaactcctggtctcgtgatccaccttcctcagcctcccaaagtgctggaatcacaggcatgagccaccgcacccagcctttaagagctattttatttccaatgcagaatggaacctcaacaccatcatggatgagttccagattcataagactttaggcctacagcggacatcagacacaatctaactgagctccttcactgtagagatgtgggaaaggaggcccaagataggaaagagacttgcccaaggccacacatctggttaatggagaacaagagacaatactcatttctcccaaccaccatgccagtgggagttccaggtccaccctgcctgagagcttcatgaccacctccaagatggcccaacgctgcccttcaaaaggggtcagtacctgggcaatctgatggtgaattcattagaggtgaaataaatgcttataaaagggaaaatggagacttgtaattctacctcttgattctaagaaatcctttcattgggtctagagtgttcataaatctctataatttgaaaattgaacagcacagttttctatgaacaagtgcaaaaacggggtcagaagtcaggaaaattgtaaagatgggatgtgacattgctgcttccccaatctttacctacaaaacctctccttgctctcttccattctatcaaatcctagtctcagactattcatttacactaagatgtaaatgactgacagcaaagtggccactttcaggggcatttggagacaaagggatgacattgcgattattgacctatcacactggggatatcagagccagagagaagacgtggagtctgaaaagaaaagctgttcccacaacaaagaattatccagccctaaatatccatagtgcagaggttgagatatcctgctctgggttacagaaagttgcataaattcctagcatgaatcatcaggtgggcaccttgagagcaatctgccatctccacaactttgtacctttgcctttttttccaaaaagaaagggtctaaccaaaccatgcttatgaccagcctcagcctcccatcaactggcaccattggcatcctggcccttgtgtgtctgcacagtgcctgctacacactttcattaagtaactctcaaccttacaataattcagggaaaggagacagtattgttattcataccccacatacaaagaaacaaagaaggaggcaatttaccaggttttcacagggaggaagaggaagggtcagaattccaatccagactgatcctagctccagaaactaaactatcacactatcacacttcagacaggagtgcagattatcaaacactaactattttaagaaatgttcaggggcggagcaagagcacaggtgccatccagtgctgtttgtggagaggaggtattcggaggccacaacgtagggcaaggcatttcttcctaggctgggtatgataggtagaataatggctcccccaaagatgtccacatcttaacccctgtaacctgtgactattaccttacaccatgaaagtgactttgcagatgtgattgaattaagtgccctgagttggggagattttcctggaagaatcaggagggctgcatggaatcacaagggcccttataagagggaggcaggagagtcagagtcagaggaggtgtgaggatggaagcagaatttgtaggggtatgggcgagaagccaaggaatgcagatgacctctagaagccggagaagcaaaatggattctctcccagagtctcacaaggagtgcagtcctgtgaacaccttgatcttagcccagtgaagctgatttccagcttcagacctccaggactttaatgataataaatttgtgttgttttcagccaccaagtgtgcaataatttgttatggaaatcacaggaagctaatatatgaggattgctacataaagtatagaacacacagtccaacttgaacttcagataaacatcaaataattttctagtatgagcatgctccatgcaatattcatgtgtcctgtattttcatttgctaaaactggtagccctaaccggcttccccctcccactcagcccctgcatccccaaagccctttcccaggtctgctctgttacagtggtatcattatacctgctattctggggttagtctatgactcaaccgagtgaaactgttaaggcctcagataaatagctctgagggaaagttattattctatatcattgcctatcaattatttatagtttataatgcaatgccatttgtaatgggtaatatgtttttctattgtgttgtaatatcatccaactcatcagaacaaccattggggagatggattggcttgatgtaaatagcagtgcctagtaacaagctgtgtgcatttttaaacctggaaatcactgctctttcagataagaggaaactcttctttgaattcaaacagaagggtccaagccaccttttctgacaagttgatttcctgagaagcagggcaggaactagggcaaggcaaatgtgttcagggtacaaaatgtaaggaggctctccatttcaggtgccgaccctgcacttgcagaacgtgaaaatgagtgctgctttaaatcttgcaccctgggagactcacttgcttcactctagtatcgactctgctaagaaaactcacatgaagccatcaacaaacgccaaagctaacctagcctctttacatggcttatgggaaactgaggcccaaaaaaatgtggaccagccaagattcaatttgcttagtgactagtggacctaatggttgctactgcagcatcagctgcttctgccaacacctacctactgagtttcagccagaggcttgaggttcgcactgccctcccagccctgggacaaggccctgtctcaactggattaagcaaatcagtataacttcgtatccctgatcccagtgattgaacacttaactcagtcctaagccagtaaataggttgtatgtccctggccacagttgttagctccaggatatacatgtggggcagggtgaagctcatgactttgattcacggagagagaaaatgattcctctttcctttggagggtgtggaatacaaatagaaagtctggaactgctgcaaccatttattaccatgagaaaagccagaatgggaatgaaagcaatcatatatagaagggaaaaggtgagagaatcataaagggaaaccagattcttcaccgactcccatctaaaggacccactacctctggactattctgttatatgcaccaataaattcagattaatatttaatccagtttgagttaaaatattctgttacttgtacaaaagaggttcctaactggacaatgaccttagaaaagccaagttctacagctacattgccccatagaactttctgcattgatgcaactgttctatatctgtgctgttcgatacagtaagccactacctgcgtgtggctattgaacatttgaaatgtggctaatgtgactgagaaatggacttttaaattttgttaatactaattcctttcaatttaaacagccacacagaccagtggttaccatattggtccatgcagccctacaagcttcttttccttcatttcatttgttgcctcctccagaaaccagctccagatcctttctttcctccagagttggttaggctgatcttttctgtgatcctatagcaactgagcattcctctaaaattgtgattgcctctcttagaataatatcttttaccgtgtgtatctcccacctttggttgaggttttaaaaggcaaggcccattcctgtgtccaagcactgagcagaagcattgccatggtgacttttgaattggatgagataatctgtggcccaaatgtgtaccagatgttgaaaggctttgtagcttttaagaatgtaagacaatataaaaatgtttgctatcattattagttattgttactatttctgattgttaaccttgatccacttctcaattttctacaggagtctcagtcactgccctcgaatgactagaaatttgcccagccttgtgacatctgtgaccatcagtgtcaggctcactggcttcttacccctctgctgccttgactttctttttcttttctttcttttttttttttttccttgagacggagtctcgctctgtcaccaggctggagtgcagtggcgtgatcttggctcactgcaacttccgactcccctgttccctgctttaagcaattctcctgactcagcctcctgagtagctgggactacaggcacacaccaccacgcccagctaatttttgtatttttaataggcacagagtttcaccatgatggccaggatggtcttgatctcctgacctcgtgatccgcccaccgcggcctcccaaaactgccttgactttctagctcaaatgtcctatttccctaattatctggcttggtcctcttagtctgccacctacacacttgtgggtgagagaggaggagctggaagacaatgcagagctgcagttaaggccattgcaattgccagggtgtgctatgtggcttcgacatgcttagaagccagtatggtttggctgtgtccccacccaactctcatcttgaattgtagttctcataattcccacatgttgtgggagggacccagtaagagataattgaattttgaggccagtttcccctatactgttttcatggtaatgaataagtctcatgagatctgctatttttataaggagttccccctttcacttggctcttattctctcttgcccgctgccatgtaagacatgcctttcaccttccaccatgactgtgatgcctccccagctcccatgtggaactgtgagtccattaaacctctttttctttttataaattacccagtctcggctttgtctttattagcagcatgagaacaggctaatacagaatcctcctccttgagatgtgcttcctgatcccaggcctttacaccaggggaattcatcaaattcattcatctccttaacaaatgttactgagttcctaaaaattgtcaagcatgtgatgaggcactggggttctgtcagtgaaaaagacaaagtttctgtcatactgaaggtcacgttctaataggggagacagacagaaataatacaccatataaataaatggctacagtaaagaacaatcgagtgtgggaatagaggggaagcaggcaggtaactgcagtggaccagaaaaaagcaatggtgacaaagtccagagtggtggcaggtgagacaatggagtgttatcagatttgagaccaggaacttcttaagagtcctttttcttttgcctttggtctcactccttgatttattccagctctgccagatcagatcttgtctttacatgcccccacccattctcagataccctctgtgccttaacaactaataacctgttggttctttccagggaataacttgtactcagcttctggggttccctaggcttttccactggaataaaattttctcctagctgagcccactgtccaattaaggatcagacaaaatttagaagaagcaagtcacttctcctttctggatctgtttcttcctgtgcaaaaagagatgttgcacaagataatctctggtgccccttccaatttaatattttataattacagcctaggttttgaagaataaaaatataataagagaagagagaaagaaagagatgaggagtggggcgggggaagaaaggggaggaagaggaggaggaggaaaagcaggagaaaggggaagggagagggggaaggaagaaagggagggagggaagaaacctatttgtaaggccaagttaaaaattcattgccacaataaatacttcggtgtgaggctgtagaaattggcaaaatgaaaaaattctggcatgtaaacccacaggtgagtcctaggctaagagaagcatcttctacctccctcacttcctgatccccatcccattagcatttctgaaatgcctggaaagatgctccctagcagggtagagtcaggaacccactgtctgttcctttctcatctaatctgagcattggaaagatgctccctagcagggtggagtcaggagcctgctgtctgttcctttctcatttaatctgagcataatctggtgctttgggctgtggagcggatttctctctccagtctgtttctgcctgtcctgtcttgaggtgcactaggcagggatctcaagtgtgtccttggcctgcagtggggacttgtgcatctgaaggagcaatcaggcaggtggcctggggcagcctgctccataacgatgccctcattcccaggagcaagactgaatgccagttactcaaatcccattcctggctttctgcttcagtcattactaagagtttttcatatcttctggtgttcaggaaaatatttctattttcaggagaagcaactctgccttatactcgaaaattaaccagacattctattattgctgaaattctttcctcgtattgcattttatttaggcttttaaaaatcctttatttatgcagtttgaatcaggggtattttctggcttacaggttagtagagaattacaaaacattcaaaatttcaaagattccctaagggagaagtgatctattccaatatgggcttatattccagaaaaaaaaaaaaaaaaagcgtactcccagaaagatttgtctgggaaatgattgcaaatgagaaaactcactcagatgtgagaaatgataccgccctggactttcatgctgggccctaagaattatgacatggatgtaaaagaagattgccacaagtcgccagcttgcctgctccttaagatgcttgaagtccccagtgaaagctgagaaacatgaaattacttctgaatgtgcccacagacaggacagtgtaaattgtaatgacagagaaaaagacctgctgcaggcctccctcacgcgatcccaagtgagttttacagtcgtgtagtaggatagagtgagcctcattctaaggctgacgaagctgaggctcagtaaccccagtttgatcaacttgagtcagcaagctcaaaactggtgaaagccagattttcttattttttttttctacccaggccttctacaacaggtctctacaactagtgtcttttatgacccagtgctgctttctgattgggaacataccaagttcaaggtccccatgtggtcctgtatagtattcacaatactatatagtatgcaactgttctatatctgtgctgttcaatacagtactatatatagtatgcacaatttccatgcaaggaaaacatttaatatcttacaatgcactttcacacttagcatcccacttgacccttacaacaacttcatggggtaaatatttatttccctgtttatgaataaagaaattgaggctcacgttctgttaaagccattgttatggccttaacccattctattatgcctccaagaacacacaaaatctggtggctgttctgggagctaacaaactctgctttaagtcctaactctgccattctccaactttgtgacctcaggcaaaatgcaaattttttctgcatctcagtgttcacatgcgataactagagggaaagagtacttgcctcatacggcagattcttcattcattctacaagcatttattcagcatctactatgctctaagttctggagatacagtaatgaacaaaacaaaagcctcagcatttgtggagttatgttctacttatgggagacagaaaagaaaatatattgcatttgaaggtgataaatactaagaaatataaaacagggaaagagaatagggagtattggaaggaggagttcagttcaaatcagaatgaccaggaaagactgcaattgagaaagcaacatgcagtgaagacttcaaaaaggagtgaggggccaggcgcactggaggaggattactcttgtaatcctcgcactttgagaggccaaggcaggccaaacacttgagctaaggtgttggaggccagcctgggcaacacagcgaaaccccatctctacaaatacaaaaaaattagctaggcatggtggtgggctcctgtagttccagctactcagaaggtggggatgggagaaacacttgagtccaggaggtcaaggctgcagtgagctgagattgtgtcactgcactccagcttgggcaacagagtgagaccctgtctcaaaaaataaagggaggagtgggcggtgaaagagcaagctttgtaagtatctggaagaagagctttctaggcaagaggaaacagcaagtttagaggcccagaggcaagacactgggagggtggtgcctctgtgttccagaaacagggaggccatgtggctgcactggagtgagcgagggagaaagaagtaggaggaagatcagagatgtaactgatagtgcgaggatgggacactaattatgcaatgctttatgggaccattacaaggacttagattgttttctctaaaagtaattgggagccattggaggcttttgacgtaggagtgccatgatctgacttcagttttaccaggatcactcaagctgctatgttgtgttagaccggagggatcaggtgtgggagccagttagggagatgttaaatgttctctaggaaaagaggatggtggtttgggctgcaatggtagccattgagatggagaaatggtaggaattgggttttattttgaaatcgagccaacagggtttgctgatgagttatatgtgagtgggagagaaggaatgggactacgagtttcttggtctgagtaactgcttttcacaagaatgagagtatagaagaagcagctctgcaagagtgagaaagaactgaacaatgaatgtatattttctccagctatacagtgtccagcacagagtatgtgttccataacaggtagatattactattaataatgtatctgctcacctggttaaatatttctgcagacctttgccctacatccaagcactctgagaaagcacatggtcaggctgttttccaccagcaaatggaccacagaatcttggtaccatagtggtttttaaagcccattggctacccaaaacccctttgacccatcaagcgtgctctggactcaatacctttgcacaggctgatctccctctccacccacccttccttcctctcagcttctccatacaggaaatggacaaaggcacaaactggaagtcagtgcagattcaagctttggttttgttcagagagtattccttaatgctcacagaaaatctagcccagcttctcctattacaaaactggaagctgaggactagaaagatgaagtggcttgcagcttccccatcagtatgacaaggaaactgtattaaataattcccaaggattcttctagctctcacatgctttcaggttttcaataaacacaagatacaataaaaagcaatcaaaataatgaccagctgattttgctttccttcattaccctcatctaagccaccagcaaactctgctaactcttcctccaaaatagatcccactctgtcactccttttttttttttttttttttttttttttgagacggagtcttgctctgtcacctaggctggagtggagtggcgcgatctcggctcactgcaagctccgcctcccgggttcacgccattctcctgcctcggcctcccgagtagctaggactacaggcacccaccaccacgcccagctttttttgtatttttagtagagatggggtttcaccgtattagccacgatggttttgatctcctgacctcctgatccacccgccttggcctcccaaagtgctgggattacaggcttgagccactgcgcccggccactgtcactctctttttatggtcaccaccatgagacaaaccaccaccaccttgaaatgaacagccagagcagcctctaactggcttctttcccctccttaccctggccctcctacttgctatatgcatgtgacagtctgaacgatctgttgagaatttgaaccaaatgtatttacttcttttcccaaaacctaccagtaactttctatcatgtcttaccttggccaatcaggccttacatgatctggcccccatttttctctttgaccagatcttgcaccactatccccttatctacaagcctctctgaccttctgcctgtgcctttgatattccaggcttcccctctctttggcattcaggctcctaagagggccaccccacccacagtgattcccacctctccatattcacatcctttgtgtaggctggacctagtgctttgcctttaaagaacagaatatggcaaaggtgatgggatgtcacatccacgattaggttgcaaaagactgtaacttccatcttattggctctctctctctctctctctctctccttctcactttctcactcagatgaagcaagtttccatgttgtgagctgccctgtgagaaggtttacttgctaggaactaagagtggcctccagccaacagccagcaaggaagtgaagccctcagtctaacagcttgggagaaactgaattgtgccatcaatcatgtgagtgagcttggaagctcttctatccccagtccaaccataacaggactacatccctggccaacactttaatgacagcttgtgagagaccctgagacagaagactcagctaagccaggcccagattcctgacccatagaaactgtgagataaaaaatattgctttaaaccatgcaattttggagtaacatattatacaacaatagacaactaaaacaccctctcggaacattttctcttctttttctctcagccagaaattctatttctactcaggtcttccaatggttggctctatcatgcagcctctcagcccagatgtccccttctcaggccttattccctagctaactctacactcagcccattactctgtttcattatgtttatccacttttaactgctggaaagattttatttatttactgatttacctgtcttctctatcgtaataaaagctcctcaagaagaggaaccttctcagatatgttcatggcggaatctcagctcctaaaatagagcctggaacaaagcccccttcaataattacatgttgaataaataaatgaagaaattatgaatgaaaaggagttgggggtgggggaggaatggagatgctcttccacatgatttttttaaagctctaggacattggaccagcatttgctctcctgatttatcccatttgtctgcttgagtacatttaaattttgaaggaccccaggttgtttgtttctttcaaagattaccccctaacttcaattttcctgcttgagttttttgcagatctcagctgaatttcagggtggcaaaaacccacatcctcttccgctggctccacctttctcttctcctcttctgcaacccaccgactagtttcaacacatctttccttctaagtgaagagcatttaaaagattgtaaagcttattgaactcttacaacaccatatctttatttgttaagtaccaatgactcaaaaatagagtagtctctcctgaaattcatgtggttttacaaattacggaggaagttctaggctcagtgtggattgccaagtggtgaaaatttgttatgtatcttttgcaaggctccgttttcttcctttctactgtcattttgtctgtagcttgaaggaatagagtgacttatatccccatattgtcacagagaatagagaataaaagatcatcccatttttaagggcccctccaccgaaaaataccagaggattttgtgtttgcttcattcttaaatgcggcccataaatgagaacattcatccaaatgtccaaataatatttgaaaaggggtttcattgagaatttcattagtaattggggatgaaaaataaaaacactattacacattccaaaaattgacttagacgtgaaagattagaaattccaagtatgggccagaatgtggaacaatgaaaactgtcatacttctggtcaaagtgtaaactggcacaagtattttagaaaactatttggtattatctactgaaatttaatataatactatgacccagcagttctaggtatatatcctcagaaatgtgtgcacatgtggaccaaaagacatgtacagaaaagtttatagcagtattagttatgatagccccaatccagtaacaacaatagttctagttcaacaatagtagatggataaacaagttttggtatatttgtacaatggaatgctacataataatgaaaacaaactactactatatataacagtatggatgaatctcaaagatataatgtagaacaaaagaaactagacacttgaaaatgcctaagttatgatttgatttatatggaatccaaaaaaaaaaaaaaagacaagcaaacttggctacctttggggagaggggaggggctggatatggggtgatataggcgctcccagagtggtagcaatgttctgtttctttgacctgggttgtggtcagtttgtcataatttagtgacttgttcacttaagatttgttcacttttctgcgtatttgctatagttcaagtaaacagtttaaaaattcaaaaaaataaaaataaataaaaacaaataaatgaagacatacatcagttcaataccaaaacatcagtaacatgtctggccaaaggcaaggcctatcaaaatgggtaacaaagcaaaatcttccctctgccgttttcaagatacatgcctataacaaaatgcacaaaatatagtcaaagatattcatcatacaatattcatattagcacaaaattcatttagatctaaatgtccaataaaagaggatagtgaaagtactttacagtgtatttctacaacagagtatgatatagccagtaaaactcgtgttctcaaagacttaagtaaaatgctcctggtatctcggtaaatgagattcattcaaagtgaaacatataacctcagccctgtttgtatgtgcttacaccttctaaagtaatttttgtcttcagttgctctgttttcctttctcccttctgtgtagcttctgtcctcccatccttttcattgtcctccaaaagaaatctcattctcagcagccatgatttcacgagacaagattaggagaatgggtagagaaagactggaatgcaaaggtagtaaaactttagataaaattctttcttattgggtgtggtttcaggttctcctctattatggaaattctagataatgagcaaagaagaaagcaaatttaaaaggagaccagatacttatggacataaagatggcagcaatagaaactggggactactagatgggggatggagggagctagaggggaaagagttgaaaaactattgagtactatgctcagtacctggatggtggaattagctgcaccccaaatctcagcatcatgcaatatacccaagttacaaaccttcacatgtacctcctgaatctaaaataaaatttgaggaaaaaaagaaggccagagaaactcttccttactatatttaaaagaagcttaaaatagggtaagaaagggttatgggagacttataaagaggtgaggataatttggggtaggttggagaatccagaagctatcatatagattttgggtatggaaaggtaggagagtaatagaaacaaaggtttaggaagttttaccatgggttatgaattacattccacttaacattatttgaagaccaaaggtaaagcctgtatttgtcctaataattatctatggctaattgagtagcgattttctgagtatccatgaacacatgaagtcctagattatattaagagcataaagtaagacattgaggtcatcagaaaagcttgtcatgaaaaaatccagcactgtttatttctctacagtggaactagaattaatttatattttgttctttatatttttctcaattttttccaagctttcttatataagaaagtgcatgacttatatagccagaaaaatgcatatataatatatattattcagaaaaaagttccaaaaaacttactattgtctgtcccttcaattgctgctggaagaatgtttgatagcgaagcagaaaaagaaagcatggagaaagggctctctcagtatatggggtggggatgggagaggaacagccgtggaacccctcccaccatggccttggccttgttcacaggagagcagtttgccctaagtagttttgtagaaggcattaaaaaaattgcatcaggctgggcacagtggctcacgcctgtaatcctagcactttgggaggccgaggcaggtggatcacgaagtgaggagtttgagaccagcctggccaagatggtgaaaccttgtctctactaaaaatacaaaagttagccaggcacggtggtgggcgcctgtaatcccagctacttaggaggctgaggtgggagaatcgcttgaatctgagaggcagaggttgcagtgagctgagatcatgccactgcactctagcttgggcaacagagcaagactcagtctcaaaataataataattattataataataataattgcatcaataaaacagcaacttgccatagaaatagttatgacagtctgttttatatataatcaaaagatctgtacacagaatttgatgtgaatgatgtatccacagagagccagtaatttaagtgcacccagagatgactgcctgccctgattatactcctgcagatgctgccaggggaggagcagtgtggtctggaaaaagcatggacttgggttctctgaagttagacaagcctagattggaatatcagttttgccacttactggctgtgtgacttcagtcaagttattaattgtttttgtgcctccgcttctccatctgtaacatggatttaattaagtccatatcacctgggtgctatgaacaataatattgagaaatgggattatataatatacatttaagcacctagtggaactctgagaagtaagaggtgcccaattagctttatccttactgccattcccacttatagctcccaccccccaccacatctcttctgccctgccccaaagttctcaaagcaaggggggctgggtggggataggaggggttggaggcagggaaggagtcagggagggaaactgactggaaagattattttatcataaaataattttcctgccaagttccccacttactcctggatttatttttccttttgtgcatagataagggtatgtgttagcgtattcctgtctgaatttagaggcatttcttaaaaagtcatccagcatcatattacattagttcttaaactccacatacaaggaagcattccagagtactcatatgtcttgggatgtaccttttatcaaacaatcaagaaattataataagcaactctgatataatctttatgaagtgccaggaacttgtctaaattttttaccatacaaagtaggcgccatgacaatcttcattttatgcatgaggaaattgaggcacagagaggctgaataacctgaccaagattattcttcaggccaatgtcaagtctggatttaagctcagagcagaagtcaagaaagtgcagctggtgggccaaatacagctcatcagatattgtatagagaagacttctgtagccagccttctcctcctcaaggccacctcatcatcactccctttctctgttactaatcctagtgttctgtttttatagctctcagaacccgatcctatttatgcactgacttgtgtatcatcgtgtatacatacatacattgtatattgtatgactcaagttaaaaataatttctacctttttttctcttttcccacactacactgatgtaagtttttacttttttaaataaatatatattaaatacagtccctgactcacaatggtttgacttacaattctttgactttacaatggtacaaaagtgagatgtatttggaagaaacagtacttcaagtactcatacagctattctgtttttcactttcaatacagccttgaaaaaattgagatattcaaagtttattataaaataggctttatgttaaatgattttccctagctataagctaatagaagtattctgaatactcttaaggtaggctaggctaagctgtgatgttcaataggttaggtgtattcagtgtatttgtgacttaaaatgatattttgaacttcaaattaatttatcaagacatagccccatcataagttaaagaatgtctatagttatacaataaaattctcaatgtttccttttggccgtccaaacctaaaatatgtacaacccatttcttcacaaaagaagtttgctgctcccttatctagtgtatcttaatcactataaatattccctctcattacatgcagtttcaagcacaatctgcaacccacagcaataaaattatcagttatcaagcaggaaggcatcatcatcatcatcccttccactgtacagtcggtttagggtaacacaagcagcattgtatgcaggcatggcctgccaatcagtgacacaaatgctctgggctctcaggggctatcagtaactaggataggtgctgaggcaaatacagtggtagatgacactaccttcatcctgaagatttaccatcaaaatatcccaaaatagtgcattaagagctatccaagtctttaggtgaactaaaccttcagccaaaatattctctagtagattatcaagccacctagtgagagagagaaatcagacaaacataaatttctgtgtttggggggaaatttgtcactcactctgtgcccaatttcctcttccacacaatggggttggtgatgacatctacctcatggagtcattgtaggatttgactgggacaatagatgtcaagtagttagcactttaagtagttgagacataaactctcaataaatgtctagtattaccggtattgccccagaatttcttagtggtagaacaaagaaagccctctgtagaaaggcttcagcagggttatagtcaccctgaaattgcactaaaattttatatttaagatgcatttttctggggagagtttctgtaacgtacttcagattctctgagaaatctggaactcagaaatattaagtgccacaactcaaaatgatatgaactaggggagatacatgaaggcttttgggagaaagatgtgcgcatccccagacatgtcccctctgatgcaccacagaaacctgtcagttggtactgatctaccctcctcctcctccttctcctacacacacacacacacacacacacacacacacacacacacacacacttcatcctactctccagcattcagggaagaaaacagaggcaaatgttgtgagctgcatccttgcagtcaactgctcttgggacttctgtagccagtcttcctccctcagtgccccctcatcatcattcccattctctgtcaactgatcctagtgttcttttttatagctttcagaaattgatgctatttatgcagttacttgagtatcattgccatctactatttgaatataggctccatgaagataggaacttggtccgtcttgctcatgactgaattctccgtatttggctcaatagacatttgatcaacaagtaaaagagaccccaaaaatccccagaaaatttcagttcagcttgcacatgaacaatgaaaggcagcttgagaatcttgactctactgtgaatgccaaatagcctgcttaaccaaggttgtccaaattcagctaagggatgcatcaggatggacaccatgagtgttttgtgtggaaacagagtgagggtttgcctatcattaagcaacttgtgagtaacgagtgtataacatccaggatgttttgacatttgggcttcttacatctgactgctgccacctcgggccagtacataacttaggggtagggtagctacgcttatagacctgaaattctagtataataataagacaaaatatctgaattaagacagtcataaaaataatcttgggtttcttttatttattcatacattcaacaaatattcatggagccttgttatgcactaggcactgggaactgagctgtgaacaaaacagataaatccttatacttgggatatttatatccaagtggaggactaatgagaaatccttctcctcccccagtcctattctctagagcccttcaatatctgatttgatcaaacttaccaaaaatactttttgcacaaggcagcacacccacatgcccctcgtatatagacagtgcatcaaatgtgttatggttgacagtagttgttctcaaccaagggccatgttgccttctctctagaagacatttctcaatgtctggagacatttttagtatcacaagaagggggatgtgctaatggcaccagtggggaatgctgccaaccattctacaatgcacaggacagctcctcacaacaaagaattatctggtcccagattacctaagtgctgaggttgagatgccctggtctacagtcgacatctaatagccagatccaagcagcagttatactttccctgatttcctttaatataataatatccagcattaaagagccattgtagacattgggagttttcccactgctcagaagtttttaaacacccttccctcatctaagaaacctttcacatccccaaggtggaaacaagaaactcactttcccattctcctttgtaatgctccacctcagccataccaaccacaatgagtgagagtatcactgaaaagtgagcaagatgagagagccgatgctgggtagaaactattttttggctagagatggcagtgatggctggaagtggaatttctgacatcctgagcccagaatgtgagctggggtctctgtcctcatagcatcgatggagtctgtactggttcattcccattgtatggtatggatgtaatccttctccatagagcctcccagtgtgactctccagccatcttggagacgtgaagcactaatattcttcaaaaaattcttttttcccctaaacccacttaatgggttctgtttgcattttttcataagaacaagcaaaaaaactgttcacagtcgataggaaatctaagaaggatggactcacaattcacctagaactcactcactggcttacactaatcatcttattttggggtaaaaaccaccttggctactaacacagtaaaacaccctagtgtgcgctgcatgaaaaaggtatttcaaagataatgtcttcatcaacagcaaaagaagaaaccttgtcctctgtcttatcaaatagccaatgccttcatccagccagtttttccccagctgtaaatacaacctatgtgagtttgtctctattttgcaagcacaggaaataggaatcataagccacctgtgctcctttcacatcaaattaaaagggagataaaaagattgaaaggaagcgtgggaaaacaaaacctccataaaaattttaaagtcagactgcccttgagccagcttgaacgttggtttaagtggattatgatgccagctttcgaggacatgctctaccatgggaatggagagacggtgcatggaagatgcaccaccttcatcttgtatttgccactgtgggagaagactgacctgttagccttttctgctcaccagttcatcttttgctgggagagagaattctgagtgcagaattcttcacattatccatgcagaactaggaaaattgccaaaagttatgggtctgtacagagttagtgtcacagtaagaatctcattgcccaagcaatagggtctaaaatcacgatcttattcaaagtaacagcgaccacttacctcatgcctcatatgtgccagatacttttcttacattatttttaatctccatagcaattatctaaggtagataatatctagagatgaggaaactggggctctaggagtatgcaagatttgtccaaggtctcacagcaatatcttagtagagtctgtctagaatcaaagccaatttgtctttttgccctatcatggttcatctctacttcactctaactccatcctaaaaaccaccttccccatccactatataaatgaatgatagcaccaccctttcagtaaaaggatctagacattcaccatctctctaccatcctagcagcaactgcaatgcttggaaaatagtcgaggattagtaagagcttgtcaaatgagacacagtttgttgttctggccctgacatgaaacaggtaatcaagtaaacgtatattttatatatagtcacttcactttcctagtcactaatttccttatctataagacaagggtattgggccaaaagtctagtcttaaaggttcctttcaagtcatttattgaaagtttgtctgatactttattttttactaaactttatatattccttaaatacacactcaaagaaacatatacaggtaaatacagacaagctctatctaatggtgttaactgtcacttagtatataaagacatcttctctcagagaaattggtcacatgttctttctttagacaactgctcatcatgtcctttgactaatcataagccaacagtaagaagttaagagtgccaagaaaaggtaactgtgttaagttgcatttgtatttttccaagtatttactctcccattctttcatatctataagaggattatccatccccacccactggcatgtgcgtacagtgcctccatgaggggcgtttatctgtttttcttcacaatgaatttatcacattccttgctttggccaatagaatgtgagtgggcatacgatgtgtgcatgtctgaacagaagtcatgaaacaattgcctggttctgatttatctcctgctttttttttctttggcgttaaattggtatgtgcgagatagaggttgatctttcaactttgacctggtattgagaaggcacctgaggcaaaaccagagctgatctagagttgacatacacagtggacatataaaatgaataaaagataaaacttttagattgtaagccactgtaatttggaagatgtttgttactgcagcataacctatcaaaggctgacttataaaaaatatttcagataccgttagttctcactgttcacagtagttatgttttatgaagtttccatggatactgaatgagcgaacagtgaactaatgttcctaggtaaaatagaagattaggttcccgtgagctctgggcaaaacattttcatcatccaagcaatacataatcttgctttatgtgtgtttctatgtaaagacaccttattcaatatattttgttgattcattaaaattaaactcatggccagcagcattatagctcatgcctaaatgaggcttatctaacatgtatatattttctataagacatttcacagtcttcttgactcaagaacactacacagcacttcagcactatgctgaaatggggccattttaaacagaaaaatcaccaccaacaaaaattagctgggagtggtggtgcacacctgtagttcaagctacttgggagactgaggcagaagaatcgtttgaacctaggaggcagaggtcgcagtgagacaagattgcaccactgtacttcagcctgggcaacagagtgagtctccatctcaagaaagaaaacaaaacaaaaacaaaacaaaagaaacaaacaaaaaaacacttcatcaaaaagcataaaaatggggaaaatgtggagctaagtagattgaaagggacacttattacaatgtgagagctgaaatgagatagcagaggctcaccttgtttaccctcagctaggatcatgtgtgtcaactgacttagatgttttgccacccactctaagcatgtccaagaatcactgtaaaagcaccatgagtattgatttggggatttaagtatgttttagcaagtaggtgagttcacaaatatagaatccatgaataataaagatctactctatttacatgtgccacatcatttaaccctcataacaatcccaaaaggtgagtatttttatcaccattgtagagaaaagtaagattctgacagtgaaataatgtgtccaaaggtataactaattcgtgataaagcaagaatttaaaggtttttaaagtcttctaggtttgcatggctccaaaatcacagtatggctcttttctctgccccatattgtctcccagtagaaggaaagttgacatgtggcaccaagactcaacttatctgcctggatttcagggccctgcttaatctgattgctcatggtattttccatctccattcaatccatgctcaccaacaccctcctcttcagtgaagagattctttcctcccattgtgctcagcctccatttttagttctactttgacacggaatatgctcttctgtcacgcatctggtccacattctcaaggctggttggagaagcctggagattatttggtccaatcttgatgcttccagctcagacccagagagggtcagtgattttcccaatgttagtgagagtctgagtaaggacttgaacacagatttgctgaccttggggcaattatccctgggattgtttcacttttcctcccaccccaaaagcaattacctttaaccttagagcaaacaaatgggcagaggaggggcgggagtggcaaaagcaaatcattaccactcagaggtatttacaaatgatttcaaagggtttttaggaaggagacagctgatgactttgtcagtcaaacagcctcctgttctaaaagaagccaacaaaccattgaagaataatagcagagaccttctggtctttgaattcatacagcacttttcacctctgaagctcaaggctccttccggatgttatctcattcttcttcccagatcactagtagagagtagttgcaagtattgtacccattttgctgatagaaacattaagcctcaaacgcagtaagagatttgatcagaatcagaaaaatcaacaaccttattctgcagaaccagggttaaagctgagaactagaatcaaaacttagccctttcaaatcttatcctaagccatagaaggaattgtctagaaatgagactgaaacaagggggaaaagaggactggcatttgttgaagatgtgttgtgtcaaatgtctcatattaaagatatcacaggtccttggtatccatcctgtgaagtagaaattgttatcctcactttatagacagagaaaagatttgaccacagatattcataacatcaaagccagcatcattgataaaactgcagaaagtgcctggtatttgcagaagactatgctaggcccaatgagcgtacagtgaagcacaagatgaagatgtagcaagaacttattatgcaccaggcatcagagatcggaagataactaagacatgccctccaggagtcaacactctatttgaacagagaagaggagcatgtggagcatacagagaataatccagaacccactctcttgttgagtactttctacgtgccaggcactgtgctcttcatggtagagattcaacagggaacaaaaacacagttcttgccttcgtgtagctcactatgcttgattgtcaatgtattccaagggatgctgcatacccaaagattcggggcaggcacaggagaaaagggaggactttgactttgtgtgctttatcttaaaactcatgcaaatttaacatcctactctataaaatatggaggttcattttaacattactatatatttcctaataatcaagttaaattatttgccttttttttctttatcaacctttccaaaacagttgagacttcagggtaccattcacattgactctggagcataaatgaactcctaacaaactagagctataccatcaggatgcacaagcctgatttaaaagtgctggcaaataggcacagtcctattctgtcgacaccactttgattcaatatcgttagtgtctactatgtgctattatgcagtgttcagtgctgggggaaacaaaacaaaacaaaacaaaacaaaaacaaccaaaaccaaaaactgggataatggagaagaaaacttcaaattatttctattcaatgaagttggagctatggccaaaatagctagaggggccaagaggggccacccaaaccagattaataagttccaggttcctctcatatttgcacattaaaagcacacaataaatgtttttggctgatagagtcacatcagttttgtcttaatcttacaaaatatgtgttccttataaagcacataatcacacccagccttgcagctccacgtggggggcacaaagagggtagggctgctttctggacccaggagtctaattaactctctcatcaagccagtccagttgggcctccagcctcctaccccacccccaccttggatgtgccctttggcagcatttacaggagtggtctccctctcattccccaagcaaagaaagtttctcacatggtgatctatgaatgtgtctgctcatgacttctctggaagttaattctattaccttgtgggttggattgacaactgccaaaggatttcctcacgcctctgggacatggacctcctggcagtgactctttctacactgctgcaacctgacaaatttaaaaatgaatcattggccagacgtagtggctcatgcctgtaatcccagcactttgggaggccgaggtgggcaaatcacgaggtcaagagatcaagataatcctggctaacatggtgaaaccccatctctactaaaaatataaaaaattagccgggtgtggtggcaggcacctgtagtcccagctactagggaagctgaggcaggagaatggcgtgaacccgggaggtggggcttgcagtgagccaagatcatgccactgcactgcagcctgggcaacagagcaagactccgtctcctaaaaaaaaaatgcatcattacattctatctacatcaaaatcctttatttttccctccttgttatgaactagcccagaagcctcagacttactgcactttctattgtcagtatattcagattaaactaacatttactgagaacccattgtgtgtctctcatgtttataaatattatttaatcatatgtcctgattagccctgggaattaaatgagtgttaccattttcaagatgggttctctgaagcttaaaaaaataagttactaagccaagtctccaaattccagttctactacttttccctctcaacagtgttgcctaaacctttggatggatagatggatggatggatagagaaagagacaaagcaggaaagagaaaagagaaaggcatatatatatttttttcttcattctgggggcccaccctgaaactactgaatcacagtctctagaggttctcaggcaactagcccagctgtttttgccaactggaatttatgagccaccgcaagagaccacatgcagcttcatgtaaaacaaattatttttaagcacgcagactgagcagtgatatgaggagtgcacaggagtgcctacgcctactcctggtctccatgagtctcctttgcaaagtcaagtattacaagattctagaacacatattgcctgccactgataatttagttgttcagcaaacattcatttgttgagttgcacgccagacactatactagatgatgggacaactaaagggtaatgaacagttctgtctctatgtaaaaataataatgatgatgatgatgagatgggacttcaattgaggaagtgccattggggaggtatgtaaaaagtgctatggaaaaaaagcaacaggaaccccttgatagaaaaaaaaatgctggtgggggtagggatttctgcctgtgttcttcagaatggggtatgggaaaatctgggaggaaaagaaatttaagtaagagcagagactttgcaaaatttgttgtgttgacttttcctcatgctgcttcccctggcatgggaagtcattagctggataagagagacttcacaagaactgcaatgaatcaagatgtgctggttttgttttgacacatggaattcttagggatttgatgttttttttcccagtcttctccatcaaagttgttttcaaccagtcctgattggaccgattgactcatcctcagatatcatagttttcccactacaaaagcatggaactgatgccaataaacccactccttattcccagagggctagggtgagtccttgcagaggggaattgctagggatggcacctggcagaaatagaccatctgtctttcctccacaattatggtccctgccattgtgaaggaaacatttacctcctcctcaccctcaggcccccttttcctgcacttagggtctcattgcccctccccaccctccgacaagtagctggtgctttctccttgacctctgactcactgtggggagaactctgcctcaagaaacatcttttcatctccctctctagctccaactgtccctttgcctccatggggagctccttgctctctccttcggtatttctctgagggctcactcagaccactccactccacctgccaccagtggtctcatactgaactataaatctggccatcctcctctcctgtttggtatcttccatccccttcccatgtctggtagatgatgatggcctcaacccccaggtgactcttggaccacgtaccatccatgcctttcccattgagctactgtggaaagcccatgcttgcttctaagtgctccatggtttggtttggtttggttttctgtcatgtcattctgtctgcctgggacaggatttctccctatcaacactgagagatctcctgctgaccctgtgctcaatgattgtgtctgccttgtccctagcatccagatcaacacctagcaaataaacaagtgctcaagaatgtatgttaaatgagtgaataagctagttagcaagagagtgaaagagaatgaatgaatccttggagagcgcaggccttcactgtgaggcctctagaaccctaagtgaatgacatactccttcctctgggctaacagcatgtgaaatatccctctgctgtaacccttatcacttttacgatgtggaatctcaggctcccttcttgggcacatagtctgtatcacattttgtatcagcagcacataatagccatgcaatatataatcaacaatttagttttacgaatccatttgaccatccacattccccacatctcctcacctctttctacagcattttctgactcctcacttttcattctatctctcttaccttcagaaaattccagaccttgctcctttaccctagtattactgcctgaaatgccctctcctgcatcctttcctgtgtgtatttaaaacctaaactcctcacagctaacaaaagaccatcctcccaagcctcccaggctttcaagaacattcctcctgtggctcccaagtcacacacatgtctctttgacaataataatataaacaatcatttttcagtaccagaatgaatctcaagtgctttatgtattacataaattcagatatatctctttttattgtacttctctttactgtgctttgcagagatattgcattttttttttacaaactgaagatttgtggcaaccctgcatctaggaaatctatcagtgccaattttccaacagtgtaggcttatttcatttcactgtgtcccattttgttaattctttcataagttcaagtttattgttattattctatctgttatggtgatctgtgatcagtgatctttgatattactattgtaattgttttggggtgccacacactgcacccatatcagagagtaaactggtaaatgtgtgtgttctgactgctccactccaaccagccatgtcccccatctctccccatctcctctggcctttctattccttgagtcagaaaaaaatattgaaattacgtgaattaataatcttacaatgaactcttaagtattcacatgaaaggaagggtcacaagtctttcattgtaaataaaatactagaaatgattcagtgagccgagatcgcaccactgcactccagcctggatgacagagtaagactctgtctaaaaaaaaaaaaaaaaaaaaaaaaaaaaactagaaatgattaagcttagtaagtatggcatgtcaaaagctcagcctcttgtgccaaacagccaagttgtgaatgcaaaggcaaagttcttaaaggaaactaaaagtgctattcccgtgaacgtattaatgataagaagcaaaacaatctttttgtgatatggataaagttttagtagtctggatagatcaaactagccacaacattcccttaagtcaaaggctaattcagagcaagcccctaactctcttcaattctgtgaagtttgagaaagatgaggaagctgcagaaaatgagtttgaagctagcagaggctggttcatgaagtttaaggaaagaagccatcaccataacataaaagtgaaaggtgaagtagcaagtgctgatggagaggctgcagtaagttaaccagaagatctagttaagataagttatccagaaaatctagttaagataattgataaaagtagctacactaagcaacagaatttcattttagatcaagcagccttatactgcaagaagatgccatctaggactttcgtagctacagaggagaagtcaatgcctggctttaaagcttcaccaggcagggtaactctcttgttaggggccaatgcagatggagactttaggttaaagtcaatgctcatttaccattcttttttttttctttttattattatactttaagttttagggtacaagtgcacaacgtgcaggttagttacatatgtatccatgtgccatgttagtgtgctgcacccattaactcatcatttaacattaggtatatctcctaatgctatccctcccccctccccaccccacaacaggccccagtgtgtgatgttccccttcctgtgtccatgtgttctcattgttcgattcccacctatgagtgagaacatgtggtgtttggtttttttggccttgcaatagtttgctgagaatgatgatttccagcttcatccatgtccctacaaaggaaatgaactcatcattttttatggctgcatggtattccatggtgtatatgtgccatattttcttaatccagtctatcattgatggacatttgggttggttccaagtctttgctattgtgaatagtgccgcaataaacatacgtgtgcatgtgtctttatagcagcatgatttataatcctttgggtatatacccagtaatgggattgctgggtcaaatggtatttctagttctagatcatttactattcttaaattcttagggccctttagaatcatgctaaatctactctgtatgtgttctgtaaatagaacaacaaagcctaggtgacagcacatctgattacagaatggtttgctgaatattttaagcccgtgcttgagacctgctgctgaaaatcaaagattcctttcaataatatagctacccaagagtcttgataatgcttttagttatccaagagttttgatgaagatgtgcaaggagattaatgttattttgtgcctgtgaacacagcattcctgccatagcccatggattgagaaataatttgactttcaaacctcataatttaagaaatacatgttataaggctacagttgccatagatagtgagtcttctgatgaatctgagcaaattaaattgaaaactttctggaaagaattcagcattttagaggtcattaagactatttgtgatgcatgggaagaagtcaaaatatcagcattaataggagtttaaaagaagtggattctaaccctcatggatgactttgaaagctttagtggaggcaagaactgtggatgtggtagaaacagtaagatagccagaattagaagtggagcctgaagatgtgacagaattgttacaatctcgtgataaaacttcagtggatgagaagttgcttcttatgagcaaaaaaaaaaaaaaaaaaaaaaacaaaaaaatagtttcttgagatgggatccactcccagtgaagatgctgtgagcattgttgaaatgacaacaaaagattcactacaatcaacttagttgataaagcagcagtagggcttgagaagattgacttcaattatgaaagatctataatactatgggtaaagtgctgttaaacagcattgcaagctacagagaaatctttcataaaaagaagagtcaatcaatgcactaaatttcattcttgtcttattttaggaaattgtcatagctacctaaccttcagcaaccaccaccctgatcagtcagcagccatcaacattgagacaagaccctccaccagcaaaaacagattatgatttgctgaaggcccaggtttattatttagcaataaagtttttttgtttgtttgtttgtttttgagatggagtctcgctctgttgcccaggctggaatgcagtggcatgatctcggctcactgtaacctctgcttcctgtgttcaagtgattctcctgtctcagcctccctagtagctggaactacaggcgcccaccaccacacctggctaatttttgtatttttagtagagacaaagtttcaccatattggccaggctagaactcctgacttctggtgatcctcctgcctcagtcttccaaaatgctgggattacagggatgagccaccacgcccagctagcaataaaatattttttaattaggatgtgtacatttaagaatgggcatggtggctcacacctgtaatcccggcactttgggaggccgagacgggaggatcacttgaggtcaggagtttgagatcagcctgaccaacatggtaaaaccctgcctctactaaaaaaaaaaaaaaaagtttttaaaaattagctgagtgtggtggcatgcacctctgtaatctcagctacttgggaggccaaggcaggagaatcacttgaacttggaaggtggaggttgcagtgagccgagatcgcatcactgcactccagcctgcgtgacagactgagactcagtctcaaaaaaattaaaaaagtaaaataagatgtgtacatgctttagacataatgctatttcacacacagtagactacagcagtgtaaacataacttttatatgcactggaaaatcaaaaacttcacgtgacttgctttatggcaatatttgctttattgcagtggtctgtaaccaaacccacaatatctcaagttatgcttgtatatacatttttataatctcctacacataatatggaaggataagaaattgaggcacaaacaggttaaatatctgtcttaaagctgggcaactggtaaatgatagagccagtatttaaacttggccattattcattcatttattcaccgattcatttaatcattaaacaaatagttatggagtgcccatgaggcattatttccagacttcaacactttgtggtattattcacttggcaaactaaactattctgttgcttagacaaagtgaaggcagacaaaggaggaaaaccagaagggattacaggctctgaatcaaagaaaggcagaaaaatggaagagtgagagacaagtttcagtttcaggtgagatacctgaaaggggaaaaattcctagggaatagctttcctcctccagggctccaggttgaatgaattccctgaactcaggaacaagcgtcaagacttgttttattggtatttacaaaaataggttttaaaggatcagtgatttgcagattccagttggatgtgtcacacacacacatctctcattcctcacgtctaagagaggggagaaggaaagacacggctttgaaagcctagatattttgaaaggggtgttttgggatttcagcgatttctttttccagcagcaactgtatcttggactgtggtgtatctctctttcccatctcccaggcaggtcagttaacccttttgggctgtgttcaatcagggttagtgcgtaataaagatcctctgcatttagaattacctttttttaacctctaaaccctcttcaagaggctgcaaactcttcaaagacagaagctgctgtacggatttttcacctgcttcagtgcctagagaggaacaagggagagaaggggagagaaaaaggaggaaggaagaaacaggagcaagggatatctacttggtactttacaaggtagtgttaatgaaatacacttaaatcaagagttctgggttcaagttccagtcctgacggtgcctatacatccttgggtcatcactcagactctcagagcctcaatttcttactctgagaaatggaaataataatgcctacttcaccagatcattaggagaattaaataaggtaatgtattgggtaacattttgtaattgtgtgctactgtgtaagttaaaattgtatgaaggtttaataaaaggaattgttctttaagacttcaaggactttctgtcagaagttgaaactagaggatttaccaggatgtttctggctctataggggtcatgtccctttccaagatgcctcagttgaccagtaaacacattcttttcaaggcttaatattaaaatagtatcaaattctgatctaatctggatcagaagagaaaatactccaacctaccattgtcaaccgcaacactggttgtgtttaatggtgatggaattctgtcacttccaccaacactttttgagcattcgctgcatgcggggcattctggtgtatactgataagaaacaacaaccaaagataattaagattgacctcaccctccgagatgtttacagtttactttgcttccctaagcttcagtttttccctctgccaaaacagaagctcggaagagatgtctccaagacactttctaccatgaccttttgaatttcataactctctaattccagaattcaaagagtgactgttttacctcccactgaatgattcctctgagaaaaaagctctctgctagctaagctagccaagacaccatacctgaagataatacctaaacttctgtttgtgtcccaggaatcccaaattgatgtcacaccaaaacaatgtcatttatacaattcattatatgtcactcattaatacatttgcttagttgattttcattaaaatcctgcagggagcattattacactcatttttcaaaagagataactgagtcgtaaaaggattaaattatttgcccaggtcacacggaaagaaattaacgtggccacggcataaaaccagattttctgtttttaaacatatttttttcgctgacctccaccctgtaagagcttttattaccaagcgattgagaagcacaggctcagggacactgaatttgaccaaagaagccaatagaactattccaaaaacctatggttccccctaaagcattagaaagactcagaacgggttaagtgctccctggctcattcccaacagacactacattcacctgtgcttgctctgaaataaatcagtgtccctttctgctgctgctgttgtctggaaataatgcaaatgcaatgggcctttactgacattgtgcttccctggaaggatacacataataaattatcccttaatactgttaaagagacattttcctcttactcaggagcttttggggttggactgggctactcacccagcaaggaggaggacatgtgtcttgtcactggcccggttattcatgtggcctctcattgctccttggctcactgcattgcaagattcaaggatgcacttccaggcctccacatcaagtcataggacttgccggtaacctagattggttttctcatttgtaatttgaatttattttatgttatgcatttgtatgtttatttattcggatgctcagaagctgaagataactagtgctcctggtccatgccattcatcaattggaagaatgccaagctgtttccgctgaggacagaaggcattggtctcccctgcaggaagccactgctgctccttaattgtttgctagaggaagaatcaagggtaaaatttaaagtaaatggctggccgagttgcactaattcatcaaagcatgtttcaagtcagtagtcagagcatgcatcagcccccggcgccaccagcttctacgagagtggaaaagccagcagacctccgagcagatgaaatcattaggaggcattcagcagggcttgaaaagcaaagagagaggaggcggggatttctctgcatgctccctttgccacatgggaaacaccagctgtctgtgacctagttatccaagaaaggaaacacggaagagaacccacaaaactgtttgctacatgagaaccccattctccaaagacatgctggatgttgagaaaacaattagcatcttctagtttgactctatttttttttttttttgcttagagatttttggtagcaataaagacaagccctattacagtagcctaagaaaatggaatttttagggatagcccatggataggaagtaaaaatcttggttcatgaaagatgggaagtaggaactggaatgtttttggaaaatctatcagcatctcacctctttctcttgctctctctctctcattacatggccctttatttgtgcaacaattcattttcctacttctctatgaaggtctctcttcttgcttttaagcatgaagccactcattcattcagtaaatatgtatttaatgctaacaggtgctggcactgcccaagatgccagggctacagcaatcaacaaaacagacaaaatccctgccctcgtgaaatgtacactgtggtgaggcaggtgaggcaggcagaaactgaacaagataaataagtaaaagatacagtgtgcaagagggcagtgagtgcttggaagaaaagatcaagggaggagaagtgaaatactggcaaagtagttgaaatcttaaataaaatggtcatgggagaccccactgagaaagtcatttctgagtgaaacctgaaggaagtaagaagttagcattgcaattgtctggggcagagcatgctgaggagagggaatagcaggtgcaaagggcctggggtggttcaaggagctagcagagaggccattgaggaaggaggttaagcaagtgagggggattagttagaggtgaagtcatagacctgggggcacagatcacaaagcgttttctaggtcatagtgaggactttggcttttactctgagtgagatcagaagatcccaaaaggccaccacaagatgatattcacgtggtccacctaatccagtagtcagtccttattgctaacttgcacacagtcaagctcccttagtctccaaaagaggagatccaagcaacgatacttcatgagcagtcggcttcgagagtcatcctgagttttcaaggctgacacaaatatcagtctaactacgcagtccacctgtgtaaatatttggggaatagtggatggttaaggaagagacctagtatgagataaagtgtccaggccctgcacacatttgggtctcacagaattaactggcaaatgctagtaagagtatcaggaccttaggaaatagagattcctttagaaaactctaattcccagaaagattttcacataagaccttcacacaaagacaaaattagaatgtgtgttctctcaccatctccttatccagagagtccttagatgtggcagaaggacccacaagagttgtcagaggcagttgtgaggggttgccagtcatgttagtattaatagatatcatgagaagttagacacgtttttgaataaattagaatgaattaaatattaacccaaaatgtcattatgctcactccctaccctcccactatgctttcctgacagagaaagaaagggtggcactgtggctggaatacagagcccacaggacttcagcatgtcctacacataaacctcctcctttttgtgacccttggtggaaaaagtatgagagccacgtatcttagaaataactgcctttcctccctagatgcctgccacaaaaacagacatgttctagaactttcttctccctagttccaagaacactgaactcatggtaatggccaaacaatgatctttttctaaggacaatgtcagaatgctttactgtgccattttcataatcagacacaagaaagttaccatctgtagttcagccatagcacttcacatgaaagaggaaatgactaaatatatatttacatagctctcatgaatatgcattttgtaaatgcacaaatatgtacaattacttgatagactgttttggttcctatctttcgaatatttaatacaactgtaaatgtttaattcatatttactgagttgattgaacagtttctaaattatcccaagccttgctggaaacaagattgaatgtttccagcatatttgcacactaggatttggccaggagaatccacactaactggttaaatgatgattttcttagaaagcatattgaataagctgctggtgaaatcatcttgctgaccacaacatagagggacagcaccagatctaattccaaccatgacctgcagagcctctcatgactaggcccccctgatgcctctttgcacctctgtctgcactgcccctcattgctaagccacaatcaacccatgttccactttcagtcctctgcaccagctgctccatgtgtccagaatgctcttcacatagacatcaagcctttgctctaatgtcaccttttcaatgaggtctatcttaacctctgcatttgaaattgcaatcccatcatcccccagaactcctgatatcccctacactcccttatacttttttgtctatagcaaccacccctcaccactttataacatttatgctttgtagtctgtctgtgtccactcactagaattcaaatatcacaaaagcaggagtccactttttttttcattgaaaaactccaaatcctagaaggaagctggcatttaatatgtgctcaatagacattagaggaagaaaagaaggaaggaaggaaagaagggagggagggagggagggagggaggaaggaaggaaggaatgaaggaaggaaggaaggaagaaaggaaggaaagaaagaaagtcaagagacctgggctcaaatccagcatgggaataagtagggaggaaagaagggaagtcaagagacctgggatcaaatccagcttgggcatgaggcaagaccagagcagaggagattgtccttgagctcaggtgacgcccatctggccaactctccacaaagctgggtcacactgtttagaggacagttcttggcagtagtagtagtgctggtggggagggctttgtcattatattgtgtgcgtgtggtgtgggactcttccttagttcagctaaagacaagctccctgtcacaaggccatgaaagattaggctcgcagacaatttgaagggtgagaataatgggatttattgagcaaaaggaaaaatgggggcagaacagggacgcagcagagccagagtcttcctagtatgtgcttcctgcttcacaattgaatcccagctaccacccaggaataggaagggccaggctcttccccactgcaaatggtgagaacttctgtggctccaccccagtgtgcactcctcccagtatgcaggctggttggagtttctctgtggaccctttcccatctggctgtctcacatgcaaaatgggagtatttgaatctccttctgagagtaatctgaaagttaaatgaggtaaagcaagtgaaaacatgctcatgtattaggtctagggaggaagcaaaaaggaagtagaaggattctcctgagtaggggataattcttttagggagatgcttaccccagaattattaatattcaaggaaaagccaggagcgactataaaacacagctcatcattgcagaccaaagacaaagcacctcaaaatatgtctactacagtaggcatattttgcagaaaaaaattagagaaaactacatctccttggagtaaagtgccacaggtatccaataacagaaaataggaaaagacatcattgcaaacataggaaaatagtagatgaagatgcaagatcctaaaatgtgtattttgggcagtttgtgacagatcaagtcacatttctgacagagtgagaattaacccaaagcaaaatcaagatatcatttaaatgtaaaatggaatgatagacacaattgaataggacaaggagataatgtgaaaataacagagaggcaaaggacaaagaataaaaattaaaagaaggggactcactccagaaccgaaacaagataccccactaattctcctgtctgcagacatcaccaatattctggtaaataaaattaatgataattaccagaatgacactatagttatcaatgaagagtgtttgtagcttgtcatacgtgtgtgtgaatgttcaaggggatgtttagtaaacggtaaatagtgtgggttcagttctgctctgctaatcctatatgccataattacaaggtctcaaataagtgcaaacccttcaattatcaggaagagatatctgagccaagtggaaccaactgacagtagcaatcaaaattctatcgcccacaagggtgtgggggaaagaagtactttcaaaactttagtggcattataaactggctaaaaatatatatacttctgggaggtaattttgcatacttgcatatgcaaatattcctgtaaaaatgtgcctaaaatttattcctctactcttctccatccacctctgtaatacaacttctgggagtgcagtctacagaagtaatacaaagatcctgggaaaacaatgttattttgctcataggtgtttatgaccacataatgttttatggtaaaaaataaaaaacaacatacataattattgtgggtatagtttaggatttcaagatgctttttttcatttttattaaacttggtgtgtagacatataatttacacagagttttatacattttaaaaacgtaaatttttagaaatgtatacagtcatgtaaccattgtcatcaaggtatgtaacacttgcctggagtcccagctactgggaagagtgaggcaggaggagcacgtgagcccgggagttccaggctgcagtgcactgtaatcatgcctgtgaatagccactgcactccagcctggacaacataatgagactttatttctaaattattttttaatttaagaaaagatatataaaacttgcatcatctcgaaatttccttcaaatagtcaatactcacttcctgccccagggaatccgctggtatagttatttccctatggttttgcattttctaggtcactatataaatgaaatcatacagtacacaaacttttgtgtatgccttttttcacctagcatgatgcatatgagatttatccatgttgttattgggtaatattctactgtatggatgcaacaaaatttgtttatctattaacgattcattttattttgatataattattgattgtcagtgcataattattagttatctaaattatagatttgaaagatagtactgagaggtcttgtatacccttcaccaaggttccttctatggttccaccttatacaactatcatacgatatcaaaatcaggaattgacagaggtacagtgtgtgggggtggggggacaggcatgggcatgcacaaatttgcatgggtgtgcgtgtgtagttctatgtcattttatcacttgtgtagatttctgtaagtgcttctgcaagatacagaagtattacctcccacaaagattattatactactcctttatagttacacacccccatgcttatttccgtttgctttctcccaacaataatgtaattattttagacatttcctgctttgatatacttttttaaccccattagacagtgttatattttttttcttcaatcatcaaacatgatctagaaatatcaagagaagaaagtcttcagtatttgctggtatttttactctttctgttgttcttccttccttcctgatgacccaagacttcttttgtcatttactttctttttagaggaattctttctgagcacctacctcccttgctagcaacatattcccttagttttacttcatcggagaatatctttattacaccttcatcctagaaggatattgtctctggatatagactaattttggaaagacatagttcttgtctttcagcacttaaaaaatatgccattttcttttggcctccatggtttctgatgagaagtgtgttgtcatttgtatagttttttctctgtaaataaaatgttgtttctaattcactgatttctttttttttttttttttttttttttttttgagacggagtctcgctgtcgcccaggctggagtgcagtggcgcaatctcggctcactgcaggctccgccccctggggttcacgccattctcctgcctcagcctccggagtagctgggactacagacgcccgccacctcgcccggctaattttttttttttgtatttttagtagagacggggtttcaccgtgttagccaggatggtctcgatctcctgacctcgtgatccgcccgccttggcctcccaaagtgctgggattacaggcgtgagccaccgcgcccggccctaattcactgatttctagaatttttgtctttagtttttaaatgttttgctatggtgtgtcttggctatctcttatatcttgtactattgtactttggatttctttgggcttatcgtgttcagatttcttgggtttatcatgtttgaggttcactcagtatcttgaatctgtaggtttatgtgttttgtcaaattcaagaaatgcagcaattatttctttaaagacatttcagctatgccttctttctcttcttctgggaattcaacaatgttaatattcagtcttttgtattagtcccaaagctctctgaggctctgttcaattcttttccaattttttttctgttattcagatttgaaaattctccattattttgtcttctgtttcactgatattttttactgtgtccttccactttgttattgagactatctaatgagttgtttatttcagtttattgtatttttcagctctaaaatttttattcagttctttatatcttctttgccaataatttctacttttttctctttttttccaaacatgttcataatttctcactgaggcatttttgtaatggctgctttaaaatcattgccagacaattctagaatctctgtcatcaaggtaatggtgttctttaattatattttcttattcaaaatttctgatttcttatataataagtgatttttttaatggaatcctagacatttggattatgaaactctagatttcctttaaagtccttgttttagagggcttcctctgataccaagccagagggaaaagaatggcactatgttgacactatcaggcgaaggtggatgtccagatactccactcagcctccgctgagactcagaaagggggaggattcctcatgactgctgggcagaagtgggaattcaggcccctgccaggcctctgctggtaccactctggctggtagtggggtggatggtggtagggaggtgaggggtgtgggggagttggactccctgctgaccatcgaggatgaaattctcaaggtcctactttaccttttctgatgccacccaggcaagggggttgggcacctccttacatcttggtgagggtgaaagtcaaagcttcctgcacagccctggctgataagatggaatgggctactgtttttacaatggtgtttggtagttgatgtctgaaaatttttttttcttgctaggctgccctttcctggtcctctggctgtaagcaatcttgtcttgggactcttttcacttgcattcattgacacttccaggttgccaactcctcaagaggccagtcctgggatagatgagaccaaaagaaaacccaggaatcccactgtcatgtcatactctgagtcctgaggcctccaacaagttgccttcttttctccacctttcaatgtcttctcctgcttatattatacataatatccaaagtttttagctttacttatccaaaagaatgggaaaaaatatccatccattacatttcaaaagatgtttataagacgatgttggagcacagaaaaagaaagttataatattaagggaagaaaaatgatataaaatgttctgcatactacatgcaaaatcgcatctctactaaaaatacaaataattagctgggcatggtggtgcacgtctgtaatcctagctactcgggaggctaagagatgagaattgcttgaacctgggaggtagaggttgcagtgagccaagataatgccactgcactccagcctgggcgacagacacgtggtctaaaaaaaaaaaaaaaaaaaaaaaaaatctgcaaactgtggttactactatgcatgtattttttaaatcacagatatgcaagaaaaaacactgaaagaaaatatgacagatgttaatatgcactgagttagtgaagcagaaagagggataaagcaattctcttctatttcagtgttctatatgatagcaagattacattaaacatataaattagattaacaaaaagtattcagccactcagacaagaaaagctcttaaaaatgagacctgcaaagagatccatttcaggatggctatgctgctcattcataaaactacatcgtaaacttcacagtttatgaagtatataaaggacaggcattggggttgctttgttgaacaaatctagcagatatttgaatgagaagagtaatatagtcagtagaaaaaaagtgcaagaaataagtagagaaagaagggatattttctgctgaagcatgtattctctggcacaagcccacaataaattgaaattgacaccaacagttggctcaaaaataatcaactacaaatatgctcaacacataagcattctcttggacagaaccacaaagcatggtctgcattgttcctaacaactctttagaagtcaccagatgcagtttaagctacaataacatagtgaggtacaagttaattacatagttaccagaaagtcacagacttttttttcagtaataatgtagtaaataaatacatgctcactccatgggaaatggtggcaattattaagagcacacattcacaccatcatattgcttactgataactgtgcagttaaccaatggcagtgtgctaaaatggatatctgtgtttccctgagttttgcatgctacatgcgatgcatgtgaaaaccaagcatagggaatttcaagtatgaacttcagcgtgtgagtgttgtttgtggtccaatctccgtccccaaacatccccagaataaggcttctgctttttaacaatgtatatctattttaaccaattgtctagcgtataattaatgctctataaactctttgttaaatgcattcacagaaggtaacaaaagatttttgtgacacgagtaaaccaaaaggaacaaataaacttgaattactttatgtttgtgttggtgtttcagaaaagagctttggctttgaattcagaagttcctaatctgaataccaggtctaccaattattaattaaggaatatcaaatgaattacttgcagtatttgaatttcagatttctcaattataacaaggatgtaaagaggtttattatgtggctcaaataagaaaatgcatgtaaaaacacttgtaaaccaaacaagtactatacacacaggaaacaatgttattatggggctactatttaaacagtagcaaattcaggcctatcttcaaagaattatacgttatctaaggacctctcactgatagtaagaaagaggtggtaagagagtcagcacaattattattcataagggcaagggaatggcctaagaggaatccataatgagtgatctgcagtgtaaataatccgcaaattttggacacaaaggctcaaatctagaaccaaatctatggcaggaagtttctaaaaatataaacgctgtgggatttttgtgaagttacgtacccctatgacatataaatgagctcaaataatttatttttctcatttcaattgactcatatggcatgaataacgcactctccagtaataaggatagaggaaggataaacaactgtggaaatttattgcctccaagccaaaactgtgcatctctccaaagctctgctttgtactatcagaaataactctggttcttaggttaatggcgttcaggaaaaacacatcacatgtagaacagcttttacaagctagaaaagaagtcaacaactagatttttcttatttattacaattcatcaatagaataaaacctttctattcaatatgaatggattcaaagttggttgtttaattggaaaatttgttgcaatgggttaacatctatttagctgaaatatatgtaaatgtttatgtcatcacaaatcttttcttttaaggctcagatcttctctttgatgataggtttggtcattgacattcaaatcatgttacttctgtaagccataactcctggtttttcactggaggggagtgataacttaaaacacttggaaagaaatctgactaagaccctagtagattcctatgaggttttcctcgaacttttacagttgtcttcctcacacctaattcaacattaattttgttagtaagttgtctttatcaagactgtgcggagcatttatcttatacttcatcgtctctccttttgcactcatatttcatcagtttgtataataattaagtgctataactacaagatatagtacagctgagacaaacaaatgtatgtacaaataaaaccaaaatacagaataagtcctgggtccctacttttccttttctgacaaacacagacattcagaaaaagaagagagcatttcttaaaccaaggtaaactgaagcgaatttttaaagttctttccatttccactaccctctgcaaaaatgtttgctatatgcttattgtcaccatcaaagatgaagtcactctctctctcccctgaaaaatacagaattttattttgtttacctgaaagctgtgtgatatgacttttaattgaaagtatttattgtctataataagatatgtgttacattggtagctggtctttttgtaagtaaacttttcttattttaaaacagcttcatatttgcagaaaaatctcaacaacagtacagaatactcatataccccccatcaggtttcccttatagttaacagttgctggctttttgctgtaactgtaaagcatttaatctggaacaaaataatctcccattttatagaagtcatcaaaatgtacattctttcttttgtaaagttattatgccatttctgttcctcactgctaatccaaaactacagctaccaaaggcatgtacacttttattgtgttgaccacccaggaacccttccttcaaatggcacacaagcacctaatttccagtttggggaacaactccaccccaactcacagtttttggcattcaggtggggtgattccaggggtagacatggggctcaggcctggccaatcagagcacccctcactccagccacagtaatcaacgagtggctgggggagattgttgccaccttgtgggagcagccttggattatctcagtttacacctattgtcctgagaggatcattaatggattttcctttcaccttcaaaagccaaaaatgatacagtccctccagtgaaagtcctgagctattctatgcatgactttagctgcctccataattatatgaaccaataaataccatagaagaaaggggagaatattggcttaaagtcatttgacaagcaaagagtgtcacttgccctgttcctcatcacaagttcatggttgcaatcaccaaatctttctatttggccacttaaagttcatacacgcataatctgcactggcaatactggaacatttccttagaagaagcacatgcaaagacctggaagcaagagaggggagaatatgtttccaaaatgaaagggagatcaagaaggagagagatcaagtgcagagggaggtgagtgtgggagggaagatatcaggcagggagggtaagcagggggccatgttgcgcaggctgcgtagaagcttgtgtgttattctaaggacaataaggaaccaggaaaggattcaagacagaaggagggtcaagaccatatgctcattttggaacagtctctctgaatgcttagagagagtgaaaggcagatctgaagacaggaagctgcctcaggaagcaatgatcttgagttggggctatgatagtggcaagggtaagaaatgtatgtattaaagatatagccaggcaattctctcgggtcaaatttggagtctcattaacggaaattcctgtctaaccctggtctcctttccctttgcagaccaaaccattagggcccagaatacagccctgcacaaataaatacttgttcaattaatgagtctcaatatatttgttcaattaatgagtctcaatagtttgatagttgaatacaattagagatgcaagccacctccaaattctctagcaaagaaattttgtcttggttcctaggttttacgcattcatgggggaagtaatcatgcattatctacctcaatatggcagcctcaattgcttgagcaaaagctgaagtcaaacctctaagattttcaaatactttgttaagtgtaactattcatattcttttgccctttaaacagtagagaatcagtaaagtattttcttggttccgttgatattagatagaactattgactttcctcctcttttatggcaccataaaacatgttgtactgaaataaaggtttactttgcaactgagaattcataggcaaggcttcctgctgactccacagaacccaggacaagggtgtcactgtttttgttgatggaggtattcttagaaccaattaactactctttccagaggaacctttggatcataattagctttatgtgtgtgtgcacgcacacatgttctggagaaaagagagaaagtgtactacatataaatgagtaattaggtttccgctaaattaaaaattttcccaagtcatggtctgcacttagatgatctgtttctattctgctaatttctgctcagagcaatcactgcccatgaaaccatcacgttttcttattccacagaggtcatagaagttcttttcttctaatggagagagaaacccttgcctattttcccctgtgcctgcaaaggtcagagagatgatgaagtaatgctccaaaaagatgtttagccaaaggaactttagctcaaggctttgacttttaccccttagactaaaaggccacaattttgagtttcagtgtcatgagatcatgaaagaggaagggacctctgtgttcagctaggcagagaggtaacaagaaaaagagatgtgctctagaattaggcttgagttctgtcgggggcacctcctggctgtgaggccttgggaaagatgctctgtctcatttgagcctcattttccacatctgtaaattgggggcagcaaatactgagggtgacatcatcttcactgcattgtagtgagggtcacatgagatagtggcaagaaaatgcacctgtgaactgtaaataactaaaggaatgcatattgttttttgctatctagtttgcccctttttccaaaatggaaacagaggtgcaggacttacccagagcagcagcctggtgaccatctagagtcccagctcccaattcagagcaccttcacctctgcacatgaccttccagttattgacactcctccagcagggctatgtttacctaatgtgtcaaactcaatcctgaggacagccactctgaccagtagtacagcagttaacatttagatgggaaatcttagtgtgtttggacttatcatatcttagtttaaaccaaataattcaaccaaagcataagagtattcctttttctgagccatctcattctcagaatcacaattattgatgtcacccaaagtgaacacctagctctaatttatctgaggccttccctttttgaacacggaaagttcctcatgccaggaacttcctcagtcccaagaaaactgaggcagtcatccatcccaaatgtccatatttctctgaatgtctacaatatgccaggcactgttctgagctctttatttacaatgttctacttattcatttggaaatatagatgaggtagggttatttccagtttatgaggtgaggaaactcagttccgagtgatccaataacttgcccaagtcacacagccaatgtgcattggagccaggacccatggcattgtgaatccagaactgtgtcatgtaacactgactccccgaatgccctgaacattctcaggaattgtgggtgggtggtgtaaactgcttcacaccagcttattttatagtctacctgccagttgtaatggttctgcattgattggaaagtggttctagtattcaaacttgggagtgtgatagtgaaaagaccactaagaaaatgcatataaagccctcaattcaagttcctaccacattgtttcttgactttacatcttgaagtctttttttccttatcatatgaaatgaaaataataaaacctacatcaaagtaataccttgagactcaaagtgtttagaaaacattttgtaagctgagaaacccaatatattagcaaagtggggcttaatttatttacattaggttaattatgttattgaggatttatatggtgtcactgtacaagcttaatggctctgttagcctctaatttttttggtttatttcccaaaatttactttcacaaccagtatcttccagacaccgtatagcagacatctgtggttgcctgcacagcaggaattcttccatttctcttaatgagatcctgatttccacgtgggaacatcatcctgtccccatccttattctcaaacatgagctttagccaatcagcacatgaaacaatcagtgtcagtgagacatttgtgagaacttctgcgaaacacaagttctcgtcatcttccatgggcaaatttatcttccccactggatgtgaacaataatagttaaagccactaaagctatcaacagtagacttaaaaagagttttgagtgagggagagaagacgaatcctcacttcatgaaagcagaattaaaaccagaaagagaaatggattttttttatatcaatttagccttaaatcaagtcacatacaaattccagctctgcactttcaagactgagtgagcttgggtgtggccattaacttctctgagcttttgtttcctcatctgtaaaatagggatcaatcacttactccttatagtgccgtggtgagtgttgaactggataacaattgtcaagttgcctaccacaaggcctggcaaataagtgctcagtgagtgagggctttccctcgctgccctgcccctagtggggaagactgggcagtgactatataaaaaatgatttgaaaataagattcttgtttggagtttaataagactccaagaactttgctcatgttactgtgtgtgatacaataaagggaaaggaggctaaattatttcttattgtctcattttcatatctgtttacataattcaatttgcattttaatttgcacattaattcactttccaagatgaaccctggaccaaatcctgatgcagtattttttgtgtgtgtgcctgtgtatgggatataaggtatggctttgggaagaggacaaccatgaccctgataaacaactggctagaagacacaattcctccagttccagccatccttaacctcctcattcccagtctctttgaccatatactaaagctgtgctcactcagtctaggattgtcccatattaacataaatctgaaagagagaacaatctttattattagaggagagtaggtcttctctggctgttcagctgtatcttggaaacccaaagatgcagctggccactcttcaacaacagcagcagataaggaagtaacatgtctgctccatctgaacaccatccaaaaggaaatcctctccaagcctacaggaaactccaagactacacctggcaagagaacacagggaataagaagcggctaggtttaaaggcaggagcatagaaatcaagaattttcagccacctctgcttcaactatgtatttcccactctgggaaccagggttcccacctgtaaaatgggcagtcagaaataatgaagagtaagaaacaatctcaacatcaggtcagctacatccagcacaatcctggagtgtgagcacatcctagggtatgtgagcacataccctagacctataggataatggatggagtgaaccctgcaggagtacaataagtacgccagtgctccttcaaaaacttccttccatttcacaggattcttttcttcccagcaaaatccttatcatctctgaggcccagctcaaatgctgtctcttctgtgatgtttttgcaacactcattgcccaagtaatcccagttattaaagctcttaaccccacaatgccctgtccacagactctgaaagatgctgatgcattgttgtgtcccatgtctgtttccccagcaggttgtgagttctcagttgaattcagtttcttgttgcagagtctttatcaaaccacagaagaatcaaagttgaacaacatggagtatctacaccggagcagcccacagttcagggatggacacagaacaagagagattcattacagacataaagcacagagatgttggggttttctctgttgggaagaataagaggtccagaaaagcttcccaaagtgatggcacctcaagggtcaggacctcaccttattaatctccatgacccagcatctactacagcatctgtcacaactgggctctgagaatgttggctaaataaatgaatgaatgatatcaatacacagggtttttccccattttctgaatattctggactaggggatatctcagaacagtacttagcacctagtgtgtgctcaataaattcttgttaaaccactaaaaattgctggacagctgaactgaaaattactcacagccccattcaactgcatcagccatgaaaatcaactcagaatttgcaaatctatgctggcatttagcacttaagatgtaaatacagagtgtcagccatgtggctaagatcagctttaattcagtgttcatctctgaaattcattaatgattaaatacttttttcctttgctctctatgggagttgaaacaagtatcatgtatccaaagaccagggttcagtttggcccaacattaattcacttaatgtttcaacaaaaatttattgaccatctactaagtgctgagtgctagaatccattgactacctactaatgaagtgctagattttaacacagggacatctgtggtaaaacagtaaattctctaacctcatctagaggggttgaaggttctgcctttgcctaccttctatagtcagagactactggtatttcaatccataagtattaactgaaagtcactctagttctctgcacatgtgaagcagagcatattattattttgtccttgttgctctatctaaatgtcattccctcttctccatcccatcacttattttgtccttggaattccttctggatttcctcaagattatatagaagctccatgaaggcaggacactgtctgactcattggctcctgagtcccttgaacgtagtgctgagcttggcatatagcaagggctcaataaatgtttattgaatgaatatatgacatgatgaatgattagatgaaaacgtctccttttccaggaagttttccctgtttctaaaaaggagttaagggcctctgctgagggctccccaagtctctcctctgggtccagcagagcacattctccttctccattttctcctgtctccactgctcaatggagagttcctctaaggcacaggccatgagtgtttcatctctaatttcctgactctagcagagggatgttcacaaaggatgtgctcagataataaatattgattaaactcaacagacctaaacgaagggaatctctaaactcctgggtaactcactgcagattggcccttgatcggtttctagggatccactctatcccctgaaaactccggtggtactgaagagcctcttaaagttaaaaagcatcagtgggatggaggtgggatttatgttgatcatcagaggccaaaagtccagtcacagctgtgggaatgaggaaaagagtgaatactattcgtatttcttaccattaaaactaaaaatcatattctgatactgtacacggaagaatcaagtgcattctccagcaggcaattgacactggcctgcttattggaattgtgaaagaataagcaaccacaaaggcaagaatacacaagtactgttctgcttatcccagagaggtgattcatgggctcttcctgccatctggtttcctggcaggaatggtagaggcaaatctgaggtgggaccacttgctgcttaggatagcaatgtggtaagaagcatcaccaacctgccatcatcaccaatcagacaacttggggctctcccctcttgatagcgctgccctcaggctgctctgtcctgacggtaattttggtcatggggaaaaggcgccaattttacccttactttctcccccataatggtacctgatggccctcataattgtaaaagcacacaatcatagcagctattaacttgctgacacatccttgagttactcttctaaaatatatccctaagtggattgcagaagtctctgggtgaccgtaggatcagaccatccaatgcaagacatcaccagtccattgctgtcactgaaacctggctttgttgggatggcattggtctgcagcaaccttcccggcactggttcctcagcccactggagccaaggatttctggtgggaacatctggtaaaccataggatctttctgttctccacattacccagacatgcatgcattaggggagaaaacataaacatttatactctcaatctgctccacccctcaaaaacggtataatgcctaaaacaggtctggtttctatcggggatagttgggccatctctctgtattccacttccctcatatattaaagtaagaatacatacttccatttaaagttaaaaagaagaaggatcagcttcttttgagtatgtaaagtctcagtggcatcaaccaataagtggagactgttaaactctccagtggtggaataatgcggacaaccttgtgagtttacatgtttgtgcatgcttatcatgcgctagagagtgtgctaagcactttacaagtcttattgcttctaattttcataacaaacctaggagacacatattattaccatctccattttagaggtgaggacacaggctcagagataaagtgatatggcccaaatccctatggctagttaaatagtggtgcctgggtttgaatccaagtggcctaagttcaaagtccaggctcttaaccaatactctgggttagggtaagaagaaaattggataatgtatgaatcagagatattccagattaaaggaagcttgaggagctcctccccaatgttttgatgttgcaggtggggaagtttttgaaattggaagctgcttaaggcttaaattgttatgagccaacacttggcaagaacgagttgcccaagttctttgcaattctgatggctaggcccatatactctagcagaacattttgtacatgattgttgctcaagtaatattatttgaagaaagaatgacagtttgactcaaaatgagaagatcttgactcatacttcaccatcaaaactgattccttttctgtggccatttctttatctgtaaaaagggcatagtgctttctgcttaactttaagacaccaagataaaaggttacataaacccactgaggcatattcctacaatgcacatttatacatccttagtggcattctgatggctgataaaagtaagacttactgaaaataaaaacaagaaagaaagaataaatcaaaataaattttcatatttttgccagactgaaaactcccttagaataaggatggtgtttggattggtcgccactgtatctgtaatgccaagtagttatcactgtttgtatacatttggagaataaaggaatgcatcaccaagaatgtttaatacaatgcaaaaggaattttgagaaaaaggtaggtgggaaaatgtaggatacaaatttgcacatatggtataaacccagctccataaaaaagcaagaaatacgtaggagagaaaaagaatttaagcccagaaggaaatacacaaaacacagagtggtttgcctctggataatagagtaatgaggaaatcatttttctgccccattcagtttcttctgaattctttaaattttccataatgatcagttgttaatggataatcaggaaaaaatgaaaaataaaactattcacagagtccagcttagaaacccaagtcctagcataaggaggtcactgagtctgagcagcttgggtgtggggatctcggctgtgagctaccccactggacaccattagagcagacgtttagccctgagtcatattccaaagccatattatacacttgaacttgccttccccaaccctacagctgcacagcagacatgctcaaagtcccatatgcttctttagtgcagattattcaagaaacacaggctgggggaaatggcattgtcaggaatattgcaagacaggcaagacttgcaggtgcacagcagcagaaacccacagccatggttattcaagtgaagctggaatctaaagggatgaacagacctagaagctccttgtgcggtcactttgtctgtgtctccatagccagccttctcaattagttgcgacttataaataagcatgtttctgaaatctccaacacatttcctatgggaccaaagaagataaagagatggggccgagtgtggatgagtggagaatacagatatgctcaggccgggcatttcatatggcttgcagagattttactgagtgatggaaggttgcaggccccatcagtccatcaggggatgttcattttgaagtgaagatctggacccttctgctccacgtggcccgctctggtttatggctctgtctctggttgtctattaacgtgagttagtgccagtactttatagtctaaacctttgcaacagaaaacagccattctttgagctcagcgagcccagcaagagcaacaatgtatggaacgaggagcgtcatttctctggacacttactttctgccccttgccctaatgtacaactacagtcttctaagcacaatacttctttttagcaaggctttaaaatacagttctgcctctctctatttctattctcactactcctgttcaagggcctagtctccctcacctctctcctgcactgctggcttctacccttgccccctctcttccattctccactggtagccagagtgagcttacagaaacagaattgagatcacacatcactcccctgcttaaaataacttagaactctccacattggtatgcaaagggctgttggacttgagcttccttcctgacacccccttgagctacttgtctccttttctatgttctagccatgctgtttgcaaacctacctagcttgttcctaccttgggaccctggcactgacaactctgtctaccaaaaaggctccccacctgagtgtaaattagttcaaccattgtggaagacagtgtggcaactcctcaaggatctagaaccagaaataccatttgacccagcaatcccattacggggtatatacccaaacgattataaatcattctactataaagacacatgcacacgtatgaaacttgcagcactgttcactataacaaagacttggaaccagcccaagtgcccatccatgatagactggataaagaaaatgtgacacatatacatcatggaatactatgcagccataaaaaaggatgagttcatgtccttttcagggacatggatgaagctggaaaccatcattctcagcaaaccaacacaggaacagaaaatcaaacaccgcatgttctcattcataagtgggagctgagcaatgagaacactggacacagggaggggaatatcacacaccagggcctgttgggggtggggggttagggaagggatagcattaggagaaatacctaatgtagatgacgggttgatgggtgcagcaaaccaccatgtcacacgtatacctatgtaacaaacctacacactctgcacatgtataccagaatttaaagtataataaattttttttaaaaaaggctccccattctcacttacaatcttcttttagtttgttcttgataagctttcagctcttgaccacaaataggctctccagggtccatctagttcaattctctgtttaagatttattcctaagaaggaggaagggagtggggaaagggctgaaaaactatctactggttactatggttagtaacttggtgacagggtcaatcatacccaaaacctcagcatcacacaatataccaatataacaaacttgcacatatacgcccaaactcaaaataaaaatttaaatttaaattttaaaaaatatttcttaagatatttattcctaactttgaagtatattgttctttacagtctgtttccctctataagaaagcaaaacccataagagactaaggatcttgacaatttaaagctgtatccccagtacctaggacgttggcaatatcaattcgtatgtttttaatgcattcctgaatgaacgaataaaacaaattcaagcctaaatggaacccaaaatcacagaaatgctgttcttcagtacattactaagtgcagtgcctccttgacccgtctaccctaaatcatcaaaggaaaaagaaaaccttcaagaagtgattccgaatcctagtttcaccatttactccatgattctagacaagtcttaaattctctgcacctcagttttctcttctaaaatagaagatgtaagagaaataaaaacagctgtacctagagttgtgatgcctattcaatgagtgagtatatgttgggcactttgaactgtatctggcacatgcattaccatgaggatattctccccatgttgacagcattgtgtaataaaaaagctcttagctctgccgctggaaataggcaggagggggcccagcagggagcaagtctgaaagcagggagaccctgtaaggagattgatccccccacagctgactggtaatgaggctgggccaggggagaggcagtgcaagcagagatgagctgataaattaacagagcaatgcagaagtagaattaataggatttgtctattgttggagccattggagggaggagtcaagagcaggaagctgaggatgcagacctggccacccgcgatagagatgagcagctgtctactcacatccactcataagccaacccaggagatgctcagggcacaaatcacatacaacctggaacctgccttgaggacgtgggtgcaaagaggggaaccagcagagacaaaaaaaataagtgatgagggtcaccctgggggtacgaacagaggacaatgtggtcacagaatgggatacgatttcttcaagtataggagatttggataggcatcacagaaaaagtgacagcccgcaacttttttattgcactccttacagcatacccgaaagcattggtgaggacacaaaaactacagataagaatcagattctaaaaagacaattctcttttccattcctgtcctctcccctgcaacttcccaatccctcacctctaattaacccgcccaccccttcactagcttctgatttcaggcaacgtccagtacttgttccacctttctctctgaccagccatcaagaagatcttgtatgtttctcctacacacccctgcccctggacccaggaattcttccatttttccatatttgggctatattaagtaataagcccacatgctttctgttgagaaaatacaaaaagatgtttccctctgtcataaagaaaaagaggtaacccagggaacattttgtccctctagttatcttcccacaggcccatcaagaatcaggcagtaggtgaaaaagaaacacagagaacctaggaacacaataggaagaccaccatgggcccttagggagtcagcgaaggcttatgatgcaaaaagaaggtcccaggtaccttaaaaactccacttccctctctaggatccccaagagagcttgacagcgtccctctatgcagatgttcataaatcaggcatatgtaactctgcggtttcctgcacataattgatcacagttgagctgctcagacattaaatccaaaggacatcagagaaggacgagttcagtaaagaacactgagaaagaagtggaccctgagcatagatcttggcatacatgcgtgggaaatggcctctcaaggggtcattatccattcaattacacacacgttaatttggaaagagaaagttcctgccttgagtaaattgctgtctgttagggaaagtgaaaatccactaggggtaacaaataacaaatttaaatgccttctgggtccagcagataccatcaatacctatcatgaccaaggaggtgggtggcttgtgaaaaaccagagagtccagggccacctgaaacaccctcaatttcagaaacattttacatttcatgactagcagataaatacccctggggtagtgaattttcaaaatctcacacaggtctccttagagcagagtttctcatctccagcaatattgacatttggagtcagataattatttttgggttggggggtgggcactgatatgttcattgtaggatgtttagcaagatctctggactctgcacactagataccagtagcacccccatagtggtgacaattaactgtgtccccagacattgccaaatgtatcctggggagcaaaatcatctcctattctcacctcctgagaaagaagtgcaggatatcacaatagcagagggcaatggaagatgacagtcccatgctagaagctgctttaccaacacagtcagctgctatctccacaacaggcgggtgaggaaggattcatgaccctcaatgaaatgaacaaatgcaagcaaagccaagttgccattgaatgtggcagttattgtttatttattttattatttattttatttatttatattttaatttctctctctcttttttcttttttcttttttttttttttttttagagagagattgggtctcactgtgttgcccaggctggtctcaaatgtctggcttcaagcaatcctctcaccttagactcccaaagtgcactccgccctgccagagttactatttgaatccagacattctgactctgaggctgcgttttaaccagcctgacatcacgcctcaagcaggggatttttcaaaggacaggatgatggagctgaggctcaagagacagtcagccttgacctctgtgtgtggagcatccctccagcgattaccctgtccatggtgtagaagatgggctggcgagaggccacagatgtccggaggctgctgcagttgtattgatgataaatgacaagggtctgcactttaagcagtgggagtagggatctagaagatactaaaactatttaggctgggggcaatgaatcacgcctgtaatcccagccctttgagaggccaaggcaggcagataatttgaggccaggagttcgaaaccagcctggcccatatggtgaaaccccatctctactaaaaatacaaaaattagccgggcgtggtggcaggtacctgtaatcccagatactcaaaagactgaggcgggagaatctctggaacctgggaggcggaggttgcagtgagccaagaccaagatcatgccaccatgctccagcttaggcaacagagtgagacactgtctttaaaagaaaaaaaacaaaaattaaagacaaaattgacaggattcatgattgattgaactagggagtttttaaaaattctagaatattccacaattagtcataatacttaatatcaactggtttcacaaaccaactaactatcacagcagcttaacaataagttttatttctcacccatgttggtccaattgcgtgtttggccagcagtcttcaaagaagtgactcagggattcaaaatccctgcatcttgtggcatcggcctactctaggtcaggggtcatcaaactactgcctgtggaccaaatccagcactgcttgtgggccaaatccagccactgcctgtctttgtaaacacattttttatagggacacagtcatgctcatttgtttacgtattatctatgggggtttcacattacaacagcagagttgaataattgcaacagatgcagagactgtatcatccataaggtctacaacatttactatctggccgtttgctggaacagtttgctgacccttgccctcagctctccttggagtctctcactggatttcatgtttctattggccaatgagaaaaaagagaaagtaagagggctcacacgagaggtttatcaccagctggacctgacgcatgcccttcctgtggccacacactgttcactggtcaagactgagactcacggccccactcactgcaggaaagctgggaagcatgcaggcaatagtggataaggctgagaacccacagtctacgccacacatccatccatggctctggaggaacttccttttgctgattatcatcctttggtttccttagaatggaaaactcacatattcttgcaaagtgctataaacaaccatatctcactgagatgcattaatgaccaacataaactactgatccctgagtttaaacaaatgtattatgttagttgataatcttagaataaacatgacctcaattaataaattttctcagagctatatactctctcttagttcaagtaagcgtacaaatggaaattcagtttaactggataatacagagtgtctactttgtgctcagcactgtgccaagcagaaagaaaaataaagacctaccggatacctgccaggacctcatcctatgcgtgaaatacataaatatagaaataacaaaagaagtattatgtctaagttcaaaaatatgaagttttatcttcttatcagctcagagaaagaatatatcataaggactgggatagttgagagtcacttcctggagtgggggaaaaagccattataatttacaacagtgttcaataaaaattaaaaagagtgaaagttgatcaaatgtaaaaaacactttaaaacttagaagtcattctcactatgtgatcttctttaatattcatcaaaattctgtaatttccagtgtcatcaggactagctcagtttcagtgaattccagcaagggatgtcaagtcacctgagacctggaacacacagcctgcgaggagagcagcaggcctgaaacgagggcgggatttttctttttcttttttattttctctccttaccccctctttctgatttttactccagggctctttctactaccacattgtcattaaaaataaaataatgtcatttgacagacttaaactgagataaccacagaaaactccagatctgttccaaagcaaacagcagccaggaaatcctttccatgcacagacagtaacatttctccttagctcaaggatggtgcagccaagggtaaaggaaatgaggacacaggttgaatgctgtccccgaagagtgctccttccaggagctcaggtcaaaggcagctttgagattaaaacacagctatcctgataggggaaggaagtagcactgtgagggttgtcaattttatcaagttcagtaaatgaactagacaaagaacaattgatcaagaatatgcagccctttgttggcagttctgaagaattctggcttctctctgggtcatgctcccaggtccccgtggcccatgctgtttgtcatctacactcacaggccgctgggacggtaagctcctgaatgacaaaggatatctgggtgtgccgcacatgtatgtacacagtgttctgcctacatatgcaggaggtctccatgttgtggtagagtagacacctgctgttatggcccacttgagccaagcatgtccatagggtgaactgtagcagtcaccatgacaagtctggcaagaggacttccctttgatgaggaagtcaccatggaaatgggagacaaaatgaagtcatttgccttggcccttagaaataaagttcacatccttagtgtgacatatctgtgccctgttccccattcattggggcaatctttctgtgtcaactcctgcttttcagtgtcccaccaatatgagacgctcagtacattactcaccatatacctgggcttgcttataattccacttcctgcttcctggtgtgccactcccactttctccacctggaaaacccctatccatgtgccatacttagctattaatgtcagttcatatgtgacaatttctccaaggtgtttttttagtgtcaggaagccactctttttgctttgcaattgtaactctttgtatgcattattaatatagcacatgttacattctgttgacatactctatgttcttctctgtttctccaaccagtctggatagttgaatggacaggcatgatgtctaactcttttctgttttctccagtcacctatcagagtgtctgacatgtagtagacattcaacaagtgtttgctggagatggtaaatctcaggggaaaatctggttggaaggaaactgtgaggaagtggaaggaggcaagaattgaagcttgaagcattccggccccaccactctgtgcccttgaaatcatggacacttcagcaagtatctatttcttcatttagaaagtgggagtattttgtctaccttacatattaataacaaagtcaagattaggcaataaaaagctaggaggaaatagttgattaattgtgtcaacagtgaattaataaggacatgaaaggaatttgcaacatgtacttttagcaacactgattcattgctacagagtgataagtcaagaaggaaaaaacagaagatggtatcaactggtaggctaagaggagggtctaaccttttggccaatttgctgagcaatcaattcgaatttacatccaaatggtcatttggtctcagaataatgaagaacagagaaataagaaggtagaaactcactaaatgaaatcatgactactctaactctccttatccttccagatgctgtttaatcacatcatttgttggtgtttgcatttgtttattagtatttgtattcactgagaggcccacacagctcactctcagagtctggcagctccaaggagatcacttccactgtaggtagatttgctcttaccagcatcattgccttagaaggggagagtgttccatctgccttagtcaacagtagtaatagtagtagcaatggtggtgacagaaataggtagcaatggttgtgttatggaaattcacatttattgaaatctcatcagtgaccatgtactggccaatcatttaactacatctcagttaatgttcaaaactcacctgcaagtgacttacaatcttttattcaactaatatttaatcacaccttctaggcactggggatatagcactgaacacaccagatgagatcttcagcctcatgtcaattattgcttgctggtgagagaagaaagacaacagacaaaaaaaaaaaaaaaaaagtaaccgcactagataacgcattttctttttctttattttttttttaaattatactttaagttctagggtacatgtgcaaaatgtgcaagtttgttatactttaagttctagggaacatgtgcaaaatgtgcaggtttgtttcatatgtatacatgtgccacgttggtgtgctgcactcattaacttgtcatttacattaggcatatctcctaatgctatccctccccctccccccacctcatgacaggccccggtgtgtgatattccccttcctgtgtccaagtgttctcattgttcaattcccacctatgagtgagaacatgataacgcattttctaacatgtgacagaaagtgactgaaaggtgaactctgtgttaggtaggagaaaacttattagtctcattttaccaatgaggcattagaggctcagagaaattaagtaacttctccaagatcacatagctacccacggacagagcaagtctgtctaaataggaagcaataaaatagcatacacagcagaatatagtcaagaattagatgtattatgctttaagcctttgtttcgtagcttcttaagaataggaagaaaagtcagtgttggctacattggctagaaatcttcacgaaggaagaaaaagttaagcttgtcttggagcgtggttaggatttagacaggtagaaagaaagaaaagagttgtgagcaggaagaaatgggtatttatcgaggacttattaagtggcaagaacaagacaaaaagttttagatatggtgttttagtaaatatttaaagttttttttttgtttttgtttttgtgtttttttgagacggagtctcactctgtcgcccaggctggagtgcagtggcgcagtctcggctcactgcaagctctgcctcccgggttcacaccattctcctgcctcagcctcccgagtagccgggactaccaggcggccgccaccacgtccggctaattttttgtattttttagtagagacggggtttcactgtgttagccaggatggtctcgatctcctgaccttgtcatccgcctgcctcggcctcccaaagtgctgggattacaggcgtgagccactgtgcccagccaaatatttaaagttttttaaattcaggctggttacatgacctttcgaggtgacataagatgctgggtgttgggcatgtaggtagcaactggcacgctgtatgcagggaacactaaaatggctcaggtacctgaggaagaaatttacattggggactattgagaagtataattcaatgggctagcaaaccaatgagaggcaactgaagacattgaaggagaggtggtggaagctggaagtggcataggagacaacaggaactgtagcaattttttcaacaaggaagtaaaactcagatgttggaactgaaaccatcttttaccatactctttcatcttggagtcatcactctcaaatatggctccccagagatgctcccttctcgtatgatattagaattagttgtatcacttatttgctagactgggctacagaataagaacacagactatgtcaacccctctatcctcttagaatctggcatgggatcaggcacacattgtttgatttcaactggcaaggccatggcaatcaggcagacaggttagctagaaaatggtgaaaaaatggcaccaaattagggcatcacagcaccagataaaactaagcagagattcacctgaggtggcccgaggcagcagagccggaggggcctgactctgatcctacaaaggggaactcagaatcatcactgtgaaggtgagaagagccatcaattctaaaggatgaaggaggataaactgatagaagaaaaatgagccaggacatcagaaagaaaattaaaaacaaagtggaatacagtgtgaagattgatttggggcaaaagatttgaaactaagaccatgaacaatgagattcgttaatggagtttccctttgtatgatgcctagacccagcaacagggcagttgcagtgatttaaggatgactcacagggatggatacctgttgaacacaccttaaaaaggtgaaagaaaggtaggaaggaaacgagatagatgtgagaaacatagataaggacagggaactgaggaaagggaaaaaggaaataatccatgatattttcagaaatgatttataacagggattggtaaactatgaccctgagacaaattcagtatactgtttctataaataaagctttgttaaatcacagccacacctattcatttaagtaatatctatgcctgctttcaaaccatagttgcagggttgttgcaagaaagattatctagctcacaaaacccaaaatattaactatctagcccttaacagaaaaggtttgccaccctagtctatagtaaaggagtattgcaatatggatgctaagtggctaaagataaagctgacattctatatcagggccagaattttgaatgccttgctaaggtgttagaactttctctgcaggcaataaggatccatgcaaatagcctaaaatttttctctacataagcataattcaaaaccaatcaaagaactcgacagtggcaatcaatgtggcacatgaacaataagaacactactggcatgtttaatcaaccaagctctcttctggcttcaactgcctaagacttaagaactgtatgctggtcaccagtctgccaaattagagagtcacaatgccactgtggtctttaaatttctaatgtccaaaatgggggaaataatcccacctgtgggcttattatgaacataaaatttagataatagagaaaaaaatatattaaataaataaaatattttacaaaggtctgacatcactcattcacttactcaatgaaaaaaaatgtatttagtgcctgttgtgcgcagaggaatccagagatgagggagattaaggcccatagactagaaggaaagatgggatgcaaacggcagtgccaagttcacacataaagcaaagtagggaggaaaccactcagcttgagaagaagtaggctgtcaggaaaagggtccataggaagggtttccagcaaggaagaaaagatcatgatgctgaggaaggagatgaagctgctttctatgtacaacaagtgcaaaggcctaatgtagttcaaagtgagtggcacctagaagccaactgtggatgcaaacagaaatgaagcaaaagatggagggaggatatgaaaggttttctatgctatgccaaggaacttggactttatccattggaagtagtaagcctttgaaggatttggcttccaggaaagacatggtcagaactgggtcacaaatgtctccattgatcagactgttagttgagattccagcttttcctcccctgcatgaatgaggggggcagagcttaagactggtcatgacagacctctcaatgacctttccatttcaggcaagtcaaggttaccactcatagtcatcgtcctagcagccattggggaaaagcagctggacaagagaaaagaatgacggcacatgaaacacccttgaataatccccctaaattgacccccggccctgggacatctgcctacaaaagaaaccgtgcctgcatctgtgctatgtttcacatttcccaggcccgtatcttctccaaacgcaatctggacagccaatatttatcaagcaagagaggaaacaatcaacatattcaggagaggatggaaagagcaagataatttcttgatttgggtttacacagtggatcagggtttgtgttgttctctcacctccaaaaacctcattgatatcttctccaccttagaggaaaagaggactaggaagttattgatataaaaagaattgccatgggaaggatgcccacgtgggacagtgccaaagctctctctcctgatgggaccctctgctaatggaaccacttgaccaagaaggacaattttttatttttgttcctaaaacttcagagtgtcatggaagagaaaacaggacccggttgcagtttgacatgcacagaagcccaaaaaggactcattgctgctgagaggtagtgtcatcaaaaaggaaagtatgggtcttgtaggcagataaatgtgggtctaaaactgggtcccaagccatacctcctgtgtgaccttagggcacatgctaaactttcctaagcctcattttctcatctataaaatgggtaatatattctaatgaataggtaatatattccaaatgctaagcacagtatttaatgtgtactcaatataccccattattaaaattatgcatagcttaatgctcaagatgagttcccaggccatttatttagtaaagtatgatgtgctttaaaaacaaaaataataatcctacaacatgaaagtcataatacactaaaagaaatgtttgaagaaatggcatccataaaataaaataattactatttaagattttctacagatttcttaattagcatagagtagatattcaggaaattttgttgaatgtttagataaattattgagctaattaatttaatacatgatataggcagattttaagtctataaacctgcataagacaaagcagtattagtataaagaaagcttacatagaccgacaaaactgaaaaagtacaattgccaaaggattgaaagaacaacgcagagaagaggaatttgaaattaccaataagcctttgagcaaaccaatgttcaaacaatacatagttgtataaacacaaatgcagactaaagcattattcactatcgagttgtaaaagatttttaaactaacagcatcctatgattgtttgggtgtcatgagatgaagcaattcaggcacagttagtcagaatggacatttactagcctttctggaaagccacttttcagcactactacaagccttgaatgatctgcgtagtttgactcaataattctacccctaaaagcctccaatatagaaataggagagccatagacaaggatttatctatagaaatgtttgtcacactattatttatatagtatcaaaagaagaataaaaggagaaggaggaggaaagaggagaggaagaaggaaaacgaagaagaagaggaaagaagactaaatgtttagcaagagaagaatatttaataacataaggcttgctgtttatatacttttaaataaaagtagtgaataaataatattaaatatcagtatgatcataatttagtgaataaatattagatagatgtagatagatacgaggacaaatccaaaaatagattaaagacagaacataaattcaacaaaatattatgtagttattttgcatagttatttgtgtaaataaaaaaaggctgcttaagagagaataaaaattgcattcttatctaacttctaaatagcaaaaaatgggaacccaggacattcagatgcttcttagcttataatgagagtatgttccaataactctatcttaagttaaaaaacatttaatacacctcacttcctgaagaccacagcttagcctagcctactttaaacatgctcagagcgcttatatttgtctacagttgaggaaaatctaccacaaagcttattgtataataaagtgttgaatgtcttatgtaatttattgaatgctgaaagtacactttctactgaatgaatatcacttatacaccatcatgaagtccaaacatctaagtcaaaccattgtgaattaggatagtgaagtaatatcatcaaccagctaagagaaaaccatgctcaatctgcagttgtatgcacaaagaggggtaacttgtgggaactagaggttgacacaatagaattaaaatatagggcagcaatagcaagggagtttggatgaaaaataatcagttaaaatattatgtatttttatattgttcaagtgtatagaaaagataatacatttaaactttgttaacatggtatgtgtgttaaaataggtaggtaactactaaaatgatagtcacacagcatataattgccaaataagtagagggagaaaaaatggaaaaaaactaaatcaatcacaatgaaggcaagaaagaaaaaaaagaaaagaaaagaaacataaaagacagacgaagtggaaagcacataaccaaatttttcaaataaatccaaatatatcagtgcctagtctgctccagctgccatagcagaatatcatagactaggtgacttaaacaacagaagtttacttctcgcaattctggaggctggaaatttgacatcagggttccagtatgaccgagctttggtgaagggactcttcctggtttgcagagagccaccttctcactgtgtgctcacatggccttccctctgtgtgtgcatggggtgagagagagagagagaaacagcaaaataaatggtactgaacaacaaaataggatggcaaacaaatcagtgcctggattttgtgacagtttggtttattgttcagaaatattcacccttttgccagttctaccatgggtgtgataactgccccacccactgaagtgacttgttttaaccaacagtatatgatatgatttggatgtttgtccctgccaagtctcatgtggaaatgtgatctccagtgatggaggtagagcctggtgggaggtgtttgggtcattcagatgaatcccttaggaatggcttgatgccttcatattctcactctgtgttgcacgcaagatccagttgtttaaaaaagtgtggcaccttccccctttctctcttgcttccattcttgctctatgataccctgcctcctcctttgccttctgccatgtgtcgaagcttcctgagtccctcaccagaagcatagctggccctgtttcatgtacagccagcagaactgtgagccaaaataaaacctcttttctttatacattaccccgtctcaggtattcctttacagcaatacaaaaacagactaacacagtataaggatagatataattggagcaaaggcttaaatgtgtttatatatataaaatggggtttggccttttatacttctgtcataatgatgagaaaaacatgttctagtctatggtctaaaaagggtgagagacacatggaacagacctgagcttaacctgtaatttggaaaaaaaacaaacagcagaatcccacctagatcagccaaacccagccaattcacacatgtgaatcagtgtgaatcagaatgagacactgagttttgtagtagttccttacacagcatattttgtggcaacagctaactgatacagagctatatttataaacctgtatcagccagccccagagagatctataaatatatgactgacagtaagtcaccaagtgtattgggtaacagctaagtgatataaagtaatatttataaacttcaatctttatgttgaaagaataacaaccaacagttaacggattagaaaaatgacaaagaatgtacacatgaaaagagaacaatgacaaaatcagaaagcaattacattctaaatcaacatccatatctctgcaaaggacttgatatacgcttatagatccaaaaagctcagcaaaccacaagctggacaaacccaaagaaatctatggcaaggttcattatagacaaacttctgaaaattaaggacaaataaaaaaattgaaaacagtgggaaaaaaatgactttttatagagaaaaaaatatgaatgactgatttctcatcagaaaccatgaaagccagaaagaagtgacgtaacacatttaaagtgctgaaaaaaaatgtcaactcaaaattctgtaaccaaaaaaaaatatttccctgcaatgagggggatatcaagacattctcagatgaaaaataacaagaatattttgtcaacagaactaccctaaaaaaatgactaaaggaatttctccaaacagcaaggacatctggaagaaagaacaacagaaagaggaaaattacaggtaaatatattttgcttcccttgagttttctaatttacatttgatagtcgaagcaacatttttaatattgtcttacgtggttctgaatgtatgtacagaaaatacttgagacaatacattataaatgaagataaaaaggaaggaatgtttttacacttcacttgaactagtaaaatttcaataccagtagactatgataagctatgtatatacaatttaacatatatagtagcaactatttttaaaagctatacaaaaagataccatcaaaaatattataggtaagtcaacatgaaattataaaccatgtttaactaacccacaagaaaaacagaaaaagaaaacagatacatgaaaatctgagaggaaaaaaaaaaaacagagaacacaatgggaagcttcattcaatgtaagggtactagaagttctagccagtgcaattaagaggaaaaaaataaataaaaaggcatatgtgttgaaaggaagaaattaaactgtctttatttgcaaatgacatgattatcagcacagataatcaagataaatatataaaaagatttctgaaactaataagttagttcagtaaggtcgtaagctataagacaaacaaaggaaaatcaattgtatttgaatgtatcgacagtaaacatatggacattaaaattaacaatacaatataatttatatttattaaaaatataaaatgcttaggcataaatctaacaaaacccccacagtacttgtaggtgaaaactataaaatactgattaaaaatgatctaaataaatggaataacatagcatgtccatggattgaaatactcaacatagtcagttctctccagattgatacacagctttaatgcaattcttataaaaatctctgcaagatttttttgtaaatatagctaaaacaatattggaaaaaaaatagtgaagtggtattccaaggcttactatatggccagagtagtccagactgtggtattggcagaggcattgtattagtccgttttcacactgctgtaaagatactacctgagaccggataatttataaataaaagaagattaattgactcacagttctgcatggctggtgaagcctcaggaaacttacaatcatggtagaaagcagggagaagcaaacaccttcttcacaaggcagcaggagagagagaggggcagggaaaggaaacactcataaaaatggatcttattaaaattaagaattttgctctctgaaagaccctgttaaggggttaaaaagataagctacagttgtaggaaatatttgcaatccacctatccaagcaacaaccaatatctagaatatataaagaactctcaaaactcaatattaaatgcaaataatacaattagaaaatggacaaagtacatgaaaagatgtttcaccaaagagggtgtgtgtttgtgtgtgtgtttgtgtgtgtgtatgtactgtatatggcaaataaacacataaaaatattcaatataattagctgtcaaagaaatccaaattaaaaccacattggcatatcactacacatccatcagaatagctaaaataaaaaatacaacactaaagtcattatcacaaagaaatacaaatttatgttctacaggaatttgtacataaatgttcatagcagctttattcacaataaccaataggtaaatggttaaatcaactgtggtacatccacaccatggaatactactcagcaatagaaaggaataaaatatcgacatacacaacaacttggatgaacttccagagaattatgctgagcaaaaacagtgactcctaaaaggctacacacggcataattctctttacataacattcttgaaatgataaaattatagaaatggagaaaaaaatcagtggttgctaggggttatggaaagggtgggggtcaggagaagggagtgtggctataaaatagcaacataagggaaacttccgtggtgaaaatgttcttatcttgattgttatcagtatcaatatcctggctgtaataatgtactatcattttgagagatgttaggattagcagaaagttagtagagaatacatgggatctctctgtattatttctcaaccccaagtaaatctacaattatttcaaaagaaaagtttaatttaaaaaagcaatacttgtacaaatattttaatgaggtatcctaatatttcacaagatacctcttgcagttttccgagaaagaatttttaatgaatctttaagaatcagactcaattgattcttatgactttaaaatggaaatcttggcttatcaaaaaaacttatacatcctcaaaaaatgtaattggtgtttacatgtgatatactaaaattaaattttttttattgaggaaattttaaagtttgggtcagaatttataaacaaaaagagttagaaagacagaaaatataaatcaatttttcccagtaaaaatcagatagaaaatataattctaaagagatatatttatagtggtattattaaatataatgcacacaataagaaaaagtgtaagccatttatggataatattgtaaaacttaatggaaagacattaaaggaaatctaaataaatggtaagctatataatattgtaagtaagacagtatcttaaagatgtgaattttccccaaatagatctataaatttaatgatattttaccaaaaatcctaacagcatgttttcatataccttaactgattctaaaatttgaaaaaaagttcaagaatggccaagatgctcctgaggatgtaaatcaaagttatgggacatccccagtaggatatcaataactgttacagagatttagggattaagccagcgtggtgctggtgcagaaattaacaaaatgacaaatggaaaaaaatagagtgcctatgaacaaacatatacccaaaatggaaactgttatttacaaaatggtcattgcagatcacaggaaaaataactttttaataaattgcaccggaataatgattatttataagtattacatcgatatttgatcccagccaaagatctatttcaagtggaatgatttgaaggttaaggagcaaactataaagctattaaaagaacataagagaatatatttgtggttttggggtgtagaagtatgtttttaaaaaaacacaaaccttaaaagaaaaaatagacaaatttcactacattgaagttaagaattttcttcatcaaaagacacaataaagaagcaaaaagcctcaagctgagtgaagacttttttaaacataatcaataaaggctttgtatctagcatctataaatatttcctacaaaccagatgtttttaaaagacagccaaatagattgggaaaaagttataaacaagcattgcacagagaaaaggacacacaaatggtccaaaaacatgtaatgcttagcctctttggtaaccagggaaatatatattgaacccacaaacagacaattaccatttcatgcatgacagactggcaaaaattttaaaggtgcacaacaccaagtgtcagttaaattgtggatcaaagaaaactataacacatggctggtgcgaaagtacattggcacagccatttgtggaatgttttggcactgagcaataaacgtgaacatgtacagtggatataccacaaaattataatatctgagttcttgaggcaaacaggcaaggtctggagctgccacagacttttctaccccaacacccctacaaacaatgtcctccatgtcctgcaggtaaaccctacagacaagcacaagaacagataacaacttctggtgaccactgcttcactcgtcaaaaggaatgaatacagctatgcacattaatatggatcaatttcaaaacacaatggcaggagaaagaagcaagtcacagaaaaacatatgtggtatgattctgttcacataaagcccaaacagacagaactaagccttatatcatttaagaaattgtacataggtgacaaacttataaagaaataataaaataaacatagagagttttacatttgcttacaatttggtcaaagaaaaatgggggccacgctgggcacggtggctcacacctgtaatcccagcactttgggaggctgaggcgggcggatcacgaggtcaggagatcgagaccatcctggctaacacggtgaaaccccgactccactaaaaataaaaattaagaaaaaaaattagccaggcgtggtggcgggcgcctgtagtcccagctactcgggaggctgaggcaggagaatggcgtgaacccgggaggcggagcttgcagtgagcctagatcgcaccactgcactccagcctgggcgacagagactccctctcaaataaatgaatattaaaaaaaaaaaatgggggccaggcacggtggctcacgcctgtaatctcagcactttgggaggccgaggcgggtggatctcctgaggtcaggagttcaagaccagcctggccaacatagtgaaaccccatctctactaaaaatacaaaaaattagccgggcgtggtggcaggcacctgtaatcccagctactcgggaggctgaggcaggagaatcgtttgaacccgggaggcggaggttgcagtgagtcgagattgcgccatttcactacagcctgggcaacaagagcaaaactctgtctcaggaaaaaaaaaaaaaaggtggggggcaaagggtagaggaaagtcggggaggggtggctgatgaggaacaaggagagggagagagtagaatagataattatgcacactggagtcaattatttgagaattaataccttaatgtcttcattactgagttctacataagctctaatcacctttgccctaggctctgggaatttcaatgtatatgttgataatgattcctcaaagcacagtgttctaaaaggaaaatgctattttggagaaataagcctgttaccaaaatccattctgcaccaagccatccaaacatcctgccccttaaaaggtggtcttaaaatgaaataacgctgaagaggtgaatcagatgaggaaatgaacttacaagcagatagggaaagggcaattctaatgtctaattcaccccatataaaccagtgtatttatccgcctcttcccatcgctttgcatttccatgatgtctatcatcatgccaccagggccgttagatgcaagatgttaaattggaagaaagctgttaaataaatggggctttagagagcctaatgaaatgtactttccatacacaacacgtcctcagagggaagaattgccagtttacaggatgatttatgtgcaccctgaagttaggtctatgccagaatttttagtactgggtaaactcatttaatcctatatttattaagcataggctaataatttctgacagttttacatgatggccatagcacagtgcatgggaaatagaagaaatgggtgctacactaagtactataattcagcaacggtgctactttgggcaaaccattgaccttagctctttccaagtataatcatgtaaaatgcctacctacagacccatgggtctgtagaagcatcaaatggcttattatatgaaaaaaatgaacaggtagcataaaagctcaggccaatttaaatgggcaatcacatatacttaaatctggagccaccaaacaaaattccaggttgcggtcctttttcctatggaaaaccaaccaacatccaaggagcaaaaactaagatttttgtaatctacccttttccaaaccaaggtcagatttgtacttaggctgaccaaaatgtttaattctgatgaggctgtatccttatcttacaaaatgggagaggataatggagggagggtacaatgatgcagatgccagtctatatttctagtgagtccaattctacaactgtcttaagaataaaacccaatacacaatacaataaaatctacaatacaagagggaaatccatgcacagaaacattcactgaagcagggcttgtaatgcaaaaagcgggtggggtgggtaagtaagccaaatgcaaagtaataaatgaactgtgaacacctattatgtgccagccaccaccttggacacttcacgtttattttctcatagggacttcacacctatcctatgagatatttatttctatccccattttgcagaggaggaaacaggttctgagatagtaactatcaagtaatttgtctaaggatacatgcatagtctaaatctgtctaattcactccactatgaattcttgtcatcattccttagagtgtagacattggggagggcttataggtgggaccacaggaaattaggtaatgtactgggtaccatctgtgtgctcatccacctccattcttgccccttctccacctgttctcagctgaagagactgacaagtgtgggctacatcagtggtctctccacatctccctcactgccaggtggccacagattggaagcaggaagacagaaaagtcagggtttttggtttagagctggctgtgtccctcaacccaaggtctgagcttccatctcgaggaggctctttctccagtgtcctgaaatcattctggcagtacttcactcattcaggcaagggggtaatacggccccactgtcctaggtcagaaaactgcattatcccctgtggcttctctacatcccaaactctcctcaattacagaatcatcatgtgccactgtactttaaaacccaagtgtgatccaaaggcaaaatgaattgaggctcctcaatgaccagcagagtgaacttcgctgggggatgaatgtggccactgattatggggctgagggtttcttgagctggtgcaatttcattcccaagatccctactccagaagctcagtcaaaacactgagactgccaacctagttcccagaaatagaggtgtctttcctgcagacctcagaataatacagatgctatggtttgctggatttaatcccttaatgttttacccagggaatggtaatagtctaatgaacatggcaggtatttgggactaagagcagaattatggtgcaagagcttacacgtagcatgggagtccaacagatgcagagtcagttccctgactcaccagctgaccttgggcaagccattcctcagtttctccagccataaaatagggataatcatagttcccaccagagatactcttcatcaggacctttgatgtcagtttccacagacaaagggctggtataattatcccaggtgcagtaatgagaaaggcagaaagccagactgttttttataggacttctcaggtagagtttccggcttctgtccatgagtcatatggacaatgggcccagcttgctcatacagtggatctgccagggagaagagtggagggctgggggatgtttttccaaactttgtaggtttgaggggtgccatggttgaataaagacaaacaggacttcagaacctgacaggtgtgaattcttatctctttcctgttgcttatttcatctatgatcttggaaaagttgcttaagctttctgagcctgagttctctaatctgctgctcgttgttgttgttgtagttgttgttttgaggtggggtctcactctgtcactccccaggttggagtgcaggggtgaaatctcggctcactgcaaccaccacatcccagactcaagtgatcctcctacgtcagtctcccaggtagttggaaccacaggtgtgcgctaccacgccccactaactttgtattttgagtagaaatggggttttgccatattgcccaggctgatctcaaactcctgagctcaagtaatccatctgcctgaagttcccaaagtgctgggattacaggcttaagccaccacgcccagcccacagcttttgaatggatagatgtgatcgtttaatcaaaatgtctaccagaatgcctggcacattgtaggtgcaaaaatgtccattctttctctttttaaaaataaaccttattttttagggaaaatttatcttcacaggaaaattgagcagaaagtacaaagagctcctgtatatcccctacccccacacattcacagcctccctcattaccaacatttcccactagagtggtgcattttgtacaattgggtctatgttgacacgtcattttcatagtttccatcagggttcattcttggcattgcacattatatgggtttgaacaaatgtataatggcacatatccaccattatagtatcaaatagagtcattttattacctcaaaaactctctgtgccctatctatttatccatccctctaccctaattcctggaaaccactgatctttttactgtctctatattttgcctatcccagaatgtaatatagttgaaattatacatcatgtagccttttcagactggtttctttcacctagtaatatgcatttaagattcttctgcgtgtttgcatggcatgatagctcatcgctttttagagtggaataatagtccactgtctggatataccacagttgacttatctgttcaccagttgaaaaacatcttggttattttcaagatttggcacttttaataaagccgctatacacatacatgtgcaagtttttgcgtagacataaattttcaactcattgggtaaatatcaaggagggcaatggctagattgtatggtaagaatcagtttagttttgtaagaaactgccaaattgtcttttaaagtggctgtaccgttttgcatccccaccagcaatgcatgagagtttgtattgctccacatctccatcagcatttgctgttgttggtgctttggattttgccattctaagagaaggtgagtaccttctctttttaggaatcccaaggatttgaagataaacctggaaaatctcagctatgacttggtgttaagcagtcacgtagagagcagcagtaatcccgaatagtaataagaccctaaccactacattttgcacagtatttctttccattgttatatatatgtgtgtgtatatatatgtgtgtatacatatatatgtgtatatgtatttgtgcatatatatgtatatatgtgtatatatgtatatatatttctgcatatattatgtgtgtgtgtgtgtgtgtgtgtgtgtgtgtgtgtatatatatatatatatttttttttttttgagatggagtctcactctgtggcccaggctagagtgcaatggtgcgatctcagctcactgcaacctctgcctccctggttcaagcgattcttctgcctcagcctcccgagtagctgggaccacaggtgcgtgccaccaagcccggctaatttttgtatttttagtagagatggggtttcaccatattggccaggatggtcttgaactcctgacctcatgatccacccgcctcagcctcccaaagtgctgggattacaggcgtgagccaccatgcccggcccattgtttaatatatcatcagctggtatttatcacactttctactcagtttgtttcaatggcaatataaaccaacacagaatctctgcccaataaaatagacacattttggccatatctagagccaagaaagtgaacatgagcttagaataacacagacacctactttccatttgtttcatcagtaaatattaatccagtaccttctggattctcaaaaggttttgacaaaaagggcaaatatttgtgcagagatgagactagtgacccttagaacaagaggaagattgggatcaggagaggctggaagcttttacatttggagaaaaccacacaagccaagctcctgagaaaagcttgttttgtgggacaggaagataaagaagaggatagcaaagactccagcttatctagttatgatccagaattggatcaaaactggcaaaaactaattggtgatattagggtccatattgctgagcaaagatagttgaagagatgaaacatctgtactatgatcaacataatttgcataaggacacctgccgacatcttaaggaacagcctttaatctcattcgttatagtgtattgcttttattagcctgtgacagatgcattttaaagcttgtttctataaagtggaaaacggagttatgtctatgcagtttaaccaaaatataggtcaatttgggttgtcaaatagccagttatttggcactcattttggttttctttcttcttatgttttgcttgtttcattttgcattttccaaaatgatgatattggagataacaaactgttaggtccttgttattctgtgcatatatgattttgtcctaagacaagatgaaataatcatatctcattttactatccagttatttggggtgtcatcttaactagcagttaggattagcatgttactcaagctcacaaagacatagctgggatgacaacatgttctttgttcagagtatttgccacattgaggactcctggcaaaaataaataacttataagaaaggtaacttattttgactttaaaataatcgatgactaaaactcatttttcctcagaccatgagagcaatttaccaagctttattaatgggcatcttcatatccttagcaagcttaattgctaattaattaaaagatgattggataaacaatggattgtactacaaaatgaagatagcaaaatttactgtcatggtgtctaatgagcattctttacctattgccctaccaatctttcagctccataatttctgaagtaaagatccccaagagccatttcctgaaaattagagttaaatcagatcaacgttaaaggacttctgggtcaaactatgttgagggccagccacaggcaatcataatttaattaaagcaagagagagaaaaaaaatcatgccaagtgaaacagcctggaagagtgacaaaagcctttgtcttaaaatcagaatacctatgctctaaacatttactactgtggaaactagtgaaagataatctaatttttctgagcttcatttttctcatctataaaatggatatgatcagttcagctgcaagtaaaagaagcccaaaagtaacagaggactaagcaagacaggagtttatttttctaacttgcaaaagatccaaaggtagacagtcaagaactcacagcagctctgctccacggaaatttcagagcctaggttccttctatgttgtttttcctccatgctatagtctaaaaagacttctcaaatcctagccctcatgcccaagttcaaaccagcaggaacaaatgtataaagaaacaggggcaaagcatctacaccagatctctgttaaggaaagtatctggaagtttccacacaacacttcatcttacatcccactggagaagctagtcatatggccacatctagctgcaagggaggtgggaaaatgtagtgttattctggactgccatgtgtccagcagaagggattttatcactaataagaagtggtgagtggatgcctggcacggtggctcatgcctgtaatccagcattttgggaggccgaggagggtggatcacgaggtcaggagatagagaccatccgggctaacacagtgaaaccccgtctctactaaaaaaattacaaaaaaattagccaggcctggtggcaggtgcctgtagtcccagctactcgggaggctgaggcaggagaatggcatgaacccgggaggcagagcttgcaatgagcagagattgcgccactgcactccagcctcggtgacagagcgagactctgtctcaaagaaaaagaaaaaaaaaagaagtgggaagtggaaatcagaaaacgcctagctgtctctaatccaagatatagctcaaagctttgttaggagagtacacggagagcatggatatgaaatagctagcagagtgtctggctgattaaaaaaaaaaagccagaaatgtttaataacttctgtctgaatcagatagacaaaaaaatagaataaggttttcctgagaaccttgacccattagagaagaacgggagtaggctctcttagtacctgcatctacagcaggattaaattccccagggcagagatgagacagggaatggcttttctctgaaccaagcttctgttctagtgtaaggagccaagacaagcatctcattcctccatgtctttgattatacacttttctctctccaaatcttcttcttgcccatttttcaccttgccaagactcagttcaaatattacttcataaaagaatccttcctgaccccccaggctgggttagatgcccttttgctgaattatcgtaagagttggtgcatactgcttccacagaaattcttgctgtgttgaaattagtctgtttgcacgtctctaccactgaagtgtgaactccttgaggaaaaatataaagccttagatatcatcatcttccccaaatttttcaaaatattagatctcaatcccttatttctatgcagggaactagaatgtttgatgaacattacaagacatagttggcaaaatgataatataacattttgtgcatgacttgggaatagaatagatatatggttctctttgttgattcactcaatatctatgggcagcatatggcacatattaattgggtccttggtcaatgcttgttcaacacaataatacaacttgttcaacacaataatacaacttgttcaacacaataattgaaggttaatatttattgagaagccaataatccagagtgtgtagtgacaagtttagaaaagataaagcactccgtatttatgtgctcttggtgaaagagagaaggatgaggctaggtgcagtggctcatgcctaatgtaatcctaacattttgggaggccaaggcagaaagattgcttgagtccagaaacttgagaccagcctgggcaacacagcgagactctgtctccacgaatatatattatatacattagccaggcatggtggtaggcacctgtggtcccaactactcaggaggctaaagtgggaggattgcttgagcctgggagtttgagcctgcagtgagctatgatcacaccactgcactccagacgggatgacagagtgagacaaaacaaacaaacaaaacaaacaaataaacaacaacaacaacaaaaaacagaaagaaggatgaaaaaacaaaatcaaaagatatgtgttctttttaacctcccgaaacatgaactgagaataattcccatgatacaacattattagaaaaacaacaacaattagaaactgaaagactgagagctctgttccaccactgacaagcgtgtcattttaagtatttgttttatttctcctggtcaatgtgttggggtaatggtgtgggttttagctcttaaatcggattcttagccttggcagcattgacagtttggaccagataattgtttgttgtgcaggctgtcttgtgcactgtaggatatttagcagcattcccggtctctgcccactaaatgccagtagcacccactcgtaaacatagactgtgacaaccaaaacagtctccagacatttccaaatgtcccctaggtgggtaacagtgctctgccccctcccaaacacacagagttgaaaaccacagtgtagacttaaataaaattactaaagaccggtctatggaaaataatatacttccaaaattaacatatactttctttctcagtctcagttcttttccctaaaaataaaataaaataaaataaataggctgttgcactctagaaactactctaaaacaactacagatcaattatgcaaaaaaaagtctgaaagttacagtacatgaggggggaaggaacccttaggtttaacatagaattatctcagttaaggtgactgcataatgaatctgacataaacatcaatttgactgcatgttgctttcattaaagcaaagaaaccagaaaggtggaagaatccttataccttatgctgcatgcatcacaacacaccaagtatactagacctagttctgggaacctcatttcaagagcaatggtgcaaaggagagcagccagaatgaggagaggccaacagaccaggtccactctattccacagtgattcaagaaacgttactgaacatgttgactcctatgttccaggagctgtagagacggagttggatgccacattgacgcttccctctagaaacttacattctagtagagggagccagtgtgcaatagaatatcatggcaataaacacagggctatactgaatagtgggactgttgcatagctaagagttatgcaagcaccaagtataaagaagcagcttctgagttgatagtgctgttttgtgccttttcagaggtatgttttagaaaaaataactctaatggcagaataaataatggaaataagacagtgaaactaaaagtaaaagaaagccactgggaacccttgcagtaattcccgtgaaaaatgataacctcacaaactaaagtagtggtgatgaaaatcgagaagaaaagatgttctgagagctagtttagaaggtagaatcatgagaactcggtgactggataagtatgatggggaatgtagaggaaaagacatccaagatgactctagcttcaaataagagaaaggattgaggaacaagggaagtttggcattaaacaaacaaacaaaaaaaagactacagggaggcaaggctgttgttcccatgtatcaaggacattatcctgtgaaaaaaagtactaggtgtgttctatatggtcccaaagctttaaactggagcaaagagtagaagttcagaaggattttgcctgaatggcagaaataattttctgagactcattgttatccaaaaattaacattccgcaggaggtagaagctcatcaagacagcgcctagggagataatggacagctaccatgaaggacatctagagattttcactgctctcctctcagcttgcttcttctagtaatgtcctgattgttaccccatcctgattgttcttcagggaaccaaagcctccttctgtcaattacttgattcagatggaatcaaggctcttctctcctgcaccaagggtggtcctgtggcttcagcctgcacaggaaaaagtctcagagaatggccccaagatgagcatgtgatctaaattatggaaagaggctcctcatcagaatttttgcagaaacaattaaggaaggcttgctctctctctgtgtggtgtagctaagagggtagaaagtaagagtgagagagagagaaagactcaaggacatgatcaagagagcctttagatatagctgtccctcagagtagttacactccaagatttcattatcacctgtgatcttttgatctattatttttttttagccagtcagtttgagataggtctattgttatctgctccccaacccccaaagaattcctcttgtggctacttgtacaggaagaaaattcaggcatagaatgagaagcgactcccagacaataggtcactatcagcaaagcttttagacaaatgtattttgaaaacaactgaaaatctttagattcagaagaaatcaaaaaagatatctcacttactgtaaggtgttaaaataaacatacaaggtaataataaagatgtctttcattataatgttacttagagaatttaccaatagccttcaatgtatcaaaagctggcacattactggttctgctcttgtttttttttaaattatagtactttctttcagaaatatactaacaaagaaaaaaagacaattgaaatttccaaatctggaacaactggattggagaaaaatatacaaaataaaccccacgaggttttaattctaagtactttagaccttacaagcaccataaacattctgttgtggctcttcctcacttagaatgcatgttaatgccgttagcacttacctctaagaccggtagcatactaagtagaactgaaatgttttttattacactactggatcattcttttaataggggatacaatctcattacaagctctagtagtcatccagattaaaatcttaattgtcaggattggtaaaagcgtaataatatatacttatcttttttttggaaatggcataattaaagaagagcaagaatgtttttctgtaagcaaggcttctcatcctcagactacgcagattttccccctttcaagtggtgtattcatgcagtacccattcttgagaaactatacgatattttaaagattctcttacattttagggaatacatgaagtggttcaccctcctgccttccaaaatatctcttttcttacttctcttcaaatgtgtccatgtaatcaatgtgaggagaatcaactttggaaacagaatatctgtgctcatgtgcaaaggaatcttcacttcctactactgttgactttgagtaaatcagttaaggtatctgagactcagtctttctcatccatgacatggaactgcaaatactacatatgtggatcgattttttttaaaaaatgtaaatattctaaaactgtaagttcttttattatttttagaatgaatgttcactgagtgcttgctgtgggtgatgcactgaggcaatgcatgttacctgttgtttgctattctaatatagaacctcagaattggagtggatcttaaggactcccaaggaccaggcacatccccttgagctaaataaccatcctttcctagtttcctctttaaagcaggtttcaagctgccatggtggtatggatttgaacatgtagcctggagaattatggccaagagtgaagctcaaccttagaaccttggacagaatggtattagcaggtacagatgagggtcagaagtggaaactacccaggaatcaatcatggaagttaaatgaagatggatgaatgaacatgtattcaatatagactacaaagatgaggaccaggagctggaaatgagtcagtaacaggaattaaatgaaaagacaaaggaagaatccaaaagttttatcagaataattaagcaaattgttaagtctggtaaaagtcacaggtgcaagttacgtgaaatagaactctgtagtcagaaataagagtaatttggagagttgtaaataatcacacatacagttctggtccatgtgataacgtgcctgctgaggttgtttatctagccatactctccattcgtccttgcctcgcttcttttactcatcaagtcctcctgtaagaaggaacatgtttgcttattcagttagctaattttttagagcccaacttttcccatgacagatctgaagatgctaacagaaaaaaaaaatacaaaataaaattgttaaatataaattctaaaacctggactagagaaaaatataaattagtataggtggagattacaaaagatagataaaagaattaatagatttgggagagaaagagactgcaaacaacaatcataaagtttttaccattagctgcagttgagatgagatttgtgttctgagctccctgtgggccagaaattaatagaaaatacagacagaaggtatatcttttattatccatagggcaaaaggagataggtgttttccttgaacatacctctaaataaaaattttcatgagaaacttccaataaaaggttttatgtgatggaagaacaatgttctacagcatctccagaacaaaggagaagcagatatttccttcaaggaaaagattgtttccattgaggactcactattggaaatacagatgtcaatgtgaagaaaagagtggggcaacagcctctaatcccacaggactcttttcacccagtgtgtggagcccctccccaccccttcttaaagctctccatggttctgacccctgtctctcatcaaccctaactttatgatccaggttcagcctacacatccatgccttcatctctcttgccacatcccacaaagatcaaccccacttttttatcaacttgaatgtgaaattatctaaggactagcattcttttaggctccaattaaaacttttgagaatactggaaatgctcaaagtgtgtcaactctcactcatataaccacttaattctgttctcaagtcttagtccacacttgtgctctgagacatttaacactctatacttagtacctaacaaataaaatgacaattactaattaataactcttataaagtacttatgatgtttcagtcatgtgtgttatcttattgaattctctccacaactctcaaaagggatatcattaccatttctatgtcacagatatggaaattgggcaaagaaatcaagtaacttgtccaaacttacacagatagtggtagaatttggataacagagcccaagtgaatgaataagcaaataaatacaacatgaggaatgacactaagtgaaaggcatgttcatcaatgtgaagaagtggagtattcattgagtgccagaaattatgctctgttccttaaacacagcatttttattagtctttcctaactctgtgagagagtcatcttcaacatcagcatagagttcccattctagacagttgccctaaaaaacccagagatctgaactgaggccccatgaatctggatcagagagtaaagtcttcaagtcttgattaagctttgctatttagattgttaaatctttggatgttgagggccctcaggtgagtaagaacaaattcacagagtcattaccactttctgtaggtacccatcccaagagggatccatgagatacaatttcagtgattgcgtgaacttcagtaacaattacatatgagtttgaattgttctaattttaactactgttgttttttcctccttctgacagtattatttgtacccaatgcatagatggcaatgtgagtagtcaggattgaccacaacacccatcaaagaattaggacaatttaataaatatgaattgagtgagatctttcatatgtcaggcactgagcttggcataggaaacacagagctgagaagacgggcatgggccaagccctcagggagcttatagtgtgaccatgaagacaaacactaacaagcaattcttcaaagcactgctgttgataaagcagtaggagtaaagggggagtgggtgcaaatgggagaaaatttgctgaaatgaagcttatggccacagttgcagcagcaggagatggcacctggttggagaccacatccctgagaaacagggtaaatgcaatcaagttccaacctagccattatactcaagaaggatctttatccccatttaacagatgagaaaatgaagactcaggttaagtagctatcaaaagtcaaataactagtaggaatggagctagagcacaaaccagggagtctagctccagaagccatgagaaccagttccttgggaagaggtaaatggtcaattcccaaggacctatgaagtccagcagaaaggagctaacagaagtacccccttccccaatttgggggccagtaccttttgttgtggctatttggcctggaccccacagccagcccctcagaaatagtgcaacaaggagcttaattctaaacccaccagtttctgaaaccaggactgtcaaacagtggcctctctagatccagaaagaactagaatcatctacatctcactggatactccagaggaacagctggggtgggtgagagcagctgagaaaatctgacagcagctccaggcagtcttgacacaaaggacatttctaaactggaggtaatgtgaatctagcattggtcagctgtcccagaaatcaaatttgggacaaaaacatctagcctgtattaaccttttacatttccaaattgcagccttaatctctttccatcagcttacttataattgcatcagagaccccacaaacctaccattattcctctcggaggccctaaggcaaatcatttgtgtgctctctgattgagtgccctgttagttaagtggggaaaaggggaaaaaaaaaaaaccttcctcaccacagtgctgtgagaattcacaagatttctgcacactgcacttggaagatacatcatccccgtcagagaagacctgtcccttgagtgtcaggatgcaaagggtgtatgcaggagagggagaaaccaaagtttggcattgaattgtgcttatgtatgttcctcattatttgttcaaaaataatttttgagcacttactgtttgacaagcattgtgctggagactgaggattcaatggtgaacaaaccacagctcctgcccacaagcagccgatggtctttagagcagtggatctccatctggctgcacatctcagtaacctagaacacttctaaaaagacccattcccagtgcctccaacccagactaattaacaaaatctgtgatggaagggcaccaatgtttatttagtttccctagatggttctggtatctagagagggttgataaccactggtcaggaaaaaaggaattccctccttctctctaaccttggtacagccttcatactttgttagaatatttcactataatcttatcagacccttagtacctgcaggaagacccttgtcattttgtctgtatgagagtcagatgtcatttgcagcttctgaggcatgaattggaactcttgaattggaagactgggtgtagaggtaaagtcatcagatagtgatgaagcctgggtcactctttggcattcatgactccatgtcctttgaaagaaggtttaacatcagtcggtgctttccctgtgtatagccaagaactgatacttaataagtaatcaagtaattaatgagagtggtagtaggtacctttgtttgtatttacctggatctcttcttccaaagagccttctctaccatttggtgaaccactcctccatcctctctctaaatccatgttgtctgggtggagctgcctcaaactcttggaagcaaaaagtggcacctgcccaagatcaggctaatatgtgaaactgtattctccttgcctaggacacaggccaggacaatcaatgtccatcattggccttttgctggaacaatcagccgtcattcttgcccatggctattaagctagcatatggcaaattagaggtgctggtggtcttcttagccaccagctggggagagactggctaaaaacaagatcaactcagaatcctgctgatatggtttgaatacctggatccagttgagactgaagatctacccctgacctttttattatgtgggctaatcatcctccatttttgttttgttttgttttgagacggagtcttgctctgtcgcccaggctggagtgcagtgatgcgatctaggctcactgcaagctctgcctcccgggttcacaccattctcctgcctcagcctcccgagtacctgggactacaggcacccgccaccacgcccggctaattttttttttttttagtagagatgggctttcaccgtgttagccaggatggtctcaatcttctgacctcgtgatccgcctgcctcagcctcccaaggtgctgggattacaggcgtgagccaccgtgcccggcctcatcctccatttttgatttcagcctatttaaatcagattttctctcttgcagttaaaagaatgttcactaccacactggataaataaatgaattctctgctcccttctcttcaagtaagaaaactttagaaaacaagcatagcttcttcccttatccctccaagttaccgagaaagactaaaaaggatctcgcaataactgatagtgctgacatttgtctaatgcaattttcccatgatgtgctccacagaacattaaatttgtccatgtccaagtaagtttagggttaacttgttaaaagctatctttagtgcaaaatttctcaagctttttgatattgatatcagtgagaactgttaatctctcataagaggtgcagtataccacattttcccaactttttttttccttttaaaatcacaattttattaatagaatggggaatacaaatcttttttttttattatactttacgttttagggtacatgtgcacaacgtgcaggtttgttacatatgtatacatgtgccatgttggtgtgctgcacccattaactcgtcatttacattacgtatatcccctaatgctatccctccccactccccccaccccacaacaggccccggtgtgtgatgttccccttcctgtgtccaagtgttctcattgttcaattcccacctgtgagtgagaacatgtggtgtttggtcttctgtcctcgcgatagtttgctgagaatgatgtttccagattcatccatgtccctacaaaggacatgaactcatcattttttatggctgcatagtattccacggtgtgtatgtgccacattttcttaatccagtctatcattgttggacatttgggttggttccaagtctttgcaattgtgaatagtgctgcaataaacatatgtgtgcatgcgtctttatagtagcatgatttataatcctttgggtatatacccagtaatgggatggctgggtcaaatggtatttctagttctagatccctgaggaattgccacactgacttccacaatggttgaactaatttacaatcccaccaacagtgtagaagtgttcctatttctccacatcctctccagcacctgttgtttcctgactttttaatgatcgccattctaactggtctgagatggtatctcattgtggttttgatttgcatttctctgatggccagtaatgatgagcattttttcatgtgtcttttggctgcataaatgtcttcttttgagaagtgtctgttcatatcctttgcccactttttaatggggttgtttgtttttttcttgtaaatttgtttgagttcattgtagattctggatattagccctttgtcagatgagtcaattgcaaaagttttctcccattctgtgggttgcctgttcactctgatggtagtttcttttgctgtgcagaagctctttagtttaattagatctgatttgtcaattttggcttttgttgccattgcttttggtgttttagacaagaaaacctaggcaataccattcagcacataggcatgggcattttcctaacttacttaagcacagggctcttttttgtcctgcatctcctgggattagagttttggaagaaatgtcattctagctgcaacccaaagaatgttctttcctttgcttggaatactcttcccacaccatccactaccaaactgtccaatttctactcaactatcatgtctcagcatgaatactactttctccaaaaagtctttaatgacaccactactttaatgacatcactactgccaccttccccaatctcagataaggttatttatacccatgatttgctctcttacactgtatacttccgctttcatggtatttaccacacataattataattatccatacatttcccactagaatatgtggtggccagttcacaatatgttccccaatgattcccacctactggtattcatgatcttttggagacacttcccatgtgaatgtatggccagtgctatgtgatcaataaaatatggcaaaaatgaagatatgtgactcccaaggttaggtcataaaaggtattgtgtcttccacctggggttcataaattgcccactctagggaaaccagacaccatgccctgaggatattcatgtgtccttgtagagaggagctaaggaccccaacaaacagctggcaccagctttctagctctgtgaatgagccaacttggaaggtgtcctccagccctgattaagtcttcagaagaatgaagcttcaaccaacatctgaccacaatccagtgagaggccacaaacaagatcagcccagctaatcccttttaaagttcttacctacagaaaccatgagactataaattccttgagagccagtactgtgaattgcttactattgtggcatactccccaccacacacatgaatgcatgtgcatgtatatgcacacatactaccagggtcataattatagtacttgaaacatagaagtcactcaatgtttacaaagtagatgaaaaataaatttatgaataaagtaaattatatatatataaattatatatatataaattatatatgtaaatatataaattatgtatttatatacctctacatacacacccagaggtagatatatattatatatgcacatagacacatacgcctctataaaatgtatattaattatagacatatacaggtatagggggctcgttggtaatttgggttataaaataagaaaggagaagcattccttctaaatcacaggaagattctcaaattcaaatatctcactgtgactatagccctgaactgaaaaatccaggagatctggctttaatatcacatctgtgtgatttttatgaagtgacataaccccctgcccctgccccacctccagtgctagaaaatgagggagttagactagagcattttcaaaggccatttcagctctacctttccatgactccaagggagtgagctttctggaggtcttgtaccaacatggcagggagggaatggaattcagctggtctaacacagggcccttctgaggcagagctgaagaaaagaagcccacgtcacctgctgaagtcctgtcttctttgctgtttctcttccactgtttttagctttagattgggcagaactaatgtgtccccagattgtaggaagtggcagaagcaccccatcccaggactttttgggtggcggtatgggtctttggtcatggaaatggtggtgctgttgttattcacagcccttggagcactaagacccaggctcagtcctcaaagaacaactcctgccaatggtatcacatagtcaactcttaacagatacaacagccactttctaagaatacagtgtagcttttaggcaatctgcctagaaattcttttccactgaattcctggaagaggctgcttgattttctccacaccctagactcagaggagcaagtcagaaagccgagaatagccacacacggcacctgagaaaattgtgtctgcaggacccaggctcacgtagggtggaaagagctgttctacaaggaatttgtgagggagacataaattctacaattctggtttgatattacgttggtggggaagggggtgggatggggattagagcttggaatataatacctactgagtagttaccgtatgtcaggtacattacatttgtatcttatttaattcttatgagttctaaaaggcacaaaattttaattcattttatgattcacaggacatcaggttgagtacacagaaaggtcttatcgcagtccaagccctccttaaagactaggcaatcttgcttcctaaacaaagtcaatgagaatgtgagtatgtgtgtgcatgtggcatagaggaaaggttataaaaatgaacacattctagtgcaaggtttggcaaactatagcctgagtgccaaattcattctgctggttaattttgtaaataaagtttcattggaacactgccatgctcatttgtttatatgtagtctatggctgcttttatgctaccatactaaagttgagtaatgtgacagagaccacatggtctgcaagcctaaaatatttaccatcttgccctttagagaaaaagtttgctgactcctgctctatatgaccacggtaatataaggcgttactttatattggtaaattaccttctatatatctaggataactacatatcccagactaagaatatattattaacttttctaattagccataactaaatactaaaaagagtttgaaaattaaccaaataatattcacaatcaaacatccatttgcaggaaaaactatagcaatattgttcctgtattctggaagtcattaataaagctaaaaccatcagtaaaataaaagcagacattgcatatagagccatcctgagaaagtttgctgtccaaggagttagtcccataccatcctctgaaggagtcagtgctatattggttccaatgagctgtcactttaatccattctatggggacgttgaaccagtcactcagataagaacgatgatgaggctgaacaggtagcaaccttttcccctgtccttctcagtcctcatttccacccccagagaatgaagtcctccattagaatttttgagatgaaagggcaaaaggattggggatatccccaagtaagttttggagtagtaaaagactccacgaatcaatataatttagcagaaagaaaagctctcagaggcaagtgacttgcccaagggatatggcggtggtagggcaggagttatcacccacgtcgccaaaacccagagcagatcttgctccaatgtgaattcaagttgtgctgtccatgggcaaacaagaaacttccccgttggcactctaattcctgacataaaagtacaatgttggcctggattggggttgcccaaacctcagccatttctggagcatctttacaagtttaccaggactgtaccatacatactattatcaactaactctatttaattgagtcactttcatcttaaattactttgctgtacaagaaaactgttgcattgcaataaatggaatttaagtatgaattatcctaaatagaaattactatgtaaactttactatgctattaaattccagacagataatgttgcccacccaaagctttgttcctgagcccttttctattgtccttgagaaagactgaaacaaatgttggagaggtgttaaagagtgataccaaactgagaatctctccaggcaaatagaaagagaattcaaaaaagagcaaccttctcacaatttcataccattaatagtattctcctcagacatttggaaacactgacatctaatttcatgagaattccaaagccagccaaagagttggaggaggggtggaattggaagaattgaaaataagaaatatttctctctaaaatgaattcaattcctttagttttcttgttggcatctcacgcacagcagacacttgagtatcattgcatagtcaagataacctttaaggttgaaattttatttccattgtagagatagagacaccaaagctcaagtccaggaagattaagtaatttactcagggtcacagactgtggatagagtagcttcagacagaggtctatttgatgccacatgcctctttttttctccctacagttgaattttgtctcctttgcaatctcaatggtcctgccagtgatccaacccctgcttactggataatgagaattggtccctgtcctccttggcacatcctttcatgtgcctgccagagtctgagcacctcacctggctcatcctcctctgcagactcgcatgctcttctttctcatcctctttacataaatcccaccctggcaaccttttatcactctctgctcctctccttttaactggttccaatctctcagcctctactctttaagtgggatttccaggactgaagacagcctgccacaagatcctgaagatacagcagggttaaactgaaccattacttggtgcattgttaacaagtttctcactgactccagcaatggaccagtgctagttaggggttcagggtgatagaagggggcatataggcaacttttgagaaatgaagacagtgtcactcaatgaagcagtggcgagaaaagtagtcaggtaagatggcaagtgcagaagtgtgaaaatggaactcaaacccatrcaacaaaagtattgaacaccaagtttgcataaggcagattccaggtacaaagatgcatagagtggagacacaaaggagaataaaatatcctctccctcaagggagctgctgtctagctcttccctgcccaacatgggagccactagccacacatggttactgagcayggaaatgtgtccaggccaaattgagatgtgatgtaagtgtcaaatacattccatattttgaagacttggtcttcaaatgacaaaaaagcatgtgaacatcacagtaatcatttttacgttgattactaattgaactaataatatgaacatattgggttaaaaatgttattaaaattaatttcatctgtgtctttatacttttttttaaataaggctactagaaaatctaaacttgtatatgtggcctacgtgacatttctgttggagaacactagtccatgcagcaagatgggtatggacccaacacaggaaacatgtaaaactgtaacacatgatgaattagacacaagtgtctatgatcaggaggtgggggggattccaagtgggggaagcacagcaattacttatttacacaattacatcgttttcacaatatccattggctactgagctttaaaaatcttttttctcattaatttccttgtgtgttccyagatctgagaataaactctttgtgtgcaaggacaacctcatctccctttttaaattccctcagtaccacctcccagaagttacctcagttctaggcacacaaggaatgcctgtagaaaccaatgaatctcacatgcatttatctagactctatttccgatgagccaatgtccatataggcaagtattcaaagtagagaaaagctattggccagagcatggaaaagataaatagacacagacatcatcaaatggacatacaggagcatttattggctgcttactatataccaggctctcaatttcattctttatatataatacctgacataaaccttaaatcatcctgcagaaaagctaatcttatcctattttacagatggggaaactgaggctcctaaaaggttatataactgcctaaacatagttaataagaaggcaataatgaaaggagagatcatgtccacatacttgaaagctcagggatatctctttatggagcacatctgcatgaggatttcagcttctgctttgaattacattgttaactattgtacaagcaatttgtctgaacatttggagaaagatgttgtgtaagtacttgtatcctctctgtaggaggaaaattcagcaggatacaggtgacatgactttgctctcttttgcatccagctgccgaaaagtatccctcttttggaactccagattgtgtcttagcctgcaggttcacactatttggactcccaaactcataacgtaagacttggaaaccagccagtgaaagagggagggaaggaatatttttgcaattgctgcaagaactttccaagagctattcttggagctaggagtgttggcaccaggctctcaaaaagagaacagggaaggattctaatgtggaaatattctaaactgtgtgcttgacaatatatactagatcccaccacctccccccacccccgaataaaaaaagccactagtgacagaggctctggtagagtaactgaatactggctggctcattggtggacttgctagtgcaataatcccatttaaccaaaggtggggtagtgattgccagaattcagatcccagctttgcgggatactagccacatgactttgaataaatgaggctctctgtacctcagcttcctcatcaacacaataagcacaataataatatctgccttagagagttgttacaaagtttaattcaagttcatatatataatgtgttttcaacaatgtaaggagtagctgttattattatcatttttaatgggctatcacaacaggtagctcagttctagtatcttcaacaaagatagggtaaaacaagagtaatgctacttaaaaagacactgtctccccaacaatgcatggaaatagtgagattttcttgtgtctacatttagtggggaaagaagtagaacaagttggtagaatatgagaaaggcaaactaaggcataaagagattagaaaaaacaaaaggagttattaagaatgtaaactttgtataagatgagcccccatattttctaggaaggttaaatcacaaccttcccccatctctataacccttttcattattttcttccctttacaccatactttgaaatgatatgtcagtaagttcttactaagtaataatttaaaagctttaattttgtgtgttatttggagatggaagtaactgcccaaaagaggtcctgaaatgatttaaaatgccaagttattttgagctgataaaattctactctgcaggatggtgtggcagtayaaattgtacaaaatgctcagtgtgtcctttaagaattctgatgtcaattaaatccatcacaaatatcagactggaatggagtgtcaggaaccagtatatccggagctatttcttgtttcctgatttgtcagaaagagctcagacacaaagctcagagtaattgcaaagctggacaacaattttcagatcgatgacattttgaccctaacttgcaactacttaacatgcaatctcagcatttaacaagctattttcttataaagtaattttaaattacatcttaattgcttttttgcacttgaaataaagataaacagaaaaataaacaaaaagaaatcatgttgtcatgatacttacctccaaatatgtttgttcatgcctcatctatgtgattaatgttcaatggtcaattaagaatttcttaaatgaaacaccaccaccaccatccatcacagtctagtcataaaatgttcagtttcaccatttgtaaaatgaagctaaaagtgcttactcttggtatgaggtttgaggattaggcctacaccttccatttgagttcattcttcccctcactgggaaccaccaataaacagaagaagcaattgtggttgagagcataggctttgcagccaaactttgaggtctggatcccagctccaacatcttatatctctgtgaccctgaggaaatgacgtctttgagcctcagtttcctcatctagaaagcaatactcatgagcgtatccacccgaaagggttgttgtgtggacttccacagatgatgtaggctgagagattggtacagtgtccagcaaatagtgaacaattgatccatgtcagctaccctatcatcttcattcaataaatgaagctctgaaaggaccaacatatatctaatggatgtcagtagatacatgttgaatgaaagcatctgaggcattgtatccttgggcccagggcagatagccaaggaggaaggagaaacccttgacaaaatttttctccctttgaaagccaagggtcaccaggctatatagttaaagtattaaaaagccaacattctaaaaaaaattaaaaataaaaataaaaaaagccaacattctagcttctctttcttgatctaccccacctaggggagagagagagaagaggaaatttcccccaactccacccaagcctcctaatgagcgcatagaagagaagggatgtctcacttccttgtcattgtctcattttagcttcttctggtattaccctacttggtgaaacctgaactaggattctgaggccaattttattgcctagttatggatgtaaagtgatgcaaagtgagcccacgctgttgagaggatgtaaatggatttaccaagctaacactgaaccataattcaaaaacctcaggcctgacactgtcagatcttcaggctctgggtgcacatgggtggtgcagagtgcgtcccaggcactgaagatgaccacctcgcataggtgcacttccagaagaccagatggaggcagctgggaaatcttctcacggccctcatgccttggcatcctgatgacgcactaccctgcagagagtggagggcacccagaaattccccaacccactcactttgcttatcagtatcctgtcttccccttagtaaggaaaacaaaaagagaacacaactgttgagttcaggatggatgggcccagaaataatttcaaaatgtagccttctttccttcatcttttcagtaaatatgtactaaggacctaggtatcagtttattacattgtaaaacaaacctcccaaaaattactgacttaaaacaatgaccacttttttttagttcttcaggtcagtaactttgtctgtgttcttgaggrcaaaactgtgtcttatacagctctagattaacaggtaccaaagggccttgcacacagtaggcatttgataaatcaagttgaatgaatttagtaattagaaaacaattgatgatggtttaaatccccttggggctcaatttatgagcaagaggtcaatcatattgaccaacatgattgcactcattttagaaagtgtatgttccctgttgaatctctgtgtctataagaatccctggcaaatagtaggtgcttataaatatttttaaatgaatgaatgctctttccagaatccaacacttctcatcatccccttttctaccactgtatcaatgccactgttatctgttgccttgatggttgtattagcctcccaactggagtctgggtcattgtctctttattaccctcagtacaccagccagaggaatccataaaaatatgagtcaaatcatgtcactcctgtgattgaatcttttccttggcccctttctaactcagwctaaaacctgaagcctttacagtgccctacatggccccacgcttcctgccctcttgtgtcctctgcttcttcttgtctcccctcactccctcctccccacactggcctcttactgttctgtgagcccaccaactgcccttcctcatgcttttaaatttgttattccaaatgccttgaaggctcttccttacttccttcaatcttttcctaaatgtcatgttctcarcggggttttccctgaaaaccatgtttgtaatttcattgcaatctcttctttatctgctttatttttccctatagcccacttatctccatctagtatgatatatattttactcatttattttgtatgttgcctgcctcccccaaactaatatataagctccccatgggcaggaatttttattagtttgtttactgctaaatctccagcacctagaacagtgtctggaacagagtaggtcctcagtaagtaacttttggatgaaaccataacgtgctctatgagaagtgtacattttctcagctaacactgaatccatgccatatgacccatcaattctactcataggtatttgtacaagagaagtggaaactatgttcatacaacattgtacattaatgttcatagtagcattttataaagccataaaagggaaacaatccaaatgtccatcaactgatgaatgaataaatacatgtggcaaatccataaaatggaatattattcatccatgaaaaggaatgaggtattacacatgctgcattgtatgaagcttaaaaacatgaggttaagtgaaagaggctggtaacaatgaagtatgaagtggagagtgactgctaaaggttatagagtttcttttggaggtgattacatttttctggacttatatagtggtgatggtttcataactttttgaatatactaaacaccctgacgtgtacattgaaatgggttatttctatggtatgtgaattatctctaactttttttttaagttgcagagacaaaacaaaaaacaaaaaacttgaatccaacattacccatgtcatcccagaggttagatctcaagtctggggtcacccagctacctagagatgaaatcaagatttgcactgtttattcaaagaattattgcctgaggctctgttttgtcttaagcactgcttggtggagcaaacaaaacaaaacaatataaagtatgcatttaatgtccagttcatttggaggacagacagctatgaatacaaataaataaaattgaaggttccacctaaatacgaaaagataggtggaagccaagagcacgagaacacagaagggaatattgtttattagggatggtttcctggagccaggctggaaagaaggtagggattctgcaaggacaggaaaggaaaggaggagcattctggcacacggagcttgagaaagagcatggaattccccaaaggacaatgaggagggcagaggaaaagaatgcaggagagacaggctgaagagatgcaccctgagggtgctcagtcccctgctatgcaggctgcattttctcctgtaggcaactggcattggcagaaggttcatgagcatagaactgttatgatagaatatgtattctggcaaggctaagcttccagccatgtgaaccaagagttggagaagagattcattgatatagttggatctgtgtccctgtcaacatcttatgctgaattgtaatctccaatgttggaggtaaggatatattgtaatctccaatgtgggaggtaattggatcacggggctggacttttcatgaatagtttagcaccatcttttttggtgctgttctcatgatagtgagtgagttattatgagatccagttatttaaaagtgtggcacctccctgcctctctctcttgctactgctctggccatgtgatgtgccttctcccctgtcacctttctccatgattgtgaatttcctgaggtctccccagaagctaagaagatgccagtattatgcttcttgcacaacctgtagaaccatgagctaattaaacctctttttgttataaattacccagtcgcaggtatttctttatagcaacgcaagaacaaactaatatagtcatgcatgacaaggagggactgcacaaacacatgaggttaacgcaagagcttgggttcagcctgtggcagtgggagtggccaggaataaacatgtcccagaggcatccagaaggaggatttggtggccaactggataccaggagggaaaaagtcacagatgctgcaaagtatctcacctcagaggcaagagagttttgctattttactaatttccagagggagcacaggaggtgtgggagcaggtaagatggggaaaaaaatgcgtaacatttgagagattttggctttgagttgccatcagggaattgtccagcagatagttgaacaaggaagaactattaaagtattagctacatgtaagaaatattttgagcatacactacatcctacagaatgttctcagcatttcatatacattattcaatttcatcttatcaaaagccctttgaaacagagaaagacagccttctcctgtctgccttctcctcaccatagccttctcccacctcctgccttctataccttgcatcttctccccatccaagccttcatcccacctctacctcctccctgccattgccttctctcttttcctgtctttctcctctcccatcctttcccacttctggcttctcccttccactactgtctaagagaaaaaatcttggatatgaattttatataaactgaggcaatggatacttttgagaactgagaggtaatctgaaagacaagaattatttgccccatgctcttacttattagacaaccattacaatggtccacccttacccacaggggctgtgttccaagaccttcagtggactactgaaagagcagatagcaccaaaccctatatatactgtgtttatgtctatacatacacacctatgataaagtttgatgtataaattaggcacagtaagaaattcacaacaataactaataataaagtagaacaattgtaacaatatgtcagcatcactgctcttctgctttggggctttattaagtaaaataagggttatttgaagagaagcactgcagtatcacaacagtcgatctgatattctagacagctgctaagtgactgacaggcagggagcatctacagcatggagatgccagacaagaggagaattcatgtcctgatcaggacaaagtgggacagtgcgagatttcatcacgctgctcagaaaagcacccaatttaaaacttatgaattgtttatttctggaattttccattcaatgttcttaaactccgtaagtaaggaaatcctggaaagtgaagctactgatataaagcactattgtaactggacaccttgtttgtgagaggtgctgttctaggtgctgaaggcagagctgtgatggaaacagaaacccttgctttcatgcagcttacattctaaagagagaacagtgaggataacacatcagaaaagggagtaagaggcaaaaactcagttcagattggaatggagggagatagtttgggggagttttaggtgagagacaaggaggaatggggtagctgctgtgtcaagcagtgaggctgaactcactaaggtgagaacagaaagcaagttttctctttctgaccactgccccccaaactacctctgtactatttcttcctttgtctcttggatgaactttcagacagtttccatgctttttacactcactacttggtaataaaatttccaattagttttgtccaccaaaaagaccaccactgccattttcccttcaattactgtgcctaagtcacatataaaccatggaatactatgcagccataaaaaaggatgagttcgtgtcctttgtagggacatggatgaagctggaaaccatcattctcagcaaactatcgcaaggacaaaaaaccaaacacctaatgttctcactcacaggtgggaattcaacaatgagaacacttggacacaggaacgggaacatcacacactggggcctgtcatggggtgggtgagggggagatarcattaagagatatgcctaatgtaaatgacgagttaatgggtgcagcacaccaacatggcgcatgcatacataagtaacaaacctgcgcgttgtacacatgtaccctagaacatgaaatatatcaaaaaaataaaataaataaaagaaaatgaacatattcattcaatgcacaatgaaatgaaaaaaaaaaaattattgtgcctaagtcaagacaatgattcttctttgggcttcattcagagttggaacttctcacctctcccaggctcagggaagatgcagacctcggatcctgtaagatgctgtggatatttgctctattttgtggcccaacttgcctttctgctttatctccccctaaagagccagacttggatcctgactattccagagttaggcttatggaaagaggaattagaggagaatgtggacacctggtcarttggtactgtcactatccagctttggtgctctccagaactggaggtagtaaaggctgactgtttcttccaagaggtgctttgaaacttttctcagagattccccaccaggaactttaacttattttctcatagtcactgttttttctcctgggattgcctctaacatcaaccctcaaccttggcatttggtggtccacttcatagagacactttctttttggtgtcccatttaacctctgggaagaccacatgagcttcatctcatttctgctcatgagagagaccccagcaaattttagtaccacaattgatggaaatattcaccgcaaatgtcagtcctttctctcttctrtgcagccccaatgaagaagccacagagttgctattcagatttctcaggaaaagtcaaataactgtccactgggttccctaaaccctagggggtgaatatcaaactctttaagtggtccttgaagccactctcaccatgcagggrgtgggaaggaaatttctacagaactccacaacccggccccacacatcgtcttgttagatcagctattttaaatcctaaagcagtagtcagcaaagcttttctgtaaaaggcctgatagtaaattatttaagctttgcaggcaaaacagtctcrgtagcaattctcaactctgcattgtttttaaaaaagaaaagagcaatgggctatgcttaagcaaatgggtgtggctgtgttccaatataactttatttatgaaaacagatagcaggcaggattcagcctgtgggctctagtttgactctctaaaggtaggtgatgacccaatattctgattttcagccttcccattgcaaggcccgtcaagatggggtagcacttcccttggaagacagaggttctttctttattgatttttcttgctgaagtcagagagacagaaatggtctcatttttaacatcctattaaacacaaacacacacacacacasagagagagagagagagagagacagagagagagacagagagagagacagagagagagaggggagaaagaaagaaaaatgacagaaacaaagaaagaaattagtaaagacattttgaaaaaatgtgctgcgtgttaagaatgaaattccctatagtatttctgagatgactggtcatgcaggtggctgggtctttcaactgtaacatgtggtgggaggaaaccagagtagcccaattttatctgagatgtaataggttctcttttcctcattttatagttggaaaaaactagtactatagagatcaaataacctgtctttggtcccacagttagtaagagacagaaccaggatttaattccagttttccatgaccaccaaatgctacgtagatttttcttaggtagattattgtacttgttttctattactgctgtaacaaatcatcataaatttagttgcttacagcgacataaatttattataccacagttttagaagtcagaagtccaaatgggtttcactgggctaaagtcaagatgagatgtcagcagggctttattccttctagagactctaagaaataatctattttatttccttgcctttccagttcctagaggccacctgcattccttagattgtagcacctttctctgtcttcaaaaccaacagtgtagcatctcctgtgatggttaatactgagtgtcaacttgattgggttcaaggatgcaaagtactgatcctgggtgtgyctgtgagggtgttgccaaaggagactaacatttgagtcagtgggctggggaaggcagacccacccttaacctagtgggcacaatctaatcagctgctggtgaatataaagcaagcagaaaaatgtgaaaaggtgagactggcctagcctctcagcctacatctttctcccatgctggatgcttcctgccctcaaacatcggactccaagttcttcatttttgagacatggactggctctccttgctcctcaagcttgcagacagcctattgtggaactttgtgattgtgtgagttaatacttaataaactcccatatatatatatttatattctattatttctgtccctctagggaaccctaatatatctcatgacttctcttgtccctctgttgccattgttatgtatgtcactttctatctgactctaagtctcttgtcttcctcttataaggatgttgtgtttacattgagcccaaccagttaagccatgatcatcttcccatytgaaaatcattgaattaattacatccgtgtaattaattcaatttttgccatgtgaagtaacatattcatagattctgggaattaagacatagacaccttctaaagggggagagcattgctccacctacaacaattgttgattacaatccaggagatgaatgtggtctttcagaaagaatgcttaaagctaaaagggaatcaagatgaaaaaaagaacttaaagaaagcatctaaaagtagggccagtggaggaaaaayragaaattgcaaagagctaggagaagaattgcataaaagtgcttcccgaaagccccagaggagagaatttcaaaattcttgagtcacaaagtcaaatgctctgaacttgaaaaaggacaaaggaacacaatctcaggcaggggaccaccagcaaccttagcaaagggaagatttggactgcacgggtggcggcagcgtgragtcacactgtacagcctggcccagcccagaacctttctcctagcccaggccctctgttcacaggaagcatcagcactaccttttacctcggccaacccatccatattgtgaactcagcttattggaacacaaagagcatttggctgtcttttagatataatttgaaaagtcaggagttggcctttggaaaagctgcttcagacagcaagaatattttagtgtaaggggaaatatattcatctgatgaaaggtgtgggaaccaggagtgggagggaagcaaggttcccttggtaccacctggagtctcagcatccatattattttatgtggcatcaccatcattttttgacaccaccagcgagattgttcaatgaatatttaatcatgatggggttctctcctttcccattccttcggtcccctggctccagcctttctaaagtaataactttgctcatcaaacaccaaaactggcacttccccatccttatgctggtaccatgatgtagactatttgtgggttctgagcgacaggtggctggtaaggtagcaacagaacagctcccagagacaccagttgttggaggcttatattaccccagggaggatcatgaaactgcagaagccatctggcagggctctcaaggcacctgtatgctgagcctgctgccaatatctccatctcaattaggctcctgtgcagtgatttccctgctgtactcactgactcgcacaaaatctcagggaagagcacaggcaccaaccaactatgctggagagaagaggaaagtttgkaagattactgaagaaatctttcctctacttccatgtggtgaaagagagaggaatgcaacacacctctccatggaagaaatcaaggaggatgaccaacaattcacaggcaatcttgatagcccttgatagtcacacccaccctgtgacattgggccacttggatgccattttaggtatgtggaaattgaagcttaaagtggttaggtaagtccctgaggtcccaaggatgatgaatggcagcaccaaggtgtaagccacgtctgtctgactctagggttgatgtggatgctcactacagttcattgcttattgcagagtcaaagttcaaggtccttaagcacaagaactgtgtcctatcttgctctttttgtatccatcacctcctcactctcacccatgatgcaacctcaggaccaaacacaatgggtaagtttcttctccactgtcaaccaccagcgttgtatctgggaagtggggtaaaaacacccatcacttgactccataaatgcctttccayctccatgatgaagacaaactccagagatggtgcatttatgcaactgagtattgagtgagcacatgctatgtgcgctaggcaaagtggtaggcgattaaggagaggtagattagaggctcagtatgacagacatgcagcagcgggtgttaattactactaagtgttcttactgtgcttggtaagcatgttgcatgcattatctcatttaataggtgtgtgcgcatgtgtgcgtgtgtgtgtgtgtttgtgtgtgtgtatgcagggagaaattgaagtgggcacattcctggctgcgcaaacagcaggagcaaaggtactgaagtagaaatgtgcaatgcatgtagaagaaactaaataagttcagaatattctttaatttatttgcttaacaaatatttatkgacatcctctatgtgctaggcactgtgataagcaaaggagaaagaggagtgaaccagatatggtccagagtgacactgataacaattacaaatagcgataccataataactgtaataaaactacaacgttaaaaagcaggaacacaagattactgaacttcaggaggctaaccttgtctggaaggttatggaaagcttccctgatacagcatcagtgagaacaacagagagtagaaaagtagggtccttcccttctggatacagggtagatgttaatttaatagtgagcttctgagagagtcaagtcttgatatgaattcaccatagcactggggtggaatcaaaagaaggaactagcctgcagcctcatttaggaccaggagacatggcatcagtcaaatgagagtcaaagcaggattgaaactggagatcccaggcaaaggctaggagcacggacctctcaggagggtgccaagttcaccagaataagcattgtgcatttggatagtttcagtaccttttccrgtcactttatccacatggatgtttaacatgaattatctcacctgagactcacaacaagcatagggaggcgggaatgggaacaaaaatcctcatctgacccagaagggaactggaaggagggcttgtgattagacatgggacttcccattctcaaccaagtccctgcgcacacagcatggtcaccaggcaagaccatgttgagcctcacccgctacttatttttcaattaataataaccatataaagaatccttgcatagtgttttatttttatttttcacagcattttcctttccaccgtctcattggagcatctcatcaaccttgctaaggagacaacaaactacaacaaaaccccgcaaggcttagagatatttgcccagagccatgcaggtgaaaatatggaagaaacaaaatgccaatttaagtcttcttccatagaatcctttgatctttctgatactccacatcacaccacccatcagttcatttattcaagaaatggttactgagtaactttcatgggccaagcccttttccagctactgaagatgcaattctcataaggaattcacagagaacaagtaacctgatacattacagaatgtatagccagagtagtagcaaggtgctaaggggtacacagaggaagagacacaagagcttcttgtgttatggggtagagggcaatggggaggcttcatgcaggagctagcatttgagctcagatgtggtggataggtaggagttttccagggcaacaaagcaggcaaatatctgagaccagaggaaacggcatattcaagggcacaggcatgaccaggcctgactcttccagggaatatggctggagtgaatacaggagagatgagagagaatgctggaatggaaggagaggacttcataccagaaactgagagtagtcagagaggtgttttcagcaagggagaggcacattcagatttttggtttggggaaaccacctatgcgaaatttagaataaaaagtgaaaaaagagcctgaagatgggaaaataggtaaattatgagagtggcagtgtggaagaaggaatattgcatctgggaatacaattggaagatttagtgacttggatgagaatatgagagagaaggtaagggatgacatgaagccttctaccctgcgaagccaagaaaatggtagagccatccagagtagccctatttcctaacacatgctcatggatacacaccacacacacacacacacacacacgcacacacacacaggcacgagaggctaggtgcagtggctcacacctgtaatctgaaaacattgggagactgagttgaggagtttgagaccagcctgagcaacataatgagactctattgctacaaaaatttaaaaattagctgggtgtggtggggtgcacctgtagtcccacctacttgggaggctgacgtgggaggatagcttgagcccaggagttcgaggctacagtgagctatgatgacaccactgtactccagtctgggcaacagagtgagaacccrtctctaaaaamataattttttaaaaaaagacaaaagaaatggaagcacattagcatgttagcagtgtttatccttggattacaaaacgcttgccagaattttctttttaactttttttttatactttaagttctacagtacatgtgcacaatgtgcaggtttgttacaactgtatacatgtgccatgttggtgtgctgcacccattaactcgtcatttacattaggtatatctcctaatgctatccctcccccctccaccccaccccacaacaggycccggtgtgtgatgttccccttcctgtgtccaagtgttctcattgttcaattcccacctgtgagtgagaacatgaggtgtttggttttttgtccttgtgacagtttgctgagaatgatggtttccagattcatccatgtccctacaaaggacatgaactcatcctttttaatgctgcatagtcttccatggtgtatatgtgccacattttcttaatccagtctatcattgatggacatttgggttggttccaagtctttgctattgtgaatagtgccgcaataaacatacatgtgcatgtgtctttatagcagcatggtttataatcctttgggtatatacccagtaatgggatggctgggtcaaatggtatttatagttaatcttagggggagttattgtcgaggttggtctmgaactcctggcctcaagcaatcctcttgcctcacggagttttccaaatgttctgtatgagcatgtattatatcatgctcagagaatgtaacattttgaaattactaaaaatggtaacagttacactttctaacaactactacattctcatatttttatgaagtaagaacacagttatcctcattttacagaggaaaagctgaggctcagamaagagatctctgcagggacacatatctactaagtggctgaatcatgagtcgactcagatctgtttgattccagaagctaaggcctgactgaacacctgacattgtcgtgaatttaaaaaaaaaaaaaaaaaaggaagtagattttaaagagaagtgctcattaagtttagtcttgtgagtcataagtttgaagcactgaagagatgactggggatgtcttttgaacaggttaaacattgactggaggctcaggagctcctctttggaggtgttgatttgagaattgttcagagatgtcaatgaagcaacagcaayagaggagaccatccgggagtagtttagagattgtgaatagaaggatattgccaaagaccactcagtaaggaaaggagagtcacaggagagatgcaggtaacctggaaactgagggagagaggactttcagatcactgagcatgatcaagtggcataaaatggcctttaggcagagtcttatgatgagtttgacatgagaatatttatagcataaactagcctgaacacagtcaaggtaggaagtataaaatgccctttcaagaatggaattgatgaggaattggtgasggaaagattgtagttcaaaatgatggagacaggggaagggattttccccttgcagaaggcttgactccacttttaggctgaatggaaggagtaggagggacagaagagtcaggatagagagaaaacaacccgaagaacaagttccttgaggaaatggaaagggatgccacacacaggtaagggtttgctctaaagtgctcctcaaagttaacagtccagttatagacactgttgctgcaaaacaaaccacaccatatgcaaaatgtaaagtaaaacaatcaccatcttatgcacgctgcttctgtgggtcagaaattggacagagcacagtggggatggcttttctctgctccacagtgtctggggtcwaatttagaaagactcaaatagttatgggtgactcaaatgtcagggggctggaatcacccagggtctttcactcatgtggccgatgcccgggctgggatgattttaaggctgggctcagcagggtcgattctttgagcactcatgcatggcctgtgcatgtgccttgggcctcctacggcacggcagcagcattttgagaggaagcaataatccttatggtatcatcactcctattgtgttgaaaagagtcctaaacctcaggaaattcatgtcacttgttcagtgtcatagagctttacagtgtgctctcaattttgcctaaaaaatacattcatatcacatatagaaaaaattctgggagaatacacatgaaaattttagaagtagtcatatttgaatagtgtaatttttatttccttttagattttctctgttttgtttttatgttttagcaatgattatgcatggctcatacattaaaagttttgtttttactttctagatgaagccttctgtaagcagtctaataaccccttggacttagttgttttcaggacaagcccaggggtggcatctccyggatggaaatacaaaccaaacatctgccaggcatgtaccaagggttccatacttgacgtcatcttatcttggagaagagattctcacactatgggactgactcagacatcatgcctcttcagccaggcagaggaactgacattccctaaggtatcctataacatagctatatcagagatggccacatgaggaggccaggacatcattgagcaacatgccttgtggttgagcttcatactaccatgaccaagagtccaggtcaagaatgccagtgtgcttctctcaacaaaacatagcttgattctgggcttttaggcttttaggttctttctatcttctgaaactcatccaagattttcagctcatactttaaacacgttgaggttatctttgaaacacaacagcatctcccctgagatcaccctcttagtttacgcagttttaagttgggggttttattcatttaaatgaaaatgtaagaattttaatttaggttgaaattttctaatgttagctttgaatgcaatttagatgaagcataataaatgcaggttcaaattcaaccagccatttctgagaactgtgcctggcactgtgcccagtcctctctgatgagcatacactcttgtcttctcaacattcaccctgccttcttctgtcaaccccaaatcaggtgaggccagctagtgaacagtatctgaactcaatcactgagttcacccagaatctaattggcctcgcttgtgaaatatgttattttgatgaggaatcagagggccaattagctgagatgctttggacaagtcctccatttagtcacctgtaaaatgagaagaggacaaggaattggatgaggcatctctaagacccttctggccctaaagtctcggcttcttcaagtcacagatgtgagcatgtctcttgttacatcagagctgccctttctctgtcatcagcccacaagttatctaccgggaggcacacaaacatatccatacacatcctgagcccacacccctgcagcaaacagcctcacccagtttcacacaaagagaagccacctgcacatgtgaccaaccctagcggctcctgagcagctgctcttctttgctctctaaggcagcaaaagggatgtatttccctcatcgaatcttttttctcttaaagaatcagaagcctccttcactcttgccttctcactatctggacttcaaccctgtttactataactggctgtttagctatctaaattttctatgtgaccatgaattccacaaggaaaacacctatttgtcatcttactgagtgttttggcttcagcaactagctgggagctagatacagaggcatcgattgctgaataaccttgtcacccctcccggcccgctcttgtggtgaattagagacaactgcatgttctctgacacctccccagtcaagagatgaagtccaaatcccctttccttctatcttggcaggcagatcccatttgtatttatttatttatttatttttttttttgagaagagtctcactctgtcacccaggctggagtgcaatggctctatctcggctcactgcaacctccacctcctgggttcaagcgattctcctgtctcagtctcccaagtagctgggattacaggtgcatgcaaccactcccggctaactttttgtatttttaatagagacggggtttcaccgtgttgcccaggctggtcttgaactcctgcgctcaggcaatccacccacctcagcctcccaaagtgctaggattacaggcgtgagccaccgtgcccggcgatcccatttgtattattcctagtttctagatgaggaaactgaagctcggaggctcagagatgcgatcctcaaggtcacccaactagcaggtgggaaagccaagattcaagttgagatctttctaactccaaagttcaagccctctataaccactgggctgtcttgcttcccaaacaatgttacagcgggtgtgcctgtttgtgtatgtatgtgtggcatacagagaggtagaaaaactggatacctccttgagcaagcattggcattgtacagcccacagccaaatctggcctgtttttataaataacacttcatgaagccgcagccacactcattcatttacatactgtctatggttactttcacatcaccacagctaagctgagtagttgtgactcagcaaccatgtggcccgaaaaagcctgaagtattgactatcttgtcctttacaaaaagtttgctgatgcctgttctagaggatctacataggagattacttacatcccttcaaggacacaatgggcctcattttttcctgaggcaagatttaaagttaccaacttgtcccagtttttcctagactttgttatttttttccagaaaaacctcttggtcctgggaaaactgggatggttggtcatcctagttctagattatgcaccacagactctatataagtgtgcagtcctgctgtcccttgaaatgccctaactgcagcttccacggctgcctaagaggggatcagatgccccaggcacagaaggcacttccttctctgccaaggtcccaccacagagcaggcccaaggcaaggccaccctgttaataagcttaattggatttgccagctgagccatgaattcattatccctgtcaatccccagccctagagagccaagaaaaattcctagaggaaatgataaaggtctctcgtctgggcctgtgtctccattctttctccccctcccaccctgaaaaggcatatacagtgtgctaccttctcgcattccaggacataaaggagatactgtcaatgatgcagacgttttaagaagtagcattttcataatgaaaagaaaggtctggctggttttttgttgtggttgggttttttgttggtttattttttctttttttgagacatggtctccctctgtcacccaggctggggtccagtggtgcagttaatcacggctcactgcggcccccatctcctcggctcaagcgaccctcccacctcaacccttcaagtagctgggactacaggggtgcgccaccacacctggctaacttttttgtattttttgtaaagacagggtttcgccctgttgcccaggctggtctccatctcttgagctcaagcgatccacccactttggcttcccaaagtgctgggactacaggcatgagtcaccacacctggccagtctggctcttttttttttttttcttgcatgtttttaccatgttcttggggtgtgtataataggagtggagtaggtgatgtgcatatacatagcctatgcataatttttcagatgcgtgaactttcccaggcttaataattggcctgaagttcccctcactttagacattcacatcttcatgcacagaggcccmcataatgagagttgtacggaccagtcatctactagcaaaattatctaacacaatgccaaaaacctgggtgtgagctgagactgggagaaaagcagccagaaaaggcctctctccctgtgcagttctcagagggaggccggagctgcctcaacagcacaaagaaaagggagggcctcttgccttcctcccagacttgagtgataagttctgaagacaaaaggttctggaagaacggactcagcttctgcagcccctgaccaggaagagagaaatgactagagcagtttcagcaaactgcagtcctcaggccacatctggcctccctttgttttagtgcagcctgcccagaggctaagaatgacttttacatttttttaatggttgcaaaaattaaaagaatactatttgtgatacgtaaaaagtatatgagaatcaaatttcaatctccatcagtaaagtcttatggaaacatggccaaactcacttgcttttgtgttctccgtggctgctttcccattttacaaataaagaaactgaggtccagaaggatgaaataaatgaatcatcccaaagtcacatagtttgtaagaggcaaaactaagatttgagcttaggtctgcctgccaacaaaacgccatcactctgacaagccaccctcttgaaggaggcaaagaagtgggttcttgggtgagtgggtcaaggagaaatttggatgatcgatgtcagctcaagcctgaggkacaagccagtgttaatcagtggacaacagctggctcatgcagggtgtacatatagaagatacctcaacagaagctgagagatattgaaaaatactgcatggcagctcctcattttacagaaggggagtccgggrgtccgaaggcatgagagatagaagactttgtctggaatcatccaggcagtcatagccagagctgggtggagaaactaccacatcattaaccccaagagatgagagttgggtgccagcttcaaggaatggggtcagtgggagaggtgctctggctggcggattccagttccacaggaggccttgggtaattctggggacaaacatgggtcagaggccaaactaaggctcagcacacctacccttagttccccaaagttgcagaagacaaaataaatttgcatttttacaatgggataattaatgtgaactaaagtactcttgtaacagttgatctgtttgaaaaggaaagaaaatgtcctaagaaagacccaacactggggtcaaagctcaatatttgcagttagtatctgagccccacttactaaatgcctctgtcctagtagtacttccttttccaattttgatcagaggagacactgagcacggaggagagaaccacatgcataagtcaccaaaccctcatcaagcatctgttgtgcattgggctttctgggtgcattatcactgatcctaaaagataggcaaaatcatttccattttatttgtgaggaaactgaggcttagagtgaccaagtgatcacctgaggtcatacagctagaaaaaaaacaaaagccagctgtctccacacttggaggagggttgagtttggtaaatatgaaaaggacttctttctcccagagctgctgggtttttcagcctcgctggtatagccagatgtctttcctccctagcaagatgtcttctgttgaactcttagggctgaaaccaggttattgaagggaagctgccaccttggggagttgatgcatcgcagatgcagataaaggcagattgcgagattccatacctgcaatcagatggctcagattcctctgcggggtcaaatgccaccacaaatgtcttttttatatagactgaaggagctgataatgtaaaccttaacaacccgggcagggcccttttcatctccctgatcacactcatctcaggatgaaatgggccgcagggaagggttcacaactcaactctcaactccaaagkttcctgaaagataaccccacaccttgtgcaaagttatgacaggaarccccacaaggcctttgtgataagctctcccagcacattgctggggacccacaattgtttggcaaaggggtggtgtccactgcttcaactgtgactttggaccagagagttgtaacagacaaatgtggctcaggcccggcaaccgtgctctgccttatgtcagggactggctgagattacttcaagagggaaattgttgatactaaacccctacgtggtgtgagtgacactctagtgtcaggtgacaaccctggatacatatcaaggggatggggagagacatgctgaactggttgcagttgagttttgggagagcgttttagcgctataaccacttttagctctagactcaggcttctgctgagtttcagctccagtctttcatattccacataatagatgacctcctgctactcccagttatctgggagtctatgagccatgagtctaagtgtctcagaaatcaactactggtcacacatcccagaaaggcaatgaaagtcctgacactgtgggaatctcctcagcccatttctccaagcctgcccaagcagagttctagagctttgatctatgccaaagatctatgcccaaaaggccaaacttctagaagttcccatgtatacgtagcatgctagttcctggcccgaggcctttgtgtgtgctgtaccctctgtccaaaactccatttccccacttgtccacccacccatctcctcctctttcttcataatgtggcacagacatcctctcaaaagcagtctttctctgaacctccagggtagccctcctcctcttcctctgtgctctcgcagcctcctacctcaccccactgcccttctctctcagcacctctcttgtcaacactcaaytgggtgttcatcaatcttcaccaccagtcaagcccatggatggtcaaggcatggccttcaccatccctggagctgcacaaccggtgcttggcccatagaagatttttaatagacgcttaccttcttaaacacttggaagaattaactgaaaccacaaactcatgctagagcagcctcttttagaaatctcctcatttatttattcagcccatgtttttgtgcccctgctaggggtcatgcgctgtgatagcacaaggaagacaatggggagcaaaacaggccttgcctctgccctcagggagctgattcgtggcagaatcaaacactagtggcactattaacttttttcttaatagacattttttagttcttttttaaaaaatttttaagttctacttttaattaacaaataataattctatatagtatatatatttacattgtggagtaattaaatctaacaattctatcacctcacatacatattatttttgtggtaaaaatatttaaaatatactcttctagtaattttgaaatatataatggactactatttagtagagtcaccgttctgtgcaatagatcactcccatgtttactgcagaattattcaccataatcaagatatggaagcaacctaggtattcattattcgataaatggatttagaaaatgtggtgtctatacacaatggaatatttttcagcctttaaaaagaaggaaattctgggccaggcatggtggctcacacctgtaatctcagcactttgggaggccgagtcgggtggaatcacctgaggtcaagagtttgagaccagcctggccaacatggtgaaaccccaactctactaaaaatacaaaaaattagctgggcctggtggtgcacctgtaatcccagctactctggaggctgaggcaggagaatttagcttgatcccaggaagcagaggttgcagtgagccgagatcgtgccattgcactccagcctcagcaacaggagtgaaactccatctcaaaaaaaaaaaaaacacaaaaaacaaaacaaaacaaaaaaaaacccaggaaattctgtcattggcagaaacacgaatgaacctggaggacagtatgctaagtgaaataaagcaggcaaagaaagacaaaagaccacatgatctcatttaaaagtggaatcaaaaacaaagtagagtagagcatagaatggtggttaccagcagctgggatcaggggacagatggggaaagagaaatactgatcaaagggtacaacgaactatttaaccgtggttctgataaatgctaccaaagaacgaggccaggattgggtgggggaagcaaataaggcactggccccaagtgcaaaatttaaggtggagcaaaaacatacagggaaaagacaaatcaaaattaatacaaaaatcttcgtgctcaagaaactatccaaaatgtaaacaaaggccaaagcatcatgccatgtcacaatggagccaaaggcataaggaaaatatgcacccctatagacatgattttgcatattttaatggttattttttcccagaacattaaagtagttgaaaatcactgaacaatgtaaaagtaggatattaaaactcacattattttatgtttaaatattttatttattaccaagcagaatgtattatccttttattatagcttaagctaattaaaaaatcacgtaagattgccacttggtcacatgaatttatccaacatgacaattttctccagtgaaagcaagataagcaaagaagtagacaccaaaaacattattgagtgcttgcttccaaaaagcctggagtatacatttttcctttccttcaggcaccagcttggctcagaacagcatgagtctttatttaaaatttgcgattttgttcaccttgaattttttgcgttaattttgatacgttaaataattgcattaaaatactatttatcttgatatgaagggggttttatgggcacccacttaaaattttgcacccaaaagtgagtccctcttttgcctcaccctaatcccagccttgcagaataagggtacaggaggccaaacctaggctgagtgtgaaggagggctcccccagggatgtgacaatgaatgtcaatcctggtggaagatgacacagttagaactgtagagggctctgcctacagttaaaccctgggccaggaaggagcttgctaaagaataacgataagaactgcaaacacagacattatgctagtatgcagaggcactgtcctagcagacattcatttgattctcactacaaacttatgttgctggtattattgttacaattttacagaccaaaactaggacacagaaaaggtaagctagtagttcaaaatcacagagccatgaagtgatccagctagaatgtgaatgcaggcaatctcgggcccagtccatcctggaaacccttcctctctctcactcagagagaagtttacattggctagggtggagtgagccaccaggaggctgccatgagtggatagtgagatatagggctgaaagttccagccttgtgaaggtcccagtaggaattctaaacccttggaggaaaagtaactggtgccattttaatgttattttattttgcctctttcttcccgctatcatctttacagttgtcttgtgctttaatcttagaaatctggaaatattctgttcagatggtccctggaaagacgtagagcagaggtgttttattctaatttactttataatttaaatgagggatgtctcagtcaagacagagtggattccaacacactgctaatgcaaagccttgcccgtacagccatgaggtcaagggacctacagcaaacaagaacctcagcatcgtcagtcattgaccgtattcaacgacccttgtctacaggtagtaacatacagagtggtcaagcacacaggttctggtattaaattgcctttgtcttgactttgcaaccttgggcaaattacttaaagcctctaaacctcagttttctcacctttaaaatggggtgtcatcacagtgtctgtcattacagagactggctcagctggtcacaaaacgcatttttctcttctcctagcccagagctagcctatgcttattgcacagattcccttgcaatttggtgtggctgggactaagtattggccaaaagaatgtgcacagaagcaatggataccacgtccagacctgactcatacaacctcctttactgctgtctgctctctttcttcctttctctgtctgctggcagaatgctgagccccagggtgacttcagaagctgtgtgttgaatacagagcatctgtcagccggaatccctgattaagtatgtggagacagagctactgtcttggactaggtttcctccaagtggaggctgagacagggattaaagtatatgtgattcactgaaggagggatctcagggaaaaggaagtgtaaaaagcaggagaggacaggaaaaggaactaaccgagtatgtggtttcagcagggtactaagctgcggcaagattccacaggagccctggagcttggattccaccagagctgggcccacttggaagcaagtggggagggtggccttagtacctgtatcaggcagtaattggctaaaggccaccactgccaccccacgaggtgggaggtgtgacctcctgggtgaggcagacccatctctcctcccccagccattctgcagaaagcaattttctgaaaagcggggtagcagtgagccccttgtaccagcggaggcctgggcgctgggtagggctccagtagcacccactatagacatcccacttcccaatcaggaattcctgatttatgagagcaataaattaagttcattttcttaagcctccatgatttctgggtttctatgtatcattgtaaggaacgtaagcaatactgtgtacttcatggggttatgtaacgattaaatgagatgctgcatttgagttgcttaacatgtggtacgtgttcaatgaccattagccacaattagtaattattgccctgtggcaggtaatagagatggagaaatatctgttctgccttctctggagggcctcgtggccttgtgggcacaagacagatggaaattaatgattacagaaatacagtagggaccatgtctgaaatgtgctcatagccactcacacctgcatctacccaggaacagaataaaatgtttcaagccagaagtgatgcttgagttgacttctcaggaatgagcaggtgctctcaagcaggcaaaagagagaagagcacttccagcaaaagggacatgcatttatgctatgtccaaaggcatttcttgtgctccgaggtctctgtagtattcacacaagtgttgaccgtgcctgttgaatcagtgacctctagagttgaagcccaccttccacttggctatataatccaggacaggtcatgaaacctcttgatccgtggcatctacagttgtcaggggtgggagagggatagtgacaccatccctccctcaagcttgagataaggttttgattccagaactgggcagcataataccttgccatagggagtgctggattaatgttagcccctgatatgatttggcagtgtgtgcacccaaatcttatcttgaattgtagttcccataattcccatgtgttttaagagggatccggtgggaggtaatttaatcaaggggattgttacccttgtgccattctcatgatactgagagagttctcatgagatctgatgattttataagcggctttccccactttttctcagcacttcttcttgctgctggcatgtgaataaggacatgtttgtttccccttccaccatgattgtaagttatctgaggcctcccagaccagcagaactgtgaatcaattaacctctttcctttataaattacccagtctcatatatttcttcatagcatcatgagaatggactaatacagccccctcctttttcttgcatcccctccagctccatccttcccctggtggtctcccagagtgtcaacctcaggagaacttagttggaaccaaaagcttccacctcccagcctccttaaacctcacctttctcctctacatcagtcccaaactagaggctgagctacttgctaagggtcatacacttttcatccacactcccatctccattctcccaccagttcctgttcacaaccaagkccccttctcctttcccagtcttcctcttgcatgctccactagctagcagaagtttgaggaagtatttatgtgcaatgtacaaagtgagttccagttccctgacggccagctttatttttagcagccctccaggctcctgcatgtctctttcgagctccttggcttcccggtcttttcagcaggagcagagatgtgcctggatacaaataagatacacactctgagtcttttttacctaaatatttgcagctcccaaccagcaagtctaatagtccagccttctctctgtgaacctattttgtcttccccactcctcaactgcttgtttttccagtttttggattactgccaggagcaatcatttccctttccccacaaaggagcagagagatgcttccctttccaaatacagagacactggagcaggaggggctgcagaaccatatttggcaatggatctcggctacgctcctgcaggacaaggaaaatccaagagaggagacccaaaaataataataataaataaataacaacaacaacaacaaaaaaacctcacacaggagaaaaggtttaaggctttaaggacaaacatgttgcttagaacctaggggttgggccttataagtccccttaaccccagccaggtagctgaaaactgacatggctaagcccaaaacacaatagacacagctctgctgtccccactgtgtatgtgagggtcagtccactggggctgtaggtaagcccgtggctctggagtacctgccagacttgtgcccttaaccttcattcaaggtacacaacctgtctgagcctgttttctcatctgcaaaatgagataattaatgatgccttccttgcaggtttcctgtgagcattcaatatgatgattacagaaggtacttatcactgagcactgctccatccactgccagcgcttagtaaggggttgttgttatgattttcattttttacattcatttgctacaaaaaccctggaaactcttcccaagaaatgggaactcctgaataggatgattggcttctccttttttttttcttggcagccccagaacttagcatagcatagtatcgtacactcaatgttggctgaagatgaaaaggcagaagataccattcctagttcatagatcaggtctaaggaataagggaaccccagtttgtatgcctccagcccctgtcttttcactaagccatgcttatcctgagctgtctcacttacaaaaatgatttgtagagacaggtaaagttataacaggtgtttgtctgagggatcaagagggctgggggtgcttccatttcagaccagaaacaggcaggtgccagctggtgwtttcttgtcctacacaggtgttctgcattgccagttctaccccttggaatgtctcagctggacattcacctactcattcattcactcgttctttcactcattcattcatcaaggagtgattgcaaacctgggagcagaggagacaaaaggcaatgagacatgggctgtaccttcttgaagctcacagtctaccaacagacacagcctgtaaataagcaattgctgcatacagagatgaaggttttaaagaaggtttgcttgtggtccaactagagatggtggagtaagaggtcagaactactttgggggcaagaacaggggtcggtgaggactttatccagaagtaaaggctggagctggctgggacctcattgagtgaacaggatgaagaagacattaccagctgagaaaacagacaaaggcacagaggcatggctgagaagaaagcattaagaagaccacaaacagccaggtgtgatggtgcatgtctgtagtcccagctactcaggaagctgaggccagaggattacttgagcccaggagttttaggctacagtgagcaacaattacaccactgcactccagcctgagcaacagggcaagactctgtctcaaaaaacaaataaacaaacaaaagaaacaaacaactgggaatgccatacacctgggaagagttaggagcaatgcagctggagaaggcagcagaaacaggctgagcaagcctcatgggctttatcctgaaggcagctgtggaccactgaagattttcaggcagggaaatgatacgacagatttgcattttaggaacaaggtgagcctttctgatccatgtatgaactcatcaggcccacttaagtgaagctgtgctctatgtttttcttctgactctcagcagcatttgtcactggaggccatctccctttctttgtattcggggatggagcgcgagcttgattctcctcccacctctcagatcgtgtcttctcagcaagttcctgtttcaccaggaatttccaaacatgcatgtctcccagtttttctgccaaaaactaacggccttcattttctctctgctctgtctcttgggaatctcaaccacacctgcagcttcaacattttttttttttttttttttttttttttttttttttttgagatggagtctcgctctgtcgcccagtctggagtgcagtggcatgatctcggctcactgcaagctccgyctcccggattcacaccattctcctgcctcagcctcccgagcagctggaactacaggcgcccgccaccaagcccggctaatttttttgtatttttagtagagacggggtttcaccgtgttaaccaggatggtctccatctcctgacctcgtgatccgcctgcctcggcctcccaaagtgctgggattacaggcstgagccaccgcgcccagccgcttcaacattttaaagtactttgaaggtgagtcctcaacccaaatttccaacagggttgtatgtatgatagggagtcccacaatgctgctaaattgcctaaacattactggctaacattataaagtctttccagcagagcatatttgtagccatatgtgagagtttagctaaatcctgttttatgttaagattgtcacaaatgtattaaagtattaaagaggtaaaaagtagcgtggaggccgggcgcggtggctcacacctgtaatcccagaactttgggaggccgagacaggcagatcacaaggtcaggagttcgagaccagcctggacaatatggtgaaaccatgtctctactaaaaatacaaaaattagctgggcgtggtggcacatgcctgtaatcccagctactcgggaggctgaagcaggagaatcacttgaacctgggaggtggaggttaaagtgagccaagattgtgccattgcactccagcctgggtgacagagtaagactcagtctcaaaaaaaaaaaaaaaaaaaaaaagtagtgtggatactgttatactcatcaaatagattcttagccctcttcagcaagtatttactgaaaacgtactcaatatacaaccctgtgctgggcactatggaatatacaaaggcaacctttcacactctccttttcctcaatgtgttttgacaccagtgagaacagcaaggggcaataggacattgtgaccmagagcacaaactttgggcttgacaaacttaggtttgcattcttgctcctcacaagcataatcttgggaaaagttattccatttcttttaagttcagtttcttcatctgtaaaatggggaacatagtacgtccctcatagactggtttcaaggatttcattcaatcaaaacttaaaacataatgcctgggatgttgcaaggactcaattcatgtggttgaaaaatattcagccactgtgaaaaagtttggcagttcctcattagaagttatcatgtgatccagtaagttcatccctaagtatatacccaaggtaaataaaaacatttgtgcacacaaaaccttgtatgatagtgttcatagcagcattattcacagcagtcaaaaggtgacccaactgtccatcaacagatgaaaaattgtggtgtacacacatggtagaatattcagcaagaaaaaggaatgaagtcctgatatatgtcacaacatggagggatcccaggaacatgatgttaagctgaagaaaccaatcacagaggattacatattgtattttttcatttttataaaatgtccagatggcaaatccagactggggagaacaccacagggaatgggagaaggagactagaaggcactgcttaatggggacaggatctcctttggggtaatgaaaatgttctagatagaagtggtagttgcacaacattgtgggtgtactaaatgccatgaattattcgttttaaaatggttgattttatgtcatgtaaatttaatctcaatttttaaaaaatgaatcttttttggcactgaatgaatgaaagcacatcatgcttttcctggtcctaggctggtcctggcttttatgttggcttgaaattttrtgcattgattctgtgtcctgaaacttcactgaagtttaaaaaccatgggggcaaggcaggacccctgagctcctctgtagtcctcaggttctagcagaaattcagtagacagttcttgcctttatggagcttatagatggtaggagtgttcctaagctctgaagataagttaacaccttgtacccacaatctgcaacctctgtgcaaaacattgtaaagctctgagtctcagtttcttcctcaatgaaatagaagtagtaataatgccagcctcagagttgaggtgaggattaaagagggatgaattagtttcctagagttgccaccacaaatttccagcaagtaggtggcttacagcaacagaaatgtattctctcatagttctggaggctaaacacctgaaatcaaagtaatagcacggtcatgctttctttagaagctctaggagagaatccttcctggcctcttccagcttctagtgactccaggcattctttggcttatggctgcaatctttgctctaactgcacaaggcctctcctcttctctctctatctcaaatctccttctacccgtctctttcacccaggctggtctacctgtctcttaataagcacatttatcattggatgtaaggcctagccagataatctaggataatcttatctaaagatttttaccttaattacatctgcaaagatcctatttctaaattaggtcacatttactctttcaggaattagtacataaacatatctcttgatgggggcggggagctaccattcaattcaacccactgttgaagagataatcctggtaagtgcttttctggcacttagtgaatgtcagatatgttcttatgatcatcgtcatcattgtcttctttattattctgtggccatatccctgtatgtctctaggacagagtctaactgaaatcttcatctcactggggctcctccyaggccacagccttccatccttttttaggatgctggagccttttctcgtctctcccattccctcgaccccrgtccaaattcaattctcactgggattatgcagctcttctccctcaacactaccaaccacctgaagccccccatttctgcgcccacccactattctgagattctgggatcttaatcctgtttgatctgttggactatatgcactggactcttcaggtgcccctacagagctgaccctccgcagcccagtggctctctccaactcattccttttatttgggtcttgctccctcttggttgaagccgagggaacaacacacattcatcctcaactagggagctgataaaaagcaaagacagggctgggcgcagtggctcacgcctgtaatcctggcactgtgggaggctgagatgggcagatcatgaggtcaagagacctagaccatcctggccaacatggtgaatccccatctctactaaaaatacaaaaattagccaggcatggtggcacgtgcctgtagtcccagctactctggaggctgaggcaggagaatcgcttgaacccaggaggtggaggttgcagtgagccaggatcataccaacgcactccagactgggcaacagagcaaaactccatctcaaaaaaaaaaaaaaaaaaaaaaaaaaaaaaaaaaaagccaggcatggtggcttatgcctgtaatcctagcactttgagaagccaaggctggaggatcactgaagaccagccttggcaacatagtgagatcccacctctacaaaagaagtaaaaactagccatgtgtggtgctgtgcatctcttgtcccagcttttgggaggcagaggcagaagtatagcttgagcccaggagttcaagcctgcagtgagctattattgagccactgaactccagcctggatggcagagcgagaccaaaaaaaaaaaaaaaaaaacaatcaaaggcccaggctacatttccaaatccagttaaatcagaatttctggggattgggacccagggatttagatagatagatagatagatagatagatagatagatattttatatcaaaatatggggtgggtaggctctaaataattattatatatatttttatatattgtggtggcaactctaggaaatgaattc

SEQ ID NO: 51 - DNA, 176760 bp, Homo sapiens
gaattctgtatttagacctgtttgtattcaggatgttatatcttatacaagcattattttagggatagtaatacgacaatttaacatattgtgagcacatactatttatcaggcataaatacatattatatactaaatactgtactattaacatatgaaaggcaaaagagtataataggaaacagattcaaacatgaattgtggttctaccatttactacatatgtgaccttgagcaaggtacttttctcatcagcagcctatttccctatctatcaacaagtatgatggtaatacctaccatttaaggattatttcaaagaatgaatggagaaaatcaatgtaaagaatctggtatagcacttggcactgaataggggcttactaagtgcatttctccaccctatccatgtattttgggggtataggaatgaataagatacccccagtttctatagtctactggagaatacaggaaacagacatacaaatttcattgtttcctctttaaaatccttgtattagagacatacagtgataaagagctagagtctatttataggaaataggaagttcattatgtatatgtgctgggttccttgatatggtacatctgggaattttatttttttgtatgtgcatggttagccatcgttttgatttttggtggattttatacttgttacagtttttaaagtagatatgatttggcagatgtttagagtagtaggtgtgtgttgcttttgatgtctttgagaacacagagtcctcgagggcttggatgtctttctatagttgtattctctaactaataactatgcagttcatgagcgttaaacaatgtcactccaagttgcataagaggccattctacaggaagcagagggagttagtgtaagaaaaaactgaacattccacatggatattgttccatcccactcgacaaggggcaaaagtgactgagaagttcataggggattctggaatggatcttaaaatcttcgtagaacttgaaagatgtattcaacctaccaattccctgataaactgatgatggctaataataatgattcattcgaaacactaatgcctactcaagactcagaagatgggttgaatttgcatttatattcctaactagatgtttaattgcatttaaatactatttaacatttaaatgacactgtaatttacaaataaatatttctaccaccatttaagtggtgattaaatcatgattgtttgattcacacatcattctgtgtactattactatcccattttacagatgagcaagtcaagccaaagaattcataagtaatcaagacacaggtattcatctagtcaacagcagcagtacctatgagccccagccatgtctcgtgtccactgactatgcttttcccactaaatattggccatgttgggcaatgtgtcttgttacttgcctgtgtgtcaatttctttatctcttgactctacttcacagtgaaaatatgataaaaatgaagctaattaagaaattctggaaaaaataaagttttgtataagcctagaatgtggaaatgtggaagtggaccagaattaggtgtgtgtacaagtaaacctaccaccctcattgaagcctacaaaccaggcactctgaaattttaattattttttggttaacactgcatttctaaaagcctcctggaacattttacttccaattgccaattctttaaaatcctcttgggttgagtccaagcttgaaaaatttcatctgaaaatgaatgttttggttgtttttttttttttaacattcataaagttcagggcataaagtactctttcacagagaataaaaacaaagtttacagtggaaatcatgtcatagacaggccatggggcacttttctccctagccaatcagccagagctgggtaagtgaaggatggaatctggcctcagggaagaactttttagggtagacccaaccccctctgtgagactgctcctgctaactacgctgtgagcatactgggcttgcaatgaactcaaaattctcatctgaagtttgactttatttcaccatgcattgtgaaagggtgacttctccaatcatccaaaggaaacatggtctccttagcaaggctgtactaaaccagcctaaagccattaaacctgaaatccagtgctgttaacaagatggaacaagtgagctccatgccaactggttttcagccccaggtagactctatttaaacaggctgtgaactctttccaccacctgcgttctttaatacttcttagtgaatttaaaacaagtgatcccaagccacagtgatggcttaggagctgccaataccaaacgtattgaaatgcagtgttcccttagctgcctactctttgcccgtattatgctgcaactgtactgaaccacctacagatgcccacacatgctatgctttctgttgtctttgtgctttggaacctaagaggcccctccctgaattttctccctcatggctccaacaacacactcacctctctttctggttcaggacataggtccgatccttacttctcccttagtccttggactattctgcaagatctcaggtctgcactcacaacacacactatgtttgcttccatctcagcacttctcttcctattacttgcctgtatttttcttcattcaaccagttatgaattctttaaacatttggtacattctactctacaaaatttgaataaagaatgacatacatacaagccattcactgttgtttaggtgacagaaaactactagttatcaagtgccttcaatatgccaggcactgtgcttggtacttcaagtgaattttctcattatgtttttccaaatatgccgtgaaggtggtattattactaacatcatcattttataattgaaaaccttgtgctcagagaagctaagtaatttagaattgttccaagaccataccaagagaaattgtattcattttggaatacaattccagttctggagtattctgaatggaatcccatgtctgtctaacttctaatctcaaataatttccatgccatcatattcctttccttacttctagggaatagcactggtttcatactttcagactttttttttgtttgaattatccaagtgtcaaatgcatttttaaatttccttgaacagggacctgaaaatgctctggtgtgtcatttagaacccgcttcagagcgaaggcactaatttaatcagttgatgggagtgttgaatgctaattgcattgccctcttttggagaccacgagtttgcccacagttacactcccttcccagggtcagtctgatctaacgttagtcagtgtagatgtgctctttgtcccagttcaggaaaactctgcggggccaccctagtgctagagctccctgtggaatgggctagtcatcaattgcagctgcctcacagttcaacttctccctctgcccaatcctgtttccctcactctctctctcttttttttttttttattattatttaagttctagggtacatgtgcacaatgtgcaggtttgttacatatgcatacatgtgccatgttggtgtgctgcacccattaacttgtcatttacattaggtatatcttctaatgctatccctccccctccccccaccccacgacaggccccagtgtgtgatgttccccttcctatgtccaagtgttctcattgttcaattctcacctatgagtgagaacatgtggtgtttggttttttgtccttgcaatagtttgctgagaatgatggtttccagcttcatccatgttcctagaaaggacgtgaactcatccttttttatggctgcatagtattccatggtgtatatgtgccacattttcttaatccagtctatcactgatggacatttgggttggttccagtctttgctattgtgaatagtgccacaataaacatatgtgtgcatgtgtctttatagcagcatgatttataatcctttgggtatatacccagtaatgggatggctgggtcaaatggtatttctagctctagatccttgaggaatcaccacactgacttccacagtggttgaactagtttacagtcccaccaacgtgtaaaagtgttcctatttctccacatcctctccagcacctgttatttcctgactttttaatgatcaccattctaaccggtgtgagatgctatgtcactgtggttttgatttgcatttctctgaggccctatctctcttataagtgttgttcctgaagacactatccagtgaactttctgcatgcaagtctccatctgagactctgtttctcaaaaaactcaaccataggtatgacaatgagaagtccatgactacaaattactaatcagagtaaaaaattgcaagcaacattttagtgatggtttaaggatagaatgcatgtctctccaaatgcactctctggcccagaaagtactatggattttacaattggaaactggacctgctttgcaatgagaatggtcagcccttgagcttcataactccacctgttcactctgtgactttgtctaggtcatgtaacttttgtaagcctctgttttgcatggaactccaccaaggcatcaggcacatttttcaagtatgccctatggttagggagggagagctcttgggcgctggccactccaaaaagtcactcatctcttaatgggattgtttatctagtggcagcctccactttaagaaaaaggaaaaccacttttctcagtggaataagccactactatgcatgccagtcaagattttaaacatatgtgtttttaattatgactatactcagataagagtggccaatgatataagtaggaatcacaatttatgccatataaccattcagccatcacacattccttattagtcctgatacctgtagtttccaatatcgtacctcattgtcacagttatggtgagattatactgaaaaatataaacaatgtatatctagaaatggcaaaggggttcaccctagagaagagaaatctcagggaagacatgcaattgtagctccctttatggggttattactgtatgttactctatgccagacctgcatggggagttgttgatcaatcggtataaagagttaggtaagatgggtcagttctagtgatctactgtacaatgtacagtacttagcaataggtattgtgtactttaaaacacgtttaggaggatagatcttatgttaagtgttctaactacgaaagaaacacaaaggaacaaaagggacttctttttttttttgagatggggtctcgttctgtcccccagcctggagtgtagtggtgcgatttccgctcgctgcaagctccgcctcccgggttcacgccattctcctgcctcagcctcccgagtagctgggactacaggcgcccgccaacacgcccggctaattttttgtatttttagtagagacggggtttcaccgtgttagccaggatggtctcgatctcctgacctcgtgatccacccgtctcggcctcccaaagtgctgggatgacaggcgtgagccactgcgcccggcccaaaagggactttttagaggtgatgggtacgtttagtaccttggtcttggactgtgaccatggtctcatgagtgtatgcacatatctgaacttatcacatgtgtacattaaatgtgtgcaaatcatacctcaataaaacattctttttttcttatctttaattctgctattttttttctttagataccaccaaattcactggccatttaccattcaaaaatccagaactatgcagaacaggcactcttcctctccattctatggatgagaaaaataaggcttacagtgttttaataccttactctagtccacagagctagtaaatgcctgagccacattttaaatccaggtttttcagaatttaaaaccttgatttttattttgtttgtattatgttaccttctatgtttatttttcgctattttattgtcactttttcaactttattgtaataagatcatttaacatgagatcagccttcagcaattttgaagtgtatagtcactgttgactataggtacagtgtcatagagctgatatctagagttcattcatcttgcttaattgtaactttataccaattgatgagtaacttctcatttcctccttccctttagctcctgaccatctataattccagtttttgactttataaatttaactattttaggtatctcataaaaatggaatcatgcagtatttgtctttctgtgactggctcatttcacttagcatagtgtcctcaaggttcatctatgttatctatattgtaggatttccttatgttttaaggctgcatagtattctattgtgtgtagagaccatattttcctttttttctttcttgctttctttctctttctttctttctttcttgcttgcttgctttcctgctttctcgctttcttgttttcttgcttttcttgctttcttacagggtctcactctgtcacccagactttactgaagtgccacaaccatggttcataacctcagactcaacctgtcttggctcaggtgatcctcccacctcagcctcctgggtagctggaactacaggcagaggcatgcgcccctctttatttatttatttatttatttgtagagacaacgggtttcagcatgctttgctcacgaggctggtctcaaactcctgggctcaagcaattcacctcaggctcccaaagtgctaggaatattggcatgagccaccacacccagctactgtattttcttaatccattcatctgtcaatgaacatttagtgtgtttccacatcttggcttttgtgaacagtgctgcaataaacatggaagtgctaatatctttcttcagtattctgatttcaatttttttggataaatacacagaagtgggattgcttgatcacatgacaatgatggccacaagaacatttgggctcacagcctatcattttagcagtcccaacagagagaatagttaccctttcctaattgctctagaaaaatctcaggattgcatctgagtaagttggctttgatcacatacccacttctgaaccaagcactgtgaatattagacactttacaattattgtccagaaccgaggaatgtactaactttcaagctagaagttcagctaaaaggagctaaaatcacctccttctaaattatgtgaacagagacgaggaaaagggagattctccaaaggaggggtgaaccaaaggagaaggaaagaggttgggatggctgaaatggcagatgccttctgtgggaaagagattttcatacctgcagtgcacattgttggaactcttatctcctccactcttacagtgtctgcaccgaagcctgactgccaacttccagcactatgctcctttgccacaaggctgaagttaactctgcctgtacaaaaggcagaacagcaattctggcctgccacttgcatggaagttaactcctttcaatagcaaattcaataaataattgtgcaatctggtacataaataccccggctcccttaccccttaggttaggtaattctgagatatatatgctaggaatatcgtccttaaagttctctaacagaattaagcttcatttatctgaagctgaaaatgtaatcaaaatatatcccatattgtggccgggagtggtggctcatgcctgtacccctagcactttgcgaggctgaggcagaaggatcacttgagctcaggagttcaagaacagactgggcaacacagtgagatcttgtttctacaaaaaaaaaaaatttaaatagccaggcatggtggtgcatgtctgcagtctcagctacttgggtggctaaggtgagaggatcacttgagactaggaagtagaggctgtagtgagctgtgattgtgccactgtactccagcctgggaaacagagaaagaccctgtctcaaaacatatatgtgcatatcctgtattgattttcttccattctctgtgtcacttctccatatccctatcttatattatggaataacctcccaaagaaactaattgtgcttgaatccttgtcttacaggtaaaaagcaatgagataggctgttccatgaagtagcaagtttctcagcagtagaagttttcaataatgagtagaaaaatggatttggggagattcaaaaataaaataggtaattggattgcaggacctacatttagaccatgcagtcccttctaaggctaagttgaattattacttgtttgacttgtgacagagtcattcttgcagaaaaagagatgtatgttcatgccttggattctgaaatttgtgaaaggagataatataaaaagttatctggggagggaatattttttaaaggttatttgaaggtacgagggttagcttcctcttttgttgtaacctattcttataaaaagacctttttgagtgcttcctttgcctgggaagacctcaacattacaggaggatgtcatttccttggctctgactagttttaaattttgacacccaccatcatccaggcagagaaagagccttcccaagataacctaaagtcaggaacatacatggctgccacatatgttcaataggaggtgagagtgtgtcatcatctaaagttctttgtgttggtttggacatgtgcccaggagacagaagtgtaaaggaagtgatttctctcaaaataaacacatcaatcaaaaaaagatacagaatataactattttacctttttgatgtgtgaaagaaagcaatgtcgtatgaaatttattccaccatgatgattttacttccccagtggtaattttctccagctcactcataaaaatactaataatggacaaaatttgttgagtgttaactatgtattgggcactgtgaaaatgacttaatataaatcatgcattgaatcctcccaagaaatgggtcccattaagttgtccacattttacagaaaaagtaaccaaagccgagaggctaaagaggcttgctgaagttgacacaatagtgaggtgcaagtctccctgtctccaaagatatattagttagtaatcgctgtgtaacaaatcactccaaaatttaatgctgaaaataataagcatttatattgctcacaagtctacaggtcagctgggaagttttttctggtcttagctgggtttattcatgcatctgcaatcagccctcagttgggtaggccgctgctgctgtttggactcactcacatgttcggaggttagctgacaactggcaaatctaggatgttcagaattgaaataagtggacttttctccagctggtctctcaccctccaagtggctagcctaggcttgttttcatggcagtggcagtggtatgatgtctaggccccaaacggacacagaatcatttgtatgacattacattggctgaagtaagtcacgtggccagcccaaatttgaaaggcagggaaaaagatcctgtctcttcatgggaggagctacaaagtcatgctgcaaacacacggggaggcatgcgggattgcagttaatcctccatggacgcttatgtttctaccactgtgtccttccttgcatcctggcacctctctggcaaagtataccagcaggtgttcttcaccttggttttgcctgaatgaacatctaagagagagatagcccattaattgccaattttgaaagagactttcaggtcttgtacttatctcctacccatgttaaatctcctctttcaaacctcccacaaacaggccttcggcacctgccaagacacttccagtgatggggagctcaatattattacgttaaattgacttttgtttccttttacagtaagtgctttggaatagggctctcacctctatatttgtgcaatttctttttcaggcatcctgttcctatgctcttccttctatacactgaaatcttccttctagcaattccccatctctgctctttttcttgctccctggagcagactaaaacaaatctgtggcttctcctatatgacaactattttatatccaaagacatttatcaatttcttcatcaattctccaggtctttccagatttaattattcaactgctcctctaatgagatcaatacactttactgtgtgtacacaggttgtcaatgttctttctttatgtggtacccagagtcatctacatcctctgagtaaaacagaaccaaattgcttgtttttcctcctctacctcttcttccttttgtagttgcaggtcattcttactgcattaaattgaatttggtttctcactcacagtaagtaatttggaacaggactgagagccctatttttgtacaatttgttttcgaaccaaaggagaggcatcatctgactttctccttttattatttcctctgtgagttcagtcctttccttctagtcagttgctgtaaaccttgatgcttttatttagactgtttattcatcactcagtggtcttctactgagatacttttcagtacctttgtttgtgatagctgcttgggacacaaaactgggtaaaccccagcactggtccttaaagagttttcaggctactgggtgaggccgtggtttaaagcagtctctttcgggcaacctcaggctattttagaagcatgcttgtttttcagggtttctcctatacccttcttcgacatctcaagaggacacctgagaaagaagactgtgtggccctgcggtgtcaggggagcattgtctggttcccatgctgtcttctgctgtggacttcctcagcatgttgacgattttattgggtctggatgtcaaggatgtcgatgctcttattgtcttcctctataatgacctcagatgtttctgtggcctccagtcttgaagtccacattctgaatgtgccctcatgttgactcccggcttcctccaagctcaggatttccatgtcccctgagggccagtggcaataatgcactgtggctctctctctagttggtagtgacatgtgagagatagcctgagccatgtcttggcttccctatgacttgctcactacaatggattgtaattccatgatgactatggaacttctttgaggggcttgcagactccctaggctttttctgaggattcaaggattccagttctgttttacttactttctcctaaatgagattaggtttctgtaccctccagcttgacattttacaccaaggggtgagctggaacttggatggtcatgttgtacatcttgaatagtcattctattcttttatctttaacactcagactcctcccaagcactctggtgactctctgagccatcgttttccttctgtgagaacttccctgcatcagtcagttctcacaatttctataatctgctctgtaagtgccttcaagttctgcctcaatggaagtcacaagacattttttgtttgttttgtttttttctctgtcaacaaaaccagccatctgtacatcaaaagcatttgccttcataccattgtcttactgtattcttagaacagtattccagaactcaaagcaacagagtctctgtgttcagactggttcttctcgtaaacaaaggaaaaaatggtcattaattttataggggcagaaagaaaagggacaaggacttcgggaactaaaggttctgtctacatggggatttatgatactattctctcaatgatagatctggaagtttgattcaccatgaaaaaaaaaccacacttttaaatgcttaattcctgttaaacttacaaagaaatttgacatgccaaataataaacaaagaattcaggaaccagagtggtgagaatgatgtgatttgagtgaagattttctaaaggcttaataggatttcttccctttctcttattttctgtaccacctaaattctaataacagaggacagttaactttctgttattagagctctaatccagtcacaaaaagagaaaaaattaaagagagaaaagaagagaaaaagggaagggaagaaaaaagaaagagaaaggaggggaaggaagggaagggaggggagaggagaggagggaagcgagggagaggagaaggaaggggaggggtgagatggtgaggtgtggaggaaaagttaaatattaaatttgaactcaattgaacatcgacacaaacaatggtcaccaagtcccagaacaggttgtgtgtgccccttgaggcgttcatccagcactgtttcagagaaatccctatttcaatctattcctatacgttagttattgaaaagcaatagacaatcacaaaaaacaagttgacctttttgtgttccttgagccaaagggccctcatgactgggcctcacaccgaataactcgttacaaaaagagctagggtcccagactgcgccaaagcttcaggagactgctcctcgtctgtgcacagatgagtggccaactctggagcccaggttgttgcttcctagtctggtggtgaatccttcatagtctggtgagtataaatatatatatatatatatatatatatatcttcccttttcattgcaatttgcttattatattatttgcttattatatcaacttgcttattatattgatttgtttattatatcatttgcttattatatctgcatcgccatttacatgggataaaggttgtttatccctaaaggcattgtgtatgtgtcttttcttctccccttgcacgtttcctgcacagaacaggaggaatagaaaaaaaaaaaggagaggggaggggaggaaaagggaggggagaggaggggaggggaaaagagaaaatcaaaatggaccaatgactagtgtttggaacactaaaccccaaattaagtcttaaaatgactgaacattctgagataaaagtgacacacacccatccccaccccaaaagcaaaaaggacaatgtaagtgacagacagaaaagaatgtggagactgtgacatggaatcccttaatttctaagatcgctcattgttctgttggaaacagagggttaggtaagtgtctaagacagagccagtgcacaagtgagtggtagagagagtgataaagcatctcctattttgaatgagatcttctgtctcttctcatacatatcccaatccacaacagcgaaaaagtaatacgtagattcattcattcagtgactcagcaaatagtaagtgccatgcattttccaaaacattaataatacaattgggagcaaagcagacaaatgtcccttgccctgatgggagaacacaggcattaaataaaataagtagatcaaaatatagtatatactaagtgatgagaattgttatgggaataagtaaagcaggtaaaaaggaatgaaggccctctgtgaaggaggatgctgtttaaaataaggcgaaggcaggcatcttgagacagttgcatttcaacaatggcctgaaggaagtgaagggcacctgagagaaacatgttccaagtagaggaatcaagcacaaagctcctgaggcaaggcttgtggacttgtagcaaaaaaggccaatatggatggaccacaacagggaggagagcctgcaggtaaaattggagacatagtgggagctggccattttaagaatttagacttttatcatgagtgaaaggaaaagaactgaaggagttgggtgtggtgtttataggatgtacacaacaaagtcatcgcttagctgctgtgttagaagtaaaccataagtgagccaaaggcagaagcagagagaccaggtatcaggctgtcaaaaagaaaaaaaaaaaaaaaaaaaacaaaaaaaaaacacagagatgatggtaacatggaccagggtggcattccaggtggtgagtggtggatggaccctagacagattttgaatacagaaccagtaggatttgggaatgtattagatgtgaaatgtgagcaaaaggaggagttaggcacttttgttccaattgaaggatggagttgctattttttgaggtcaagacagcagaaggagcaagttggggaggaaggaaactgggagtttgttttgggcaaacttttaaagacattcaagtgcagacgtcaaatgagtagttgtatatgcagctctgttgcattcacagatttggcaatgaatttgggagtcatcagtgtatagatggtatcaaggctgtaagactatatgggagtgagtatagacaaagaaaggtgatgtttaagaactgaatcctagagtataccaaagtgtattgtttgggaagttgagaagcaaacagtagaagtgactgagatggagcagcctgtagggaatatcagaatggtatcctggaagaaataagaaaatattttcaatgcagagggagctgtcactaggtccaatgttgccactaggtcacttaaaaataggaatgagatctgcaacatgcaggcttttggagacattagcaagacacatttttataaagagggaagaatataagcctaagcagagtgagttccagagagaaagggaaaaagatttaagagataatgagaaaaagcatctctttagagaagttttgctaagaaggggagcagggaaatgtggtatcaaggaaaggagttttgaagatgggaggaattacacacagacttcatttgcaaataaaaatattggtatgggagataaagagtgctttctgaggcaccatccttgagttggtaagagggaatgggttctggtacaaaaatgcagagaccggccttgcacacaaacatggattgttaattcacactgagagagaggtgagtatatagggcagatacaggcaaggtagacgtggtgcagggattgggagaaaattgccttctgctcccttctcttctctcagtgaaataggaaacaagatccagacactataggtcactgtgcagtcacatttttttggattcaaggtcctggaatgagtgagttggaaagatggagtgtggtggttaataaagtgaaatacttgaaaccgagattacagggagtggcagtgattttaatgccaagacctaaaaagaagagagaagaggtaagagagttaaggtcaagttactggaaagattatcttgactgctagtgaagtcaccagtttatgatatgaacagtatgattatgattatgagaacaggtcaggagttaaaaacttcaaagaataagggggaattctctgaatcatgggtttgtagatgcctgcaataaacaggggcaactgaaggtatagatggatgacataaacttcaaagcgagttttcagagagcaggcagggagaagcatctggaggctggaatgaggaaataagaggacacctagtcaacctccaggctagtgatagaaagaagcagaagaaaaaaaaagtgacaaattagaaggactttatgaggaggcagggatcccaggagtatctgagtttccattagagcaaaaaggcaaaaagggatttataaagaagtggcacaggttataagggattttgctgatgactgatctggaattgtacaagggagggtgagggaattagaaagaggtgaagatggggtcagattaggtggtatacagagcagtattggggaagtatatgggagctaaaggatgagctgggtgtctggggcttttgtagtattttacggacgtggagatcaagggaggatcttctgcaagacaccagtggtgagattgtgaatgtcaggggagatagggtgtggggtctttcttggagcacccagggctctgaggcattctcttctccctcctgccaatggcagtatggaaagcaaggaagaaatagtgttactataaacaattaagcatgagccccctcctcattctagccaatgtttttgctttcttcattcattatacaaataccttttcagggcctcgtaaacctgaatactagaatataatagtgaggaaaatgtcagtttcttctctcatgtagccttcagagtattggaaaaaactccgttccaaaacccaagacttattcattattctataccacctcttcaggggctgcttaattacctaaatctgagtatctatgacctcagagaagggatctgggctgaaaatacaaacttgagccataatcaagtacaatatggcctaaggaaagagtctacactcagaagagaaggactatcaagagtctgaaaaattgggggtaattggagtggttccagaaaattaaatattgggaaatgtttccttttttattttatttatttatttatttatttatttatttattttatttatttatttattagagatggagtcttgctctgttgccaggctggagtgcagtggcccgatctcggctcactgcaacttccacctcctgtgttgaagtgattctcctgcctcagcctcctgaatagctgggattacaggtgcgtgccaccatgcccagctaatttttttttttttttttttttgtatttttagtagagacaaggtttcactatgttgggaaatgtttgctttttaaaaaaggagtgtgttagttttgcaggggtggcataacaaaggaccacaaagtcatgacttatcacattcatcctctcacagttcaggaggctcgaagtctgaaatcaaggtgtcagcagagtcagttcctttagagagctctcaggcagagcctgttccctgtttctctcctagcttctggaggtgcccgcaatcctttgatttccttggcttatagatgcatcactccaatctctgccgctatcttcacataacattcttccctatgtctctgagtcttcaaattttcctccccttttaaggacactaggcattggatttacggcccaacctatcccaatataacttcatcttaaactgattacatctgcaaagaccatatttctttttttggacgatgtctcgctctgtcacctaggctggagtgcagtgcgcaatcttggcccactgcaagctctgtctcctgggttcaagcgattgtcctgcctcagcctcccaagtagctgggatgtcaggcgtgtgccaacacaccaagctaatttttgtatttttagtagagacggggttttgccatgttggccaggctgttcttgaactcctgacctcaggtgatccgcccgcctcagcttcccaaagtgctgggattataggcataagccatcgcgcctgacctgcaaagaccatatttctgaataaggtcacattcccaggctctgagtggatatgaattttgaggtggcactatagggcccactacaggggaaaaagataaaattataacaaacccatgtgtcattccatgttgatcatgtgccagtaacttccaggtttttttttttttttttgatcatttaatttgagttcatcagaaagagtccattttcctcctgttgggaatgtttttgatctacatgtaaagtcacttggtcatgtctcttgccaggtgatcattttccctaggtcagtggtcatcattattaaaacggacattgattccaacccctggggtttctgatttagtggttcaaggatgcggccccaaaatttgcatttttaaaaaagttcccagatgacgttggtgttgatgttgctcatcccagacaacactttgactcccagaaatcaaatttctctgactctgtacttagagaaaagcatttctagttatgtccagtcattgatgtctctatttcctgtgtgtggttgatgactaggtatgtggaaagaaccctatatacaggactgttgtgctaaggtcattatcgtaatattgataattattctttgtatcccattacaagttgcaaggtatcttcccatactctatttaatgtaacttttgaaccagtgataagttggttactgttgctccattttacccaggaaactagttcagaggtgtagtgtaccttgagacacatcattgtgagctcatggtagaagctgggtggcaaattctcacctttttattctagagcctgtgtaatctgccacccagcagctattttatagcttttgaacctaaattttgatgagaactatctcggtggtgctctgaaaatcactgcaaattaagacaacacacaggtttgtttcatagtgtatttgtgctaccagctgcatcatcaaggtggtgacgatggtgtttcccctcgctcttcttttctaatcttagtaaagggcttgccagcccagttcatccgagttctttgctccctgttccctgattgtccgaatggcaagttttgtatatgctaaggttcacttcctaacacgaattctctgaggttcattggttaatgaccctttcttctcaggaaccagagaaataaacatgatgtgggttgtgttctgtgcaggttgcttcaacttttctcctccatactttctctccgtagcatcacacatctgatgagtgggaaagctgagatttgaacctgtgccatctgtttcaaagcctgcctctaaccatttcacatggccctgctcactgccctcaacagcacttcctgttctatcagaatcttgctgaactccaatctgacattgcgggtgctcaagaaattcaccccacacatttgcatcttcactgtgctccacccaggctggctgttcctggtggaggagtttccagctcacctggggttcctaccctcatgcaggtgacaggtgtctgagtagctgaaaacacaagctttagacccaggcaactctaaatatgacgcaccactttttcttcttactgtataaccttgagtaagtcactgattttcagaaccactgtttctttatctgtaaaatgggtacaagaatatcaagtgtgcgtagttgctgtgagaattaaacggataatttatgcagcaagaagcagctcaatcattggagcttttattatttctgtcatcctattgcctctgcctagagcccctaatctactccttttctctctctctctctctctatctctcgaccaggctggtcttgaactcttgaactcttgccctcaagcaatcctcccttctcagtttcacaaagcattgggattacaggcatgagccactgcaaccagcccaagcttgatatttttatacccattttacaaatgaaaaagtggtggctcagagaagtcagtgacttgctcaagattacacaggaaggaaaggaatggggagtcatacctagagttgcctggatccaaagctcgtgttattagctacacacacacacacacacacactcatcatcatcatcatcatcatcatctcatttatctccttatggaggctgcaactttcttagccacttttagtcctcatcagtcccaagcccttcaaccagaatagaaaactgaaaggccctgactcctccctttttttctatctgccagcagcaccaaacaaaccctgcatgtagggtctctcccctaggtatgcatagtcatccctcggtatctgtgggggattggtgccagaactcccccatgaataccaaaattcacagatgcttaagtctcttatataacatggtgcagtgtttgcatataacctatgcacatcctcccgtatacttcaaatcatctcttgattatttataatacctaacacaatgtaaatgctgtgttaatagttgttaactgtattgtttagagaaaaatgacaagaaaaggatgtctgtgcgtattcagtacaaatgcaaccaccatttttccctcaaatattttgactgtggctggttgaattcgtgaatgtggaacccacagataaggagggcccactgtattttgctcagctagctttccttctcctccctccttgctgcttaaccctgaggcagtctttcttctctctttatcctccagggctaggtgaggggctcacaagctgagtcaccatgctggagtgcaactctctttgcatatctctctctctctcccaaattaggagcctcttgagaacaggacctggggctttgctctttagcttatctgcatggatccagtatagtccctgcatacagctggctctcaggatttattgaatggctgattgcttcctgaattagtataagaatgccagccaggcatttttcagctgggtgtggtggctcctgcctgtaatcccagcactttgggaggctgaggtgggcagatcacgaggtcaagagttcgagactggcctggccaacatggtgaaacccacccccgctccccgtctctgctaagaatacaaaaattagccaggtgtggtggcgtgcgtctatagtctcaggtactcgggaggctgaggcaggagaattgcttgaacccaggaggcagaggttgcagtgagccaagatcacgccactgcactccagccagggcaacaagcaagaccctgtctcgaaaaaaaaaaaaaatgccaagcaccatggtgagcacatgggtgaccctgcatcactgcttgctgacttggtcttagtaaatatgacacttctggggctcctggtgaatgtcctgacagaggtggcttggcttgaattgaaatctgggagtgctacatgaaggcactgtgagacaacttatgccaaccctgactctcttcatggcatctcactgatgccacctttcttgctttcattcacagtattttttttttaagaaatgatcttattttattttttaatttttattttttaattttctttttttattttattattattatactttaagttttagggtacatgtgcataatgtgcaggttagttacatatgtatacatgtgccatgctggtgtgctgcacccattaacttgtcatttaacattaggtatatctcctaatgctatccctcccccctccccccaccccacaacagtccccagagtgtgatgttccccttcctgtgtccatgtgttctcattgttcaattcccacctatgagtgagaacatgcggtgtttggttttttgttcttgagcttctctctggccaaggggaaaattgccttcgggattgaaatgaatagggtgcgggcaaacctcacctctggattgttatggttgtgaagttgctacaagtcaagctattttgccaggaagtttccattaatttacatggctttccagtaaggtgcaaacaaacatctgaggcttatcgcttccagacatcacccttctcttccaatcatcctttggagcatcctatcttgagagtcttcttcctttccatccctgctgctctcctccacccccgctgggagttgcctctgtgatgccttaataagttcacatcttgcaacacatcagaccagatcgaccctgcttccagccagcctcactagctataaaatctttgctggacttcaaaactccttcttacccacgttcatgttggtaagcctgatgcagttctctgttgcttcaggatgaggaaaataacacttgctttattttcatttccattccagtcactgaggcagccatgcttggtgacaaggctctgattatgaggctgcaggctggcacagtcagcaatgactaatcctaacacagtagtcaatgttagttaagctgcaggggaaaaagcaaaaagaaaacagaagcatcagcaattgcacggttggaaataaaatgctatcagggacaatagactaaatcaaaagatgttaattcaccactattcaataaagaggaactgagggaaatataaacagtgaagaagacatgaagcccgcccttgctgtgcttatgggctggttgggcactggactcacccagtgtgagccttcagaaggaactccctcaccaggcttgctattaaaatagggagtctgatggaagtactggtatccagcctttttagtacaaggaatgtctcttttgttgcttttgtccaaggatccgatgtttggaaagaatctgatccaaaaataaatgatcaccgttttcgtgagtccttaattccttgtatcagttttctattgatcaaagatatacaagtcacaaataaaaactgctgatcaacaggaatcagaaagtaaatccaacttgaagcacagtttatttaacattttagatagtttataaagtattaacaaattaagctgggtgtggtggctcacccctgtaatcccagcattttgggagaatgaggtgggtggatcacgtggagtcaggagttcgagaccagcctcgccaacatggtgaaaccctgtctctattaaaaatataaaaattagccgggtgtggtggcacaggcctgtaatgccagcttcttgggagggtgaggcaggagaatcacttgaacctggaaggcagaggctgcagggagcggggatcataccactatactccagcctagttgacaaagcgagactgtctcaaaacaaaaacaaaagcaaaaacaaacacaaaccagtattaacaaattaatgagttatttccttgggcttttaaaaatattgggaattgctcatgacctcactgctctcaactccacagtacctttgctttagttctcaaagtgtgatatgaaggaggagtgatggtctgtgcatttgttcagatattcaagctgtccctttgcttcttatgtgcaagtgattttcagttccatggacttgagtttttgcacttcttggtgttaacctattatgagaattcttcaagggttactaaaattgggttatttacaaaaataaatcctgtctgttaccagcaattactgaggtctctaattcaggactgtcctgagtgttggatgtcacatatgtcaaaatattgcaaagctcctactgcaaatggctcatgtaaccaacactattagagaatatttcctgtttagaaatttattttaaaaattgaaattaaaattttaatttaaaagttaaaattattttaccactttaaaaatctttctagcatagattatacccttaaacagaggatatgaacctatttacctttactaatggccattattaaattcacttttactctgtttcttgcacagagagagagagagagagagacagagaggggcaggggtggggggagggttctgaaagcctgatgcactggaatccagcatatctttaattggcaattatatttccccttttccccaaaacctgtttgaaataggcttctgtcatttactacttgaaaaagttactgatactcttcttgcagagtatcagtgcagtacaaattacacctgaaggtgttaggttaaataaaacagcatcagaaatctctttaacaaaattgatcctcaataaattagttggtagacacattcttccggaaagacagtgaactcagttttctacacatgcttttatttggcctgaagaaaataaaatcatgccttactttttttattcttttctctttttttgtgagatagggtcttgcttgctctgctgcccagactggagtgcagtggtacaatcacagctcactgtagcctcaaactcttgggctttaagtgtttctccctccgcattcctcctgagttctgggactactggcacatgccaccatctctggctaactttaaaagattttttttttttttttgtagagatgggagtctcgctatattgccaaggctggccttgaactcctgggctcaagcagtcctctcatcttggcctcccaaagtgctgggattacagatgtgagccaccatgccccacctactttatatttttaaagagcacttcagagtcttctaaatacttacacagctaatattttacctcatctacagacacctctctaactctttcagctatttcatagactgttgaccatgtagccaagcagagaggatggagtttaggaagaagatgtattcgtaaggagagggatttcattccaaaggcaaaaagatctactaaaaaatatttcttgaacaccttctatgataggccctcggactatagtagtgaataagacaggcaaaaccattggcttcacagacaggaaaatgcacagagcaagcaagactgctttatttcactcagagctagagagactggcaggcaattgcctgtcatctcctttgtctatctcagatgaaaacatcaaaatctgatgaaagtaaaagagataaatttgggacacaaaatttaaagtcacgatctagcctgcattagacttgggtcatatagcttactcaacctttctaagcctctaatgggacttaccttccagggttgctgggaagatccaggaagatgatgcatattatgcaatgtacctggtactcccaagttctcagtgagggaatggattctaaataaaggaggactgaaggagtccactggcttttctcagaaaagtctatttcatattacacaagcagtgccaaggcactatatacaaatatatacatgtataactcattcataatttcaacacctcctaaaaatactgcttccatctgcctatgtcctttctccctgtgaccacaaacacacatgacatttgagctttaatcagtgtagttaccatttctaaatttattgttttattctctgaatatagtatgaaaagagtccatgtttacacactacatttgctacagctataacacattatttagacattatttttaagtgcatacttacattcatccagttttcagcagtatgaatagcgtggcaaagtatatccttatgcagaaaaggtgacacttctttcactgtaaatccttagaacaggcccttgggatggtagacttaaattttattaacatctctccacgatgttattataaaatatttgttcaattatcaaaatcctttggagaatttagggaaattgaaggaatggggcttctcgtggcatgtgaagtggttatgtggagagagaacaaggatttagtgtggaatgagatgtatatagggagggagcattggaatcactgtgtgaagtggttgtaggagatattactagggattacgaaggagtaagaagtggctgttggtcggaggattggagtttatcacggtgtgtgaaggatgtgtcgtatttgaggatcggtgttactctggcatgtgattgggctgtgggcacgagaggattaggatttgctgtggagtgtagtcatttagggagcatggataggggtttattgtggagtggctttagggatggaagaactgcaaataactaaggggttaaaagtggatgttagcttacagaatgagaatttaccctggggtttacctgggaatgtgaactgtttgtagagaggaaggtttggggattcacatgaactgcagaagggctgggagaggggagagcgttcactgtggagtcaagcattttggggaggaaggattgaaaatgactggggagtgtgaagtgggcttgaggatgggggtcctgtggagtgagaagcgggtgtgaggatagggggactgcagtttattgtggggcatgaagccgtgtgggagaggaggtttgaggattcctgtggcgtctgcagcatgtgtagagtagaaagattggtgattaacgcgaaggtaaaagagctgcagctgtcctgtggagtgtaaggcatctgaggcttggtgaattggggtgtattgtggcgtgtgaagtggttgatgagagggatgagtagtacttgatttcaaatataacctggttttgtggagagacgactgaagctttccatgggcgtgaagcaggtggttgtgggggaagaactgataccttccatggagtgtgaagtgcagtggaggtgggaggcctttcctgtggagcttgacatggttattgggtgggggattggagattgctgtagagcagtaaggggctttgtggtgggagggtagggtttactttagaaggtcagggtttctggtgagggaggattcaggtttagtgtgatgtgtgaagcagttgttggagggaggaccgggttcttcttggaacatgaggtggtgtgggcagggatcatggaggattgctagcaagtgtgaagtggctgtaggcgtgagaattttactatggggtgtgaagcgttgggcctcctgtggaaaggtgaattactgtgggggaggaggttagggcttcccacgggaggtgaggaggtctgagaagggtaagattgtagtttgctgtggactgtaaaatgcctgttgggtcagacgattggatttactgcagaatatgtagtgattgtaaggagggacaatttttgcttgatgtggaatgtgaattggttgtatggaggaggatttgtgtttatgatgaagtgtgaaatggtggggagagggtctgaggctgactgtggagtgttaagtagatatggcagtgggaggcttatggctgattttggagtgagacatggtatcctgagttatattttgctccctatctttccataaactatctcctaaatctgactaaacatgtccctcccagggaagccacttagaatcatgggaacccttccaccacctatacatccctcttctcctccacttagaagaaatttatttgagcactttaatgtacctggcccagtcctaggagctggaaatatagaaaatacaagcttttccttcaagaagctctcagtttaaaagaaaatgagaagctcaagagcagagaaaacaagttactgagttttggggtcagctctatgcttcagagagagtgggcaagagcatcttcaggtttccaccttaagaatccatttcagttcttcaggaagaaatagtgcccagcatttgggtgtgacatgcccttctagatagtgagcatgggtctagaagcagctatcccttttggaatcctgaataccatatgtgaggtaccatctatctggagatcctaaccctggtgagccctgggtcctctgggacaaaggacttagaaagcagcattggatagagcagggaccctggagttggctagatctgggctcaaatttcagttctgcaactgtgatgggcatctgccatttagcctatgtgaacaccctctccacattgtggtagttccctacagtgtaagtctctccattccaacatagaatccattttccctttttacatcagggccgacaggtgacacaggccctgctcatcagacaagttctgggagatacattttgaggggtcaatgatattaatggaaagggaggcaggatgcaaagaatttattcagctgttgtagactaatgcagctgtagcctggttctatagtctccagttggggtggcagctcctggctcacagcatcctgattatggtaggggcagctgccctctgggtgtattagttccaaggtgtggctctgggaatctttcctgaaattttagtctgtatatcataaaagccattttatcgttgtggtagctatctaccacctttaatagaactctttctgctgaaaatagctgcattgagttatgctgtctacgttaaagaaacatgaccataacaaatactaataagctttgaaaccacgaataaatcaacctgcacaggtcccttggcccataggggcaagccagcttaatagttaccggtatagacttgcgagcaagaccatttaggttttaatcctggctctgacacaagttgtgtaagcttgaataagttatctcctggggtgcctgttttctcctccatgaagtgagaataatgttgtttacttcatggggttgttgtgagaattaaatggactaattcatatcaggtgcttagaaaagtacctatgatacacaaaacactgaataaagattagtcataatgatcactctttctgagcctcagtttccatttatagactcaaagcgaaaacatttacctcataagtttgcaatgacaatcagattttaataatgcatttgattatttccttccttccttccttccttacttccttccctccttcccttctcccaaaatgaggaaagaatgaaatggtattgacaggaatctgaggaccacctaaggcaaacttgacctacttaccagttttgaagtgtttcatctcctttgggacagctagaattagaactacaccccaagaaaaatgcattgtccagggagtgacagaaaacagctatgcatgttaactaaactaagtttacttaaagagtcaagcagttaacatttatataagtttctactgagtaaagaactttcaactagatttttattgctgttttttaattgtaaattgacaatttatataaatgtaagaagtaaaaggtgatgttggccaggcatggtggcttatgcctgtaatctcagcactttaggaggccaaggtgggcagatcacttgagctcaggaattcaagaccagcctgggcaacatggcaaaaccttgtctctactgaaaatactgggcctggtggtgcacacctgtgatcccagctacccaggaggctgaggtgggaggatcacttgaccacagggggtggcggttgcagtgagctgagattttgccactgcactccagcctggatgacagagagaaagagaccctgtctcaagaaagaaagaaagaaagaatgaatgaaacaaattataaagtaatgttatagtttatgaatacaatcaagctagttaacatattcatcacctcaaatacttttctatggtgagaacatttgaaatttactctcttagccatcttgaaatgtacaatgatttattattaattatgtttaccacaacatgcaatagaattctaaaacgggaaagaatgtattcctcctgtcattttataccatttgatcatctccccattccccccaccctagcctctgtaatcgccgttctgttttctatttctatgagtttgattgttgtaaattccacattataagtgagaacgtgcagtatttcttcccatgcctgacttattttacttagcataatgttctccaagtccatctatgttattgcaagtaacagaatttccttctttttaaagactgaatagtatgtcattgtgggtttatatcacatctgctttatccattcatatgttgatgaatgcttaggtggattccataccttgcctatcgtgaataatgctgcagtgaacatcagagtgcagacatctctataacaaacatttcaaatcttttgggtaaagacccagaaaagggattgctggatcatgtggtaattctgtttttttgtttttttgggaaacctccatactggtttttataatggctgtactaattggcattcccatcaaaagcgtgcaaaggtttccttttatccacgtctctgtcaacacttgttatcttctgcctttttgataaaagcctttctgacagatgatatctcattgtggttttaatttgcatttctctaataattagtcatgctgagcattttttcatatgtctgttcaccatttgtatatcttttgttaagaaatatctattcacgtcccttacccatttaaaatttttttcttgctattgagttttttgaactccttatatattttggatacattaatctcttatcagaggtatggcttgcaaattttttctcccagtccataggttgtctctatacactggtaattgctttgttttttgttttattttgttttcttttcgtgcagatttttaattttatctaatcccatttgtccatttttgttgttgttgcctgaacttttgaagtctagtccaaaaaaatcattgcccagattaatgtcatatagtttttcttctagaggtttcagagtttctggtattacattaaaatctgtgatgcttatgagttgatttttgtacatgttgtgagataaggatccaattttattcttctgcatgtggaaatccagttttcccaataccatttcccaagaacatttattgaagagatttttctctttccattgcatatttttggtacctttgtttaaaattggttaaccgtatctgcatgggtccatttatgggatctctgttctgttggttgacatgtccattttttctgccaataccatgctgttttaattactacagttttgtagtataatttgaagtcaggtagtgtgatatctccagctttttactttttgctcaatattgccttggctattcagagtattttgaggttccatatgaattttagaattgttttttatatttctatgaaaaaagatgttgggattttgataaagattacattgatgctatagactaatttgggtaatatgggcattttaatattatgaatttttccaatccataaacatgagctatattttcatttatttttttcttctttaatttttttttcaatatatagctttgggggtacaggcctttcacctccttggttaaatttatttctaagtatttctatatttttgtagctattgtaaataagattgttcatttctttttcagatagttcattgttagtgtatagaaatgctgtcaatttttggtggggcacggtggctcatgcctgtaatccaacactttgggaggccgaggcaggcagatcacgaggtcaggagcttgagaccagcctggccagcatagcgaatccccatctctactaaaaatacaaaaattagttgggcatgggggtgtgtgcctgtagtcccaccttcttgggaggctgaggcaggagaatctcttgaacccaggaggcggaggttgtggtgagccgagatcgcaccactgcactccagcctgggcaacagagcgagactccatctcaaaaaaaagaaaaaaagaaaaaaaaaaaagaaatgctattgccagcaatttttgtgtgagatttttgtatcctgcaactttactgtattcatttattagttctaatagtctttttggtaatgtctatagggttttatatgtataagattatgtcatcagcaaacatcgacaatttcacttttactatttggatggcttttatttttagttatttgtttatgtatttatttttgcctaattgctctggtaacgccttcccatattacactaattagaagtggcaagagtgggcatccttgtctggttccagatcttagggaaaaaggtttcaacttttcaccattgagtataatgttagctgttggcttctaatatatgacctttattctgttatggtacatttcttctatacctaatttggtgagaatttttatcatgaaagaatgtagaattttctcgaatgctttttctgcatctcatgagatgatcaaatgctttttattcttcattctgttaatataattatgagtttttatactgcctggttttaaatgacttttatgttccttttttgcaatattacagcttttcccattttgtatcttgagtaaaacgttttgattaaatagaagcagttttcctttattctcaataaatgttttcctctaagaaaggtaaaatgatttaaacatgagctttttcctcaggcaattattagaaccactgtaaacaactcagatttttggagaaaacagtgaagaagctttagatcagcaaaatagtcgacacatggtccattggtatctttcttttttttaatgtgaattttagcctctatatcaattaactttcattataagccatgaaaaacccaacttaaattgtttgtgggccaagagaaagttggtgagagtggcaatgtcagctgcattgcaaggatgaaaactcatagctacagccctaagatctggaaccagacaaggatattcttgctgaagagaaaagagctgcttcgaaccacagatggatttgccacttaaagtccatttcaggtcggacatcctcccttttcttatagtcatgccatctagaacatacgacctccagggtcaccaaggcagagactaagagggacagaggagggttgtaattaatcagctcgcatgcattacttccactcaagtccactggcctgctttattcacatggcttcagtctaacaatagggaggctgagaagtataggtaagcaatggctgttgggagagtctctactggctataccacaacagttatctctatcttttctggttttcataaggaggtatattagtccattcttgaattgctataaagaactacctgagatcaggaattttataaagaaaagtggtttaattggttcacagctctgcaggctatacaggaagcatggctggggaggcctcaggaaatttacaatcatggcagtaagcaaaggggaagcaaaacatgtcctacatggtgggagcaggaggaagagggcaaagggggaggttctacacatttttaaataaccagatctcctgagaactcactcgctgtcatgataacagcaagaggaaaatccaccctgatgatccaatcacctcctaccaggcccctcctccagcactggggattacagtatgacatgagatttgggtagggacacaaatccaaaccatatcaggaggaatttactctaaaccctaaggcctctctccacttaccttctattgagagaaagagtgacttagctactgggtgcctttggaagaaggatttaagcttgttggtacagcctctccctttctttcattctttgaaaatgtacctgagagtagagagcatagattgcgctcttctccttcttgcttcaagctttgctggagaagaattcccccatcaatacaagggtggggaaaccctgtaatgacccaacaatgcttgagattggacaaatacatttgttttattctgagatttgatgttaagaaagccattactgctgtttcctttagccgtaaacccacaatagtgtttatctatagtggtggtgatattctgatccccatctgtctcacttcagtgtctttctcttaattggttctgaattcaggcagggaacaagggccatgttgatagaccctagagcccaacatcagcatcagtttgttcagttgtaagatgtgttcaataagcactcagtgaacgaatgcacctgtaagaaacctgaaagattatctggtaaaacatgcccttagagcaagataagtagaatccaaagcaatgatctgactgctcaaaatcaccgatattgacaactgactcccaaatccctgcttcatctaacatatattgctaataccatgcccagatagaacacaaagcaatatttattatatgacaaattctctccataattttagagagttttccctaaggaaagaaaggactttttaaaaaagagagattaaacttttccaagtatattacatactattcttttcctggaggtaggggggtaagttctttgccacaccccacacctaccacccaaactattgaatacttttgggtgaatcattcccaatctgaactgataatccttgccgaaaccttttctttccagaccataaaaacacagcagcttgttaatcatacaactatttaacccagtccctccctagtcctacaaatgagctccaagcccataacgtataatctacccacccacacatattgaaatgagattattgttcccacagaaaagagccctgcagttgcacaagtcccaactttgctcccgagggcgataaaagggacaaggaaaaggcatggagttgtttgataggcttctaaggaaggctcagaaaggatgaaagattaccctcccaggtacacagtgtggagcagcgttccagcaaacatccagagggttcccacactccacccaggcacgctcccgaactctttgatctagaaaccaccacgaattactgatcgttacagaggtggccggagtggatgaacctatcttttcttataaagtaagagcttccagggaggaaaaataccctcaaaaagaacattgtggcaggtgagaatccaggctgaggagcagcttgccacagcagaaaaagaagagttttggggattgtgtacacctagattccagtctcaaacctgccacttagaatcagtgagaatcaaaaatacaactactgagtcccctctatgcgccaagaatgaaattaggcactctagtgataaatgtccataagacctcagctggcacgaccatcacctgtgctgagttagaccttttccaccttcaaactgtagataataaaaccaacatcatataattattataaagagaggagaaaaatgcagggacaatgcctggtgcacagtcaacatgcagtcaacggcagtgctgactctttctcactcattggcaggcactagttgcagggtgtcttgcatgagagggtcagacacccagcagcaactctggagagcatcccagctacacaaagtttcaggtcagcagccaggatttgagcttcagctctcttaccatcccagagactagaggagcccctggattcaaatgacacatctcagtggacactgagaaaggtttaaaacagattggacctctcagctggcatcatggaagtaggagtcaaaagagacttgctgcaaggtcactggaggtttagaaaaggacagatgttctttgacattccctggttccttcttagagagacaaacataaacagagaaaatcagtttgtcctttgaagaagttccagatggaaacagcaaggctgtcttactctgtgaatgtttccttgatccatccccaccgctcccagcaaagcctgaatcccttggtcaccactgtcctgtaaacagccctctaatgttgcctgaagctcaattataaaaatatctagcttctccctaaactagacactcctccagggcagagagtgtgttgtatatgtgttgatattaatctgacaaggaaaaaagccaataattattaagtgcctactgtacaacaaacactttttttttttttttttgaggtgaagtctcactctgttgcccaggctggagtgcagtggcacgatctcaactcactgtaacttctgactccctggttcaagtgattctcctgcctcagcctcctgagtagctgggattacaggcacacgccaccatgcccagctaatttttatatttttagtagagacggggtttcaccatgttggccaggatggtctttatttcctgacctcatgatctgcccacctcggcctcccaaaatgctggaattataggtgtgagccactgcgcctggccaacaaacactttaaaaatacagagatatttatatattatacatacttttaaaaaattcaactaatccatataaaccatattttatactttctttttcactgaagtttggagtgatagccttatttcttttaattgttatgaatatttcctcatatagatgtatcacaattaatttgagcattctactactgattgattttacaatttttcctcttccctttgctttatcaaatttattatctgtagtctttgtctgcatcaaagattacttcctaacaatagactcctagaagtcagtatcacactgtcttgtgtatagtgagacagtaaggcatagaggtaataagcaataactcgggaactaaaccacattaactagctgtctaaccttaagtaggacatttaacctttctggttagagtttctttactctaaaccataagttatcatagtaaccaactcatagggctgtggcaaacagtaaatgaattaatatatgtaaagcacatagaatagtccctgccacatactaagtgctctatttttactattattatttatatttatacagctgtgccccataagactgggagacccttgaggacagtggccacgtctcactcatgtattccacccccctcagcctggcactgagaaggagctctgtgcacatttgctgaataaataagatatgcgaatggggaaatcaaacattgacctggttgcggtcaatattccatagtaaatagttcattaatttgaattacatttttatccatatgtatatacacatatatatgaaaccttaccagtctttcacaccttagtttggaatgagtttcttgcatattttctggagacaaagatgttaagtggaagaaaaaggacacaaaaggtctaggtgccccagggaaagagcagaatagacaccaccaggagcacatagaaaagaggaatgatgtggtcagttcaaaaacaacgtcaatgcctcctcaatttcatctagcattggctctgcacttataaaattatattagagtcaggctcctattcacttaactgtgattgatcatttcctttcccatcaagagaataaacccagaatagggaagcaaacaaggacagaagccaatgattattgagtgcctactgtaaacacacacttttaaataataatattattggaatttcacacagacacccagcagttctatatgattatccccttcccacaaatgagaaaatactgagatacagccatgcttggtcatgcagctagaaaaaaaaaaaaaaaaaaaaaaaaccaaaggaatgatttaaaccctgccctctttacatcttggttctaaccttttcttccttgtttaagcagaagggacccaaatagggctcattcctaagaagcaaggctttgcgagcttagcatcctggcattctcaaccaagcaggaaaagagagagttcatcaactttaaatctcattcgtaaaactgcctataagcacagtcattttcctttgtttctacttgggtaccatgttgggagataggaagaagcaatctgttctgaaacaggtccaaataaggcctctcagtcaacaagtcgggacttgtatcatcagggaaccaaaactgctgaatgttctgtagttggaggggatccaccacaggagactatgagaggcagcattcaaaattttacataaacattcttcaaatcagcagcttctgccttgaatgtaaaaagtggaaaaaagcaaagaaaaagatgttttgttcttatttttcgttgtttacttttttctcattttacatttgttttcatttttcattttttactgtgtcaaattgtgatcctagtcaaagaagcctgaaatgatttaatgtgatccctaggagggttgggtgttttacagagaaaggttcaactatatttggaatatatgtgctgcttaggcatatgaattatgcatatgctaaggtaaaaccatagacttattttcaattttgcttccaagtatttcaaaacacaaatcttctattacctcatgtgttatcatctcttaatggggaaataaaatggagaccagaatttattttccctatacaggtgagaaaactgaagaactaggattaagtaactccctaaagtctggaaaaataagagatttttttaaaagataagaaaaggaaaagaaaaacctactcatttagggccctggaataacagtaacatctaacgttgccataatgttgtcaccaatgcaaggatccttctagtatatccttaggggacagccatccaaatcctgcttctgcacatccaacaaagggaagatgtttttcctctcagtgggaacccatatttcaaagaaaatactccacatgagaaatgcagatgtgtggcaggcactgaacaggcctgggaatgctggaatctatctgcaaggcagtgttaatcccaggtggttagtgatcagtgccatggctcaactgtggcatatggaagtattcaggaatttgtttcttcaggaacagttatgtatgtgtctggttcaaatgctgagtcaagacctcacccttgctcatgttacaaacttatttcattttaaccttcttatagggatagaatttgcatgtgtgagatagttagaatgccaaatatttatgaagcatttccagtgcttttactcatgtattcttacagtcactctaaagaagcattattatccccattttacaaatgtagaaattgagggttaaaaatttgtcccagtgggaaagcggaagaccaaagacactatcagtgttaagggctgatcttggtattatactaggaactttaaaaagaagttgtaattctagatgatggatggtggtctatcacaggggatgacttctgaacttggctttgaggatgaaggagaagaaagcttttcagattaaaggaacaacgtcaagaaaagacatggggccttgaaagaagatactgaatttgcaatacttcttaaaggtagctcacctgactctccaaccagactctcttcattatgcccttatacagagaaggtacctgtatgcatttattgattgcctgctgggagattagctgatgccattcccatcaccatgacaatcaagtgggtttcagcagctaatcctatatttgggacttgcagacctattttcagatgcaagcactgaatcagaaaagtagaattggaaaagcttagggatggtcttctctagagcttccaaacttgtctttagtaatgaaaatcttttttcagacaatattttcaatgtaccataggtaggcatgtattccttggtattttgtctctttgataaaatatacctaaattttatttgagaaactacccttttcacatatagtatgtaggattgaccccaaccaccagctctaatttgggtcagtaattggtttaagccatgcatcaggttgtatttctctggaaccatgattgctttagggtaggcaagtgatctctgctgattcaaccagattgatcctcaaagaattgcctggaactactggactagaacagcttcactggttgagatgatgaagatgtgaaggctggaactgccaggagccatggctgctaccattagcagttctagcctgaggccaaagctagcacagaaggcagatccatgagaaatataaagaaatgagcctctaatgtaaatatagttaacctgctggatcaagctgtttcctaagctagttgcctctggccttcttagttaagtaaatacatagattatcttttatgcttcacccagtttgagtgggattttctgttagttgcaaatgaaagcatttttaaagaatccaaaaccccatgataagacatagataaaaccaggttctcccagttaaagtgatggtaagaaacttaagagtctcacccacaatgtactttcaatttctaaaatgtggcgcagatgaactttactatctagtttaattcttttattttacaaatggccaaaccatgattcaaagtgaatattaaaatattggcaatacacgtgaaggaatacaaacatgggtacaagtatattttttaaaaaaagcagatttcagaaaattggacaggatgaagggttgcagtttaaaaattaggaagcttttatctagagaaatcccaattatgcaggattcaaaataacatgaaataagccatcagtaattacaatatagtcacttatgtagtgtaagcatgttccacaatgtctataaaaagtattaacagttattgtcctatagatagttgatcatgcttaaaaactgcattaaagtactgtttgctactttgaccatgcttataaacttctaaacttgccacagaaatttctggtatgttctattaaaaatacacttttcctagggaggggctggttttatattatgccattcattttacctgttatttcaactgtacacagctttacactgtgatgcattaccctgtaacctcagctttctctctggcagacatcagtgtcgcagggtatattcttatgacaaaataaaagaaattcaacagacagatcaaaatttgggacacaatataaaaggcacatggtagaccgttttgcgatggtcaacttgtaaaacatcatgatccacagaggtcagaagactaaccaaatttacataactggtcaaagagaagggaaagtagaaaatgtgtatgaatatataatcaataaacgagtcatttattctcagtttaaataaagttatcttcagagaggtgctaaatccacaaaccacattgccttcattctttttttccagtgaataaaaaagaaaaacatttcagtagttagatgaacagattttaaactaaaatttcaaagagcatttttttattgtgtctcttatctaaagatcagtcattacatgacccctttccaaagtttaagaagtgttttatagaaatgtgtctgattaaaagcttggtactcaatacaaaaatgtttttatccttctggttgatggaatggaagtcgtacatgtaataatgaggcagaataagttctgaaggcaggcaacctcaggctgattcaaacttacttcctagaactaaagcaaaaggaaaacctcaactttccatgcccaagtaacaaaagaaccagaggctactccctttgcaacccccagttttctgtgcgacagatgaaaaactaaaagtacctctgattggtcccttcccacaaccaatcaggctggctgcgggccaagtcttcctttgtataggagtataactttgtaacttcaggttagcctctgattggtcgtttttcacgaccaatcagacgtttgcatatggtgtaactttgtaactttgcttcgggctctgattggttccctacctcaaccaatcagactgattatgggccactacttcatttacatagggggtacacaaagtaaccaataggacatcaatgggacacctctagagagtatttaaacctcagaaaactctgtaattgggcccttgagcctcttgcttgggccactcctaccctgtggagtgtgtttcccttttcaatctctgcttttattgcttcattctttccttgctttgtttatgcattttgtccaattctttgttcaaggtgctaggaacctggacaccctccacctggacaccatctactaaacaataactcataaattctggttaaaaggagaaacaattatgaaattttggttaaagataaataattaaaaaataattattttgtattgttcttggtgacccatatgaaccctttttatattattttttatttcatctgaaaattttgagtaaaggagagttttaaaaacttcatttatggtttgtggcatagtcactgaagtatttgagaaacacttaagagactgggaattggtacacaaaaatataatgattcgttcacaagaatctgaggaagttacctttcccccatatagagagtgagcaatttagttactcaaaccttttcattttgtttggactatcttaggtcagtgaaagcattattaactagttaccagagtcatggtttattagaaatgccagcttgggtgggttttagtaaaatttgaggtcatgcagcttttcttagacccagagagggaaactgagggatctactatcacatgacagcatgctgagaggaaactgtttgaattccaacctgctcctgaatatgtgtgacttctgacaaattactcatcttttttttcggatgacttccttagttttctcaactgtaaaatgaaaatatgtatagtgttttaaaggactgttgtaaagattagattggtttaaaactcttaagatgatttctggcatatggtaaacactcaacattagtctttattaacatataagtctagtgaaactgacataattaggcagtttgtgccatgaatggcttcacctcgaggaaagctaatacagagaaacctgatctcaccagccagataaatgtgaggctggtctcccaggtcagcctggatattcactggttgtggtgggcagaattctaagatgtccccaaaatccctgtccctcttgttcagagcctttataacctcttccccatgaacacaggtagaatctttcatgtgatgggttattactctcatagttaggttactaatcagttgactttgtgttaacctaaagagtgattatcaaggtgggcttgacataatcagtgagctttataagggactgggcccttcctggagttagatagatttgaaatgtgagaagctgcacttaagaggaagctgcatggcaaggaactgaagtagtctccagaaactgagaatagtccctggcttgcagggagccacaaaatgggaacctcattcctacagcttcaaggaactgaattcttccaacagctatgagagctacaagggactcttagctcgagaggagaccacatcccaggtgataccttgatttcgtccttgtggcacagtaagcagagaaactgggtagatctgcctggactcctgacctacagaactacgagataataaatggctgttgctttaaaccactatgcttgtggttatttattattatgcagcagtagaaaatgagtacactgttaatgatccaaagttgtacatcatttccctggctcatcagaggctaggagagtagatagtaacagcatgtgattattattttgctttttatctgtcccagaaagggaagcacaactcagggaattttgtggtcccagaggatggctgggttcattcttatgaccctctgcaggaagattactgtcatccccaaataccctcttcagcaaagtccctagaaaagacttcttaaattttgtcatcctttaggcttctgcttaattgaaataaagagaaacttcccctaatcactgagtctattgttgtccacctctcagaggcgcttcatagtgctggtccgtgattatctttcttatttgctttctggtttgctactatgctctgatttgaaagtaagaaacatgaaggcaaggaccttgtttattttgctcactattttatctccagagccagtacaagtggctggcaatgaatgaacaattgctacatgaaagtgtaatagagaaaggcagccagtgccaaaattgcaaacacacagcactgttatacgctcatatacccggcattcacacacagctctattaaaaggtgtttttttgttttgttttgtatttttgagacagagcttcgctcttgttgccctggctggagtgcaatggtgcgatctcagctcaccacaacctctgcctcccagattcaagcgattatcctgcctcagcctcccgagtagctgggattacaagcatgtgccaccatgcctggctaattttgtatttttagtagagacgggttttctccatgttggtcaggctggtcttgaactcccaacctcaggtgacctgcctgcctcggcctctcaaagtgctgggattacaggtatgagccacttcacctggccatagcactttgttcatattcttgtaataaaatttttgatgctagtttatgagattcttgaggacagaggtaatgtcttcttatcttagtacctttgtgctaaacacagtgatcgatgtgtagtcaatgttcaataaatgtttgtggaatatgatggcaattgataattaaacgaaaaaataatattattctcaacatgtatatatatatatgtgtgtgtatatatatgtgtgtgtgtgtgtgtatatatatatatatatatattagactaagtgtaattcttttttattttaagaaacataccaatttttaaacaacatcttaacccagtaaaatccatcttgggagtctggccttctgaactgtgagataataaacttttgttattttaagccactaagtttgtggttattggctacagcaataagagactaaggcatagagggagggacagagctgtcttaggcagatgtctcctccttacagagatcagcttgcattgcaggacatattatcaacagttttgggtcctgccattaatgggaactgtagattttaccttcaataaagcttttctcatcatctctccggctttctccccaaccttgtgcctgcatgtgatatggcagaatagaaagaacatgggcttcagaatcagagaaacataaatttaaatcccagttccaccacttatcagtaacatgacctgggacagctagctccacctctctggtcatgtttcttcaccttacgttcagtattgttataagggttagaaagcaaagaaataacaatgaagataatgttataattgatgaccaaagcagccttccaaggaggtactcacactagagtttttctgctctgaacatccacaggattgcaaggtggcagggcctgtggaaagctgggttgtttctgtatattctagggaaagaagtttggtgccaccaggctcagtcctggggtgaggtaaagggcagcagagactggctaagagcagaaaagaggagatgaatggcaaagtgcaacaaattctgtaatatgaacttccctgggactttctaatcttcaataattagttctaaatttatatgatctcaacatgagtgtgttttttatggaaactttcattgaagcttatttttagaaccactttgatttaggataatacagagagaagattcaggcaggaggtaatcatgagacggtatagcccccagaaataaataaaaagcaaggaagaactttggatttccatcaatcgtgagattgagccgagattaccaaactccctaaaagataaggccagggtcctgctaacaactcattgcaggaaagcctggaaaattatagacaatcaaatggtgaggacttcaatttgggtggcgttttgtatgctttcttctctcatttgaaccatattgacttgccagtttgcctagatagagatatggaaagaagttgatctaacaggaaaacagtggggatggcaggtggtaataacaatcaagaggtccattgccccttcaggacccagaatttatcccttttgttcccagtcacccctctgccctctagtccaatgctgtcttctggggaaggcttaacacaagagagcaggtggcttcacgggcctttcatttgggtaatgagttggaacacttacccaaagccaagcccaaggaactcccagctgctccacactggaagttgacacacagtaacatatatgcatatgtgtgtgtgttgagatggtggggggatcatttttttgtaacaatcaacaatcttgtaactgtttcctgcctatgttataagccaggataagagcttcctggatcacttgatctctttttgtgttggtaaaaataatcaagcctgtcttcaggcaattagccacctcttcaagccatcaaccttatgcacaatatccaaggaactcctccttgccttttctgaactactgtgggaagtgattggaaggagacagccaaaggccaacaatatagggcgaggcccctgggcatccttctcagctctggggaaggttaatgaattgtacttggggaacaaagagaactttgacaacagagattctgacagtttcataaggcaggaaatgtggccactatcaacccagagctgggtgtgcaaacacaatctatgtgtttatataccttctcctagtttgtggacattgttcaaatggaagaggaagaaaacacaagaaggaaatcctcttccttttggcaagacacagacagaaattcacatgcttgacctgcatctgttgtctcaaagaacaagtcaccttcactgtgttgggtgtcacaaagagagtttcaaagacagcatcatcaccatcaaatcattcaaaagccatatattgatcactgattatagaacaggtgccaaggttacaatggcaagcaaaaagtcattgtctttcctttgtctcatggagctcctcttccagtcattgttgtggttcaccttgtcatcatcctcactgcaaacaccactaccatctccctttttatctcttaggacaatttaaaaaattatgtggctgggtgtggtggctcatgcctgtaatcctagcactttgggaggccgaggcaggtggatcacctgaggtcaggagttcaacatcagcctggacaacatggcaaaatcctgtctctactaaaaatacaaaaaaattagccaggtgtggtggtgggcgcctctaatctcagctacttgggaggctgagataggagaatccctagaaccctgggggcagaggttgcagtgagccgtgattgcgccattgcacactagcctgggtgacagagcaagactctgtctcaaaaaaaaaaaaaaaaaagtttatgaagcacccagggaccaaaaaaaggaacataaaaatattttaaaaatttaaaaagtgaaaaagaattatctggagattttattaaaaggcaaattttcaggtatctttgccacgctatgaattagaaaaccttgaggagagtcccgggactcaatattttcaaagtaattcagatagttctgatgtacatatttcacggtttatattttgcaatattgtcttatgttatagcactttatacatttttgtcacattcattgtgttctgaatatcacaacagtccaataaggtagatagaatgggaagtattatctccaatttacttatgaggaaaatgaatgcataaaactatgcatttatcctaatttaatataactgatatctaatttgttcaagcctctgttttagaagttgcagagaagaatgagatacttaatgagtttgtattaggagggaaaagcaatgtatacaatgtgtcagatgctttacatgctatattacttgtaacttactctaatatatattagtaatacatgcatataaatgcattatattagccttaatttaaaccctgagggtgatacatttcttcatttactaatttgttcattcacttgcctaatatttattgagcaccaattatgtgactggcattgctttttgtattttgaatgcagtggtatataaaacacattttaaaagccttcctggagctcatattttggggcagaaacagagatcaggaaatcacagcatagtatgattagttcatatttgtaggggtgcatccaggagtccacactctagatataacagtgcaagtgcttagtagcactatccatgtctacatcagagggtttgctgattagcataaggatgccagaaataattccttggtgaaataaatgatattcaagatgtgtagttgacaagaaacattataagacaagtctactctttcatgaataaagcagatgacattgacaagcccagtagcctaacatctttggcataactaggtctagaattctatttgatcatctttctcctctagttaatggaggtctctgtcatcttatttttttttattttttattttttgagatggagtctcgctctgtcccctaggctggagtgcagtgacatgatctcaactcactgcaaagtccacctcccgggttcacgccattctctcacctcagcctctcgagtagctgggactacagatgcccgccaccatgcccggctaatttttttgtatttttagtagagacggggtttcaccatattggccaggctggtctcgaactcctgacctcgtgatcctcccacctcagcctcccaaagtgctgggattacaggcgtgagctaccgtgcccggcccatcttatcttactggataatttcctgaacctgtgtgcacctcagagtaaggattgcatgcaaggtgcttattgaaacaactaaaaggatagagagggagaaatcaccaagtttctgggaataggctgcatgactatttgggatgtatttgataataaatgtttgtacaagtggcagaattctttctgagacttgctctcatcaaaaaatcccttcctcaagtaagattgttggggagcaaattcacaaccccacctgcctgttattgtcacagccattgtttgccaaaataatctgacaattatgagcagacaaattgacataccaatttgtaacagattgtgtcatttaatctcttacaataataaggtggggtagacaatcttattatctccattttacaaatgaggcacttcaggtttaaagaggttaaataatttacctgatgctgttattagatattgagtagcagagcaatggtttaaactggtttgtttctaaagcctgtactatttccactaacccattctggtctgagaagatcctggtgtcataaaatctatgtaaaaccatctctcaacagttctcagtggccttgtgtttcagctggccattctctttcacaccagccacattcaacttacctttgagtttcctctccaaccttctgtctatgaagagccaatttagatttcccttctggaagaagttcccagtagttgacgatcactttttaatctatgttaaatctcttctccctcaagtaactaactgaaaagttttttcagatgaaataatatttttctatagttttctaatactccatagcacctagtatgatgcaatacatatagaaagcatacgatctttgttgcctccataggtaaaatggaactgcacagcttagaacatactacctggcatataatagatacttataggtattcactcttgaaatcagacttttcacaggattctggatgatatcgtggatgtcactttcagtttagatgatcagaactagaaaaccagtgagaattccttttgtaatttaaaagactcattctaaatggctgttatttacttattcttttaaatatagggcttaaaggtcttggaacaagaggttcattcttaatatataatgtacgtatccaaaaatctgagtcagcaatgaggttatctgaggcaaacctgagaaaatatttgtggagggaggtcctggatagtgtgagcagaactgagatggaatacggaatatggggaaggaaaagtgtgcacggagccaaagctttacgtgttagattttctccattgattataaagaaactagaagagaaggtagtgcatgcaccatatattaagttcaaaacagccctttacttactttggaaacacaaagcacatttcacatcttgtcacttcttaatgattagtgtgctgaataccatttgacatcatttaaaacagatggactttgcaattattgcttagttacatgcagacatgtgatagaatcacagcatttaatatatgcatgctcatgtatatagctgtgtgcaacttgtttccaaatccaataccaatctgaacaattcaacaggggattttgttaatttatgaatttctttaaattaatgttctatggtgcaatgcaaattgatcaattttaggtatacatatttgaaaagaatgaaattatcagaaattgagactgttgccaaaataagaagtacagtcattctgtgaacaagtatgtgtaatataattaggaaaaataactctatgagctttatgcaaactcaaagggtagaaaaatcatttcaattaaaacttaagaaagaagtgcttttgtgatacacacatatatggtaaatacccttaacatattgaactatgaggaacagcaattttatgatgaaagcattggtttttaaagtgatgtagtcttagatatgggtccctgttctaccagttctagctgaatttacttctatttctgagctttagttttctcccctttaaacatgaggagggtaagcataattgttcctatctcaaagagttgtttgaataaagagatagtatacatgaaaattcccatcacacaagtggcatgcagtaaagtttacttacctccccttcttttcttgcctctgttggtgtttattatgaatctagccacatgttattctatttggaagggccataagatacatacaagaggatataggcaggcattctcttgtgtctttcatgcattgtatgcagaaagtggagagtggatattttgaaaagtgctggttgagatattcccaattttttcctactaggctatggccagcaatttaattagagacaagatctccaattagccaaaagaaagtcagatgacaaagtattgctatactgaaaagataccttgaatataggaagtccccaaggagccctgatgggcagcaaggaggcaggaggaagaaccaggcacatgctgaaggccaaggcagtgcagggagccaggctgtaacagccgagtgaaaggaactagcaaagcacaccagcaggagaggaagattccatttgaacccaagctatgtgacccatccaagtcctaaagctcatcgatgttatgcaccttctcagcatacccaggtgccaagcacagggcaggtaaggagcgtcttcaatgacatattctgatttaatgaagcaagcactgaaccaggagccaagagacccagattcaatccctcttccacttagaagctctgtaatatggagcaagtaaattccttcagtgccctcacttgtaaagcactgataatgtttgctgtctttcacaggtagtatgagatccaaaaaaagagggaacatgaaaaaacacaggttagtggtcaatgacagagactgcctggattcaaatccagatcctgtacttacagcaacacccagtcttgccaagtgtagctgtacctcggtgtgatcatctgaaaaaatgggataataagatgcctttctcatagagttgtaggcaataagtgataccagtagtacatgtgaagtgtttacaacagagccagacagaagacattcagtaaatttaatgtgaactatgattattaatgagaacattaataatcaaacatcacctgtttgtgaacaggtgctgtaggaagacaatagaacttggctccagaatcagacagacttaagctctgattcaaattccataaatatgagctggatgatttgaaggacattcaacttttcttaacaaatgtatatatatatatatatatatatatatatatatatatatatatatatatatatttaaatttgcaaactaggcatgttaattcactttacactttgttcttacaaagatttgaaatggtctatgtcaagcaaataaaatatggtatattttcgataaatggtaattatgtacagttgtagggtgatagatacgtttagaaggcattggtattagaactgatattattgcaagtttttttcccgagcaatggatgacttctcagatgctaagactgtgacattattgagtcaatgtgaacaaggtgagccagtgcagctgggaaaggcgagaaccttgttaaaaacaagcataaatgcttcttcctttatagacaacccaatcagaatagacattcaaacaattcatctgtcccctgtggtttacattcatagtgcatttggcccagccctctctcctctctggtcccctgtgttggtgagaccaatgaggagaacagtacaatgtcctgggacagaaatgccacaggtagcctgaggacatgagctctttgtcctgtgggtctcagacatcaacaatgctgccactgttctcagaaagactggaatgtggatggaggccagctggactcaactaccacaaaagcagaccaaagagttgcaaatgggccaggaggaaggctagaagatgggtatttgagaatgcgggttgtggtgcactctcacagtgctcttcaaagcactgggctcttcccagttcaacgcgtgccaaatacccaaaggagcaagcaacatgcttctgattcccagtagaaagccatggcttagaagacccgtgaaggggaaaattgcctcaacaatgactaagtttctcattcatggcaggtgctttatacgttgatcccatttggtccccacagcacctgtgtcaagtttcaatcatcccaatgatgcaggtgcattgtaacccttcaaccaattttcgttatgattattgttattgtcatcattattattggaaacggagagaaagagactcatggcagttaactcatttgcccaaatttatacagctggttagcaacaaagctaggactcaaactagtggcctatcctttgcatcaaagcctacagcctaaatgactcattaaacaccttccctgaaccaatggccatattaggtgcataaacagagataaaatggtttgctctaaaaaacttagtctagtgaaatgttttgcaaactgtgggacatagcctttgtagttcattaagctactttgaagtcatcacaaatgcatttttaataatttgttgaaaaatttaagtatagaatgcatattacataatactagtatttgatgacacttttgttttaatcatatgtaaatatacatatgtgtatgtatgtaccatatcataatatacaaaatatatcttttttttttttttttttttgagacagggtctgctctgtcacccaggctctgttgcccagggagagtgcagtgatggctgcactgtagcctcaatctaaaaaatagctcataaaaatcgtggtgagaaacttttggaagctattagtttagtaattttgccagcgaaagacacagagatttatgtggggcatttcctccttgctaactcttgttctcagtctctttacggtatctcaagtggaagagaaggattagaatgcccacgtcaatggttaggacttcataaagcagacttctgtaatccacagtgaacatctcagtatacaacaaaattcaatagcatgatatgaattaacgtttaaattaagctggagttaaggtaattttttcattcaacaaacattcagctaacatgtgtttatcctcttctgggtattaggagtatattttctactgtactagtacattctctactgtactagatactgaagagaggagattcaaaagacagacatattattgccctgtcctcatagagctcacaagtcttttcacaaatatgaattgaacaccctgtatgcactagaatctgtacaaggatccaggaatatcagagtaatgccaaacaatgttggaatatgaggatcaagaaaaaacatgtgcccctatgtacattttttttttttttttgagatggagtttccctcttgtcgctcaggctggagtgcagtggcatgatctaggttcactgccacctccgcctcctgggttcaagcgattctcctgcctcagcctcccgagtagctgggattacacgcaccaaccaccacgactaatttttttgtatttttaatggagacggggtttcactatgttgagcaggctggtctcaaactgctgaccttgtgatccgcccaacttggcctcccaaagggctgggattacaggcactagccaccgtgcctggcctatatatgttttaatataaagatttaattttattttatttttaatttataaatcatgtatatttatgggatacaatgtgatgttttgatctatgtatacattatcaaaagatttaactaaatcaacatatccatcacctcaataatttatcatttttggttgtgagaatgttaaaaatcttttttagtaattttgaaacatacaatatattgttattaactgcggtcatcatgcagtgcaatagagtattaaaatcttttctccaagaaataatatttatttctccaataaataaaactttgtacccttcaattaacaacatcttccttttccccatcctttcccctttgacccagcctctggtaaccaccagtctattctctgtttctaggagactgactttttcagattccacatataagtgagagcatataatatttgtgttcctgtgcctggcttatttcccttagcataatgtcctccagttccatccatgctgtcacaaatattagaacttccttatttttaaagactgtatagtataccattgtatatgtatactatatttttaaaaatccattaatttgttgatagattagattgcttccataacttggctggtgtgaaaaatgttgaaattaacatgggagtgcagatatgtctttgacatactgatttcaattcttttgaatattgatttcaattcttttgaatatacacccataaatgggattgtggattatgtggtcattttatttttagtatttttttttgggaaactcccattttccaaaatttctatgctaatttacattctccccagcagtgtacaagcgtttctttctccacctcctcaccaacacttttcatgatttgtctttttaatagcagctgttctaacaggtttgaagtaatatctcattgtggttttattgcttttccctcatgatgagagaaattgagtatttttcatatatttattggccattcatgtggcgtattaatatgtttgtaacttttttaagaacactaaaatcattgaagaatattgaagtctaaaagtaggtgtactaaaattcaatacattattttaagattaaatattttatttatacccaaaataaacttattttaattttaatttcctgttttgttgatgagaaaactcaccaacatattcaaaatcagcttcttgcttatctcattttcatctggggaaattgctatgtttaacaatttctcttgaccaaatgaaatggtcttacataatgattaatacaaatccagtcttatttaaaatattatgttcacaatggaatgtttgcactaatttcgattttttttttttctttttttgagacggagtcttgctctgtcacccaggctggagtgcagtggtgccatctgggctcactgcaagctccacctcccgggttcaggcccattctcctgcctcagcctcctgagtagctgggactgcaggcgcccgccaccacgcccagctaatttttgtatttttagtagagacggggtttcaccgtgttagccaggatggtctcgatctcctgaccttgtgatctgcccacctgggcttcccaaagtgctgggattacaggcataagccaccacgcccggccactaattttgatttttaaaagcactgcactaaaatattatttatcttggttgtttatgttttttgcttcccctacactctcactgaattttgcagccagtcaggtgcttcgctcacctcaccctagtcccagcactgaagaaaacatcagcaaaataagacagagcccttgttctccagcttttacaatccaatgggaggtcaaagtaagtagacacatactagctaacataaatgctcttctaagtacactacataaattaattcatttaattcttccagcaattttatgaggcatatactacttataaatcctgttttaccaaaaaagaaataataataaagaaaaaaagaaagaaaatttagggacagagcagttaagaaacaaattcaaagtctaagagcctgtaattgaacccagacagcctggctccaatcctgaaaaatcaaccactgagtagtctctagattaagacaggtggttgtagttttttatttaaaagatcatcagctcagctggagaaacaaaaagagaacatgatattacatcatataggactttaaaaccaacttaacaatagtaattataataattaacactttgggtaatctgcccccagatagttctcctaaaaatgtgatcttccttccctgagctatatgcttttcatttccaaggaggataatagtaaatctctctaccaatgcttaaattaaatcagagaatttccttaagatgaatttgcactcacaaattgacatcttttgcacagtaagtagccaagtagccacactgatgcctactacactgaatctatgtctctgaatattgcatcttatgcattctttgaacaaatatttattaagcacctactgtgagtcaattttatttttaaagaaaatacaaaatgtctttaaagcatcaatccacaagtctgttttactctgaattcttttggagacatccctgaggaggaagcagtactaatgcataaagctatatcctcaaatataaaactgtatataacacacatctgtatgatggtttatgggttacaatgtgttttcatgtacattatttcatttgctatttatcctctataatgtctcaggagataagcaaaattaaaataacactaatttaaaacactctaattaaaggagcctaaaatggtaagcactagcaatagataaactctaattgttgccccactgaggaagagagtttgaaaaagtaggtcacacataatggttttccctgtagggaaggaaaataaaattctgaagccctgccactaaccgctaaccacttgggtggtatcaggttaaatcattaagctctgtgttttagtctcgttaccaatatagtgagttttcagtcacatgccagttcatctcacagagtgagatgagtccctcaagtacagagattgttcatcttttcatctctgcagttcccatgcccagtacaggtcctggtatgtaaagggcacccaacatgtatgttgaatagatggatggatggatggatggatggatggatggatggatggataaatggatcagtagatggatcaatgggtggatgaataagtgacaaattgaactggttttgtctgcccttttggccctttccttgagtctgtatcactcacccatcacttgaagccagtggtgggtgctagctcaactatggcatttgcccagggtctttgcacttgctatggaagagatatgctcttgtatgaattatttaccttcttcattctacttgccatttggattccagatcaaatatgttttcttcagaggttttttccctgatcacctcttactgttacctgcttagtcctgttttatcagtcaccctgctttactattttcagagctcttagcactctttgaatgatattattaacttttgctaatttacatatatgtttcttgttttccccgttgaatgaaatcttcattaggccagggaattagtttctcttatccactactgaaccctcagtttataatatagtgatggtacttagtagcacataataaattgttgttacatgaatgaacaaattagcctcgatcactctttcaggtactgatatggcctaatattcctgccttaaaaattattttctggtaatcagacctggtaattggccttataatcttggttgcaacattttctccaggcctactttcccattttagaaaccttgaactttctcacccatcttctccagtgcaagtccataaccactaactcccaaaactctaaaaataaaataatttcttcctccttcctctttcccatgaaactttcactgatcaggcttattcctagatttcctcttatgagaggatctagaaatggatggagggatggatgaatggaccaatgaatgatgaattcatttataaattgataaatgcatgatgaatttaaaaataccttcaaggtttatgagttttcaccagtggagtacttgtaaaaattcttttgtcttctctacaaaactttctccagtgaaagagaattgccattattctaggaccctactactactcttacaaaaacccattttgagtttggaaaaaattgactaattaagacaaaatatgtaaagctgtaactgaaaatcaaaacaaacatcaactttattacttaaaaaaatggattggaggatgtgatatagatgtattatgtcaataagctttgttccaattatctactgctacataacagccacccaaaaattaattacttagtaacagtcatttatttcactcatgaatatccaacttgagcagagcttagtagggacagcttgtgtctgcttcatgtggcatcagctgggatggctccaccaggcaggaggatcgacgttcaaggtggcttatgcacatgatcagcaggttcgttggtaggctagttctggctgctactgagcctggctgagggcatcagctggaagccttgcatcctctccataggctacttgagctttcttgcaacctggagtgagattacaagagcaaacattccaagagaataaggaggaagtgcataccatttttatgccctagtcttggaagtaacaatattatcacttttgccatactctgtagatcaaaatagtcacatactgtactgcctagattcaaggttagggaaaacagactacatttatttatttattattctttttctttttcttttttgccctcagccagtggaagttgagaaagagactccattacttgatggaagaatgataaggttccaaagagtctgtgagatgggtggtattgtttgaaccatcttcagaaaataaaatatgccacaggcctcctaatactgagtcccagaattagagggacatactcttcttgtcataggcagctctggtaaacccacactgatgcctgcccctgtaaaacttagggcatagagcaactgatgggagagaaaagttacactgaactgaattctaaaacccaatcttagccaattaaacacaaagaatcatctgctagagtttctaagagagagaagaatactcttttacacaggatttgatggtgtgaagatgtgaggtttatacttatttcagatattttgtcaacattagaagaaatagctaaggaataatgtcaccacacagagaagtcagagacaagagataatcctagtggcattattcaactgaatcaaatgtttaaagttggatgcaacattggacttttaatttacatgagccaatacattccctgttattaatatttgcaagccattgtaagtcagtttcattcatttaccacctatcctcctacactctgcatgccactaggagactgtctcataatgaacaacaacactatagatgataatgatatatacatcttggaaattctctatctgttcctttcttacctcagcaacatatggtttggacctgggcaaactctccccaagacttttccagttgcctctgcttcagtgggcttttctacttacttacagtgtatcctacctccaacccattccccatccccaccattcagcaaccccctcaccaatacccacatcttctctgatcactcatatccttttatcagttctcccatttcccacttctttaagtacagagttctcaatcttgtctcctatgcctcttcttttcttttctagatttaactcccatgaacttgataatccatcccaactttatgactcagttctctgacaagaatgcatatttttttctgcatttctcaactttgttcttgctattccttctataatatattaaagatggccacagatcccttgctatttctttcatcaagaggggcagtctgtatatctagcacaaagaaagcacacatatttaaggtgatggacatcctaagtatactgatttgatctttacaaattatataaatgtattaaattaccacacgtaacctcccaaaaaaagagtctgaaccttttttttttaaacccgggttggtcttggggacataattgatcaacagaatgcagccgaagtgacattctgggatttccaagactaggttaccagaagccttaaagcttcttcctgggtttcttagaatatatgttctctttgttctgggtttcttggaatgaaatgatttttcttggaacactttcgaatcccagccactggaattcatgctgtcaaaaagtccacgccagacatgcagagtagatacaagatgaaataaatgcttgaccagccttcagctgtgctatccattatgaaaaaggcatcagatgtgtgagtgaagccaccttggaaccctcagatcagcccacctgccagctgagtaccactgaatgcaagctgagtaccaccgagttaccttgcttgatgttccttggaacacaagaagaaagcagccaagctctgcctaaattctagaggcacacagtagagcatctgtggccactgtagttaaggtgaaaaggaaaaaggaatgaattctagatccatcttaaaatgtttatgcacacaatagagatatcttgaaatggttactttttaagtcactgagttttaaaaataatttgaatatagcaatagataactagaacactctttatcaaagtagggctaggttcaccagaaaaatcataagataatcttacctctctcttctacctgaatttaaaagacttttggacaagaatctatcattgcagtttgatggtgctagacaggtttaaggaatatttcaagcgtatgatccttttatgtatcttattatagttgaatgtgtacagttggcaaggtgtgggcaaaagaacattattgcaatggtggtaatatgaggaaatgatgatatcacgttagaagtccaggagcaagtatgaatgttccccgaacagagaaactgtctgccttcaaatgaccctgcttctaaaagcccatttcttaaaacgtaaaagaaaattagcattgcttattcttcatgataaaacttttaaaattgtattttgcaatgaagattatttctatctccccccccccccgtttttttctcacattccccctgatccctgaaaaaaaaaaaaaaaataggggattattaagcgtactcagtttttctgtttagacaaattctgtctggtgtttgtaatttgcaactgattataaagttttacatattaaaataaagaacaactttgtcatatttgaaagaaggccaaggttacattatccatttattttaacattagacacagtcagcccaatgaaggaggaggaggaaaaggaggagaagaagaaaagaaaaagaaagaaagagagaggaagaggaagatgatcagagtggaaatgtggccaggcgaggtggctcatgcctgtaatcccagcactttgggaggctgaggtgggcggatcacttatttatatacctcctatggcatatacctctccacatttttataattgccatttatatacgtttctaagttcctatagtattgtccttcaaggcaaaaatcctggtattatcttcttgatattcttagggcctaatgttaccaaaatgccaggggtttggtcttggtcctgttgcttgctgcttggagagctaggccctgagacaatgagaggtgccaggtaagaaggctttatctgggtgctgcagcgaaggagacaggagatgagtctcaaacctgcctgactaaaattgggggtttatatagcagagaaggaacgtagctacaagcaggaaggagttcgggagtgataaggaagcagtcatgatgaatgaggggtgtgagctctcattatctggatgtggtgatctggtgagtttcagtccattgcctgagggtcagtttcctgagaagagatttcagatggggcaaatagaagcttcaaattttaagatcaggagagtcaatttctatatttattcaaaaaacccatacacattatttctacggagcaattgggctggtttcactagcacagtgcttggttatcttcagtgcataactgagtaaataactgctcagtaaataactgctgaattaaaggaagtagcgatgatggcagtggctgtggaagtggtgcaggttaggagccacgatggtagtttttgttgggaatgttactgagggtggtggtgatgatactgatgatagaggtagccctactgatgttggtgaggttggtattgttgagtcctaaatcagagaaaagagcactaagttatctaggagaaatatcattttgataataaaggaaaacttggtggtaagcctgattgccagtctatgcaacagttagcaggagaaaataccagattttctctgacagctttgggatctgatgaatagatagcagaggctactgggagaaattttatcagcctctggagagtccttctagctgactccctaaatgcctctttgctccaggacttaggtttttgaaggaattgagcaatgaatatgaaagaagagggataaatagtcacacccagagtgacttcccattcctcattgtctcttgcaaagacaagacattctttagaagggatccttccaaagaaaatatcctgagcacctgagtatcctgcttgtggatccccaatagccagcacgctgactcactgctatttgtgcagttcccatgtgccagtgaattataatgagaatattctgggcaatcaaattactggagctgaagggggtgctgaagcagggattgcccacataggtcactttctagaaagcaggttccaaaaatgtctttctgtgcactgagaattggatcgcaccattccaacagagaagctattttctgcccataacatacatagactgaaggaattaaaatgcagtgagtttagttgaaagcttattgtacttaaatccacaaaaattaggtacttttcaacttatttaccctgcgctgtatttaaaccgcttccctcctgccttcgttctgtaaataaccattccaaaatctagactgcctatcgaacaacaaagcaatgattcagttaataattataaaccttaacaattcagcatgcacccacttatagaagaactagatatcacttgcctgaaatatttgacagtcatacaagagagcaatcggctacttaaacaacgcagtcatgttgggagctgttggggaaggggtaagggcggggaggattgtttttgaatgaaacttcatctacgtggttccaatggattctttcccacacaagctcaagcctacatctcacagagctattaggtctgtatacttccttgtgctctgctccaagaattagtgagtcatgttttaagcacaaattcttaacataggtgctaccagggaacaaaggaaaacaaaatgcctcattcttttattcatcttttgaaaggaaactcatggcggaaacatttgtataacattccatttatataacctgagaaatatcagctgaaggaaagaacagtacagctgaggaaggggactgtggtgttttctttccacaagcccatgcccctcctagactattagttcctaatgtgtttcacagctcttgggtccagcaaggaaatgtgagggcacatcgtgggaggcagagaggtggaggggagcccatcaggagggcccaaatgctccagcaggtattaggaaatgcttcagtagagtgtttgcaagcatgggctgcggagtcaggcagatcactggctgtgtgaccctgggcaggtggctgaacgtctctgtgccttagcatcattgttgggaagaacgaggataataacgacaaaaaaataccccgtggactatagaaggttttctatatgtctgatacataaaccaagttcaataaagccccttgggtccaattctggtttcttctcttggaccggtcattttgctcctcttagtttcagtctcctcatctttctctgaatcttttatacttgggattgatggaaaacttacagaaatgttctgaaatgcaaaaatgtcataatgacctagccatagctcacacatgaatcctcagtgtgaaccaggaatcaaccacttgtgaccacaaaagggaaaggaggaagaatacaagtctttccagctctttattgcccgtgcatcttggatatgttgagaaacctttactgactatcttcaagtcagtttattaatgctctaatattttttatttctgtcatagtatgcatatgatgtattagacagggctctgggtacagatgggcagggtttaaatgacagatttaaggcagtggctcacacctgtaatcccagcactttgggaggccaaggcagacagatcacttgaggtcaggagttcgagaccagcctggccaacatggcaaaacactgtctctactaataatacaaaaattagccggtcttggtggcacccacctgtaatcccagctactcgggaggctgaggcacaagaataaacctgggaggcggaggttgcagtgagctgagatcacaccactgcactccagcctaggtgacagaataaaactgtcatcaatcaatcaatcaataacggatgttctcctatgtgccctggagcaagtgaattgaaccctggtttttcctgcagcatgcttgccaaagttaattttgttcattggtcttttcaaagaaccagctttttctcccctttatccttttactgtgttgttttctatatcacaaatttcatcttttgcattatcaattcccatgtattccctcatgatttactttgtatttttccctagattcttaacaaaaattatttattttcaatgataaaataacaaaggcatttaggctacacatttttctataataatagattatttctaataggttttgacaataagtaatcgtctttccactgattcctagataggatttcatttctatttttatttttttcttggctctcaggcttatattaaagaacattccatattcatactttcccagtagttaaacttgtaaaattctatttactttgcttttctatttgttgggcatatgaactatagccctagattcctaaatttactgaattatagtcagaaaagggcaacttaaaaaatctgtatttggggaaaaatcattattattttttgagacagggtcttgctctgtcacctgggctggagtgcagtggtgcaatcatagctcactgtagtctcaaactcctgggcttatgtgatcctcccacctcaacctcccaagtaactaggactacagatgcatgccaccatacctggctaacttttaaagtttttggagagatgggggtctcactgtgtttcccaggctggtttcaaactcctggcctcaagtaattctcccactttgggctccctaaaaatgctgagattacaggcatgctcccagagtgctgagattacaggtgtgagccactgctcttggcccagggtagtttttagttatttttttattgtgatcaaatactgcattttaaaaattgttacttagatgtaagagaagagttaatatcctctctgtgtggttccttacatatacaaaagcaagcttatttaaattactcaaattaagtatatcttttggaaatatctgtcaagtttttcaatcatattctgagacaggtgaaactgttttatcttgcatttctgaattgttcatcttgctgttacataataaggcactgattagatgctttaggttttgaattttttccttacccgattgaccaactctctaagtctcagtttctccatccataaaatagaagtaataatgcctgcatgtagagttgtaaaaatatataatgagaaaaatattgtgaggtacccagcatagtagccaccacacagtagacaataacctattttacttatctaccttccaatccttaagctaactatctcttagtcccaagaataaaatctcaggattgggaaaaggcttcttcatttctgtttaggggccccagatcattgagattcttctttcctattaactaccaggttatggatttgaaagaatctcagttagaaatataatagcatcattctagacagaagaatggaaaactagtgttctaaactggatcaaagggtgtcttgtgaaataatgcagtcattgttctctatagttttgctccaataggtcaaggatatactagtatatcaggggtagctatggatcctgggatttcccctttaccacaaaggagatgatgtaggtgtgaaattccaggcaccttgcccatcttttgtaatccattcttctttttttctctctaccggttgcttcagattgtaactctacagcccacctggcttagagtgctgacgccttctcaaggcttcctcactaaacttcctagaagctattttccaaggagggtagaatcattgttctggaaaactaactaaactacgttcaatgcttatcaatatcagagaattcattttgggtgactcactcaagatattaactttcacattttaaattatatgcttttactcattaaatatacacaaagctttctctctctctcctctttgtcccagaagtgtttgcgaaatgctttctttttcctgtaagtttaaatacttctacagttatgtcttttacaaaagagagatgttagtagcaaaaggtgcaacatttgctaaacagttcaggtgacatctacgaacaccatcaccctgagttttcacaaacagcctgaaagaagatgtcacgttcacttttctgaagccaaaacagaggctcagagaatcagcttaccaaaggtctctcacagctggcagatctaagagtctaaaccgtttctgttgggctcaaggcccatgttccatttggttatactctcctcccacaaaactcccttaggctttggaaactgaaaaaaatgtaagcggagtgattgattgcctgaggttcctcttgttagaactgatcaattgagccacatctacagcaatattagagagggaggaaacccatgagtcctcaaatcttttttaagagactcattgatcgtcttgaatgcttagatggtccatatggacattcggtgctttttttgtttggcgtaagtgaagcagcatcattgtctggggtaaatacccagggttcatcatcttgtgccaagaagattaaggacacagaccacagaggagtgagtttaggagcagaggtttaataggcaaaagaaagagaaaggaggagaccagctctctcccttgtgagacagaggagctcccaaaagggaaaaaaaaaacaccccttggtggactgcaccagaatttataggcaggcttaaggaggtatgtctgatttacgtaaggctcacagattggttcgaccaggcgtgatgtttacatagtgcagagggaaaggctggttgccccaccctaatcttattattatgtctttgcctagcaggggccatattgtctgctccttactgtacacatggtttggcaaagagaagggaagatggagccactattttgaacatgcctagtcccaggtagccttttcctatcggcacaactggtggcattcacccgtgcaagcttccagcttgcttatcgatgtctgcagcttaattatacaggctgctctttgttagaaaagaaaatgatttgggggctgcttttcattaaaaggaaaactttaccaaggactcctgtagcctcactatctgcctaagtaatttcttcttaactcctatatcatgaggattgacattcgtcagaggtaaggtgttatgctgcaagttcgtattatttggcaaattgatgggaagacgttacagtaaatagtctccaaacaagatgccatgaattgattattttcctctatgcacatgatactctgcccaccaaaatttatagtctgcttcttactctcttaaacccggagtggacttttgacttggcttggtgagtaacatatagcagaagtgatgctatgccagttccaggtttatcgtttaagaagtctggcagcttctgctttcattcataaagccagccaccatctaagaaatctgattaacctgagacaaccatgctgtgaaaagaaacaaaccagccacatggaagagaatgaggcactgtccatgtgaacgaagtcttctcagatcttccaacccagcccagacatcagctggatacagccaaaggagtgactcagttgatactactagtcagagaagagctgcgtgctgagccaaagcgacctacagattcaggagaagtattgttattttttgtttaatccatgaagttttagggtgtgttgttacacagcaatggataattgatggatgtttaggtcaagaatagacaaaaataaaaaataaaaatgtgttttaatgtcccatacataatcgaccaattgccaggagtttgcaactctgggtgtacatcagaatcacctggaaagttttttaaactacagatgctcaaagcttaatggagacctttaaaatgcaaaattttgaggcctgcacatttgcatgtttttaaattccctcaatatatataaaatgagcagttattgtaataacccacaaaattaaagactcatttactttaagaagctcctttttcaaaatgcaaattctttctgggagtgataaatcaagcagatggtcacaggattacatctgtaatcagattgttttcttaacgcttggctaggattagcaaatgtagagtacaggagagctaaatacaaagcatgcacacacctgaccagggagctattgattgaggtcccaaagagatgtcattataacagcttactgtgagcttgggcctaacaggtgcctggaaattggaagacaggtgcaaaagggacagtggaagattgacaaaggctgattacaactattctgatgggaagtcactgaaaatcaccccaggagtggcccttagagcttgttatttaggaacctaagaaattattatggaggttactgaaagggaccacagtaaagatcaagtcagataacaatacctgtgctcataccagacctctcagaaggccaggatatgaagttgttctgattcctctaccctaatcaaataaatagaatgtgtctaaagataagtccaacaagagtcagagttcagtgttgaaaatggagtgttgaagaaagaaggcctttgttgtgagccggagagttcctgtatctttgtcttttccttcatatttcccccaagctgcccagaccacctttctcacaaagcctcacagggtggttacctctccctgaggagtggtgagtcagctccctctgagaacttttcacttttactatttctctcttactgatcctgttctaagatacacctgggggttttatgttccctgaagaaaggaagtgaaacgtactgcatttcctatactacttaagcttcctttctcgatgtgaaaagaacaaacctatagttcctgaaatctctttacttcctgtgttgctaagtcagtaagaagagaattagcatgtactgagcacccaccgtatgctaattgcgttacctacatcctcatataaattatcatgctctatgagttatacttcttgagataagttctgtgataccatttgatagaataggacactgaggctaagattttgaggttactagcctaaaatcatataattaagaaacgttgggaacaggatttgagcccagatttggttgacctatgtcctataattctagccaacaaagtatctctgccaagaattaaaaaaaaaaaaatcattatttcagggtctggagtgggacattttcagcagatcattttgttatcatacgaacgcagcctaaccacctgctactccaagtgagagtcaaaatccagcagcattggtctcacctgaaagtaagtactattgacgcatgctactcaagtgagctctgctgacaggccacattgacatcatctgggagcctgtgtgaaatgcggcatctcaagacccactccaggcctactgaattagaatctgcattttcacaaagtccccatgtaccttagcaggcacattaaagcttgagaagcactgacctaaattaatgtgttctaattatttgagcctgatacctcactgaatatttttttctagacacagtgctacctacatacttgaattcctagagaactcacatttcacaatgttggtggcgggtgggggggggccttgaaacccaaagaggcaaaatagtgggttgtagacatcccagtaaattagtggcagagtcagacctaagataagtccttaccagatgctcaatacctgtcatttagacattatgtattaagttcttggtctatgccaggaaccttgctagatgctgaggtgaaagaaataatttgtgccctcaaagaacccctgatccactgagggagacagatacacacacaaacaattataaaacaatatggcaatggggagacagggtggcacaaggtgacatgaagcttccaataagagacatttggagtcaccaggcttcgtggaagaggtgcagccttcgccagaccaggtgccacccactttgtgattaattgatgtaccagctccccctctatccttcattcccctttctcattttcccttgtcttcactccattctctttaccatctccccttggcctgggtcccttctacttctcagattcccatcttttccttcaaggcttttcctgcctgctcaccctaatccacaagttctgctttctcgtaacatctgtaacttttttgtttactagcagtttccaaatcctactgcccaccaacatcaccttaggagccttaaaaactaaaaagccccataacaggccctaccctcaactctgcagatgattccagggcatcatttttccccagagctgcatgtgcagcaagggttgagatgaaaaccttgttgaccccactcgcctgccatctacccatagcagcttgcattacagagagaggcagagtttacaaaggcctctgcacgcatcatcccatttgattcccacatcagaccggtaaaataagaagtgagaggtgcttagtccattttacagatgggaaaactaagtcatagagaagtgaagtcacaagcccaagttgcccagatcttggacccacatcttctgacttgccctgtgctgcttggagaatatatgtatggttagaatgaaggcaaagccctgccttgctctctcaatgcccccatttccccagcctaacacatttaagctactcagctcagagctaactgatggttgatgacaactgctcattgaaggaggcatgtgtcatttccccaggtcttgaaggcctccacctgagaaagaggaactaggagttgggtgtaaatcagaaaccatatgaccagacacacttgagcacactctgtgagaaaagggaaggatgcggacagccagaggtattggaactttcctcaaaatcaatcaggagtcatgttctgatcagaagggcacataagaggatcatgaggacagaaatgttctagggtttcgttccttcccacccagccgccatctgctatcctgtctgagcagtgcttctgtgaatggggcccttcttacctatccttgcctaaaaagtaaacatggaaatattatgaagctcctctctctcctgatcctgaaagcagcccaggaagttgggctgatgagaggagcccttagcagacataaacttgggcaggaagggattgggagtgaggactaggaagaaaacttcttttatctttttttgtaatctcttcgctaggttttctccatgttctgcttcagaaatagactggatatgtcctatgtatgttttattcctctcatctcaggaataatttccagttcttagaaaagagcaaggcagggaacgggcaggggcgggctgaacgcctccctgctgcgaggaaggaggcacagatagggcgcacaggagagctgacattacacaatccacatatcagcatttctggggcagccaggaggttattcctaaggggaacatgttctaaaccagcagaaaataaatgctgcttcaaaaataagcatttcaggctgtgactttcctgggtcagagaagccttgttatttttcagagtaaatctgccccagtgtacacggctgctgcactaaaagggcttatttcagaaggcactgggtccttattttcataaataaataaatcctcacaggcctttggaatctgattatatttgggacaaaactcctaaatatagggccattgtctgaaaccatgtgaccaaccccagtcttttaacttaattgtatctattagagaatggcatgcttccagggccaggattaggctgtaagctggttctcaacaaatatcatgggttcttttttgttgtttgcaggggaagtggggacaaatgacttactcttgattagaaaaactaatactttcatttccaccaagaaaaaataaaaccctcttcatgggtgtttgtcatttttcttggataggacaaaatcctattctcagagaaaagcctaatgcacacatccatcctctgtgtcgctaactggtggagacgatggtttctatcttggtgtcttttgttaactgacccattcccaactttattattattactattattaattattaatattattattattttgagacagagtcttgctctgttgcccagggtggagtgcggtggtgcaatctcggctgactgcaacctccacctcatgggttcaagcaattctcctgcctcagcctcctgagtagctgggactacaggcacctgccaccaccacgcctggctaatttttgtatgtttaatataaatggagttttgccatgttggccaggctgctcttgaactcctgacctcaggtgatctgcctgcctcggcctcccaaagtgctgggattacaggcgcgagctaccgcacccagctccaacttgattaatttaatttagagtgacgttaactctattcattcactagaaaactgtctactggtgtggaccaagtctgaggaaacacttggtctatagaacagatggctggcttgccttgatgaagctgtctgtttaatgggtaggaagacattaataaataatcacaccataagccatctaattttattggaataaattccttgaaaaagggctgtgaagacacaggccttgaccttggagtataggcaggggcttcaggaatggcttttctgaggcagtaacatttcaaatgagactttcaggaataagagtgggctagggaagagaagccggaagggcaggtgttcttggcagtggggatggccagtgagtgtcccgaaagaaggctagcttctgccaccatgccctgcctgcaaactagacaggtagcaatggtaaatgcatggcaggtgattgggacacagaagagggataccagcatcaaaaaggtttcctggaggagacacatttgagccaggtgaaaggaggcaggatgaggtacatttctgaaagaggagatttggcaaggtcacagaggcaacagggatttggggagtgagacgaagcaaagtccgactcttattgcaggggtaggaagctagggaactgtgggcagagatttgaaactgccacatggagatgtggagagagtgggagcactggagggccaatggggtgttggtggaacaaggtcaaattgaaatgtttggatgacagcttcgagtgaagcaaaattagaaatagggccacctcataaaactgaagaatcacacttcagacttgttccgggttaaattttgtttacaaaagcagggggcagcagactggatttggcccatgggctgtggttttcctacttctgctccagatgggagactggaggttcagggaaaagcatatactaaccatggtgggaatctcttttggagaggaatgcattaagtgaaaccatcttgctggcatctctttctgtgctggttggtttcttgtggttcagaaatacagtgagtaagtcagtcaacaagactgtacaagagttttctaagttccaggtctgtgctaggacccagagatcggtgagaacaaaatggaagggacatctttgtgcccattcagtgagccggtgcatgttgattgtccactatggggcaggctctctgccaacaccttgagattctagactagtactgaacaagtctagtggcacgtctatccctccatcagtccatccatccacccagctactcaacaagcatgtcacgaacttctgccagcataagacatgttggcaggactctgtgggatttattggtaacccagccatgactcttgcttccaacttgcctaccttctagagagatagataagccaagagcattaaatatccaaggtctgaggtggacagggaaatgtactaccagcaaagtacagatgggggtggggtgggtgctcagagcagaattagaagactttcagctggaagagatcaggaaggctgacaagatgacatctagtttcctgttaaccctttaaagtgacatatgagtctctgcaaggattacaagcagatttgaaaagacaatgctcttctgtacatgctgttagcccttgggtcccatcagggcaagtattacaaatgccttgtgatttcaccgtcctggagatggctcctttctcctaccagcaaaaggatcttacccagcacagtttgcctatttgctaggaattttcatgtgtcagctcttgagttgggcactgaaaggagttattaatagaaaataataattcttgcaataactgtgctgtgtgttgttccatctattttaaatatggggaagctgaggctaagaggattaagtagcttgcctggtattacagaagagaaggaagcaagcatggaacccatatctcttgactctcagatgattctctctttaacaaactctctggttgccagtcttcagattagtagcctataatttgctttgacttcttcctccattcaggtcagctccctgcttgacatttctttctccactccatttctcagagacagctctttctgctttattcccacaaccactgcaccagctccatgctcatcattattgggtcaacaaacatttattttctgcccacaggggatcatagtctattatccaggattttcctgggtaataaattggccttctcactttttactttcccctttcaaatctgccaatcagataccagtaataagccatctccttagcataatgtaagacacattcactgattatctaacttgtggcaggcattgtcctgggtcctgaggaagaaaaattacaaatttacaaatctcatagtttacaaagcattttactgaagccagatagacctcaggataaatagcaaacttcatctgagttggccatagggagtctgggcaaaagaaacactcttgatacagaaagaaagaaaagatgggttttctgaaagaaagaagaagcttgtgcagtatttggcagccccagccaacagcacaagagggaagggagaaagagcacctcattcccaattgtagggcaagaacagattcaatacagctacataaggagccaagactgaattagatgtgtagggaggatgtcctgttacctgagcccaaagtttaacaccctttgatcactttccgtctagagagatcgctcagcaaaggtcattggttatgataattaaagtgtttttctaaatagaagcaatttcaagaaggcaggttgacctttgggagaatttctagcagcaatcacttcatgattgattggaaatatctgcaaatacacgtgtcctgagaggtgaatgagaaatgtgtgcagttactgttttcccaatgagtctatttgtccttgtggaacagtttaggggagagtagcattgaggaaacaaaaatggcccagggatcttggaagctctatgtgtgagtatattcctcagttttcagatttaggggattggggagggatgtggaaagcatagacagaaggcactgcagaagaggagagtaaatgactttaggtcattgaactggtttttgatagaaatcaagttaagaaaaatagaagtcaatagtactaagtttgaactttatctttctaaaaactgcttctgtgggcagagttcatatgctggaggaatgaatcataatgacaccctttggtatgaccctggggagaataaatgtgacttagttgaggtttctgaggatgacattcagaaagaaaacaagagagggaaataccctttctctctgtcacactctcaggttagaaactcactttaggggccacagcctatgacaaatacactcatgcaaattctgtgcttgcttccatgctccatttctttgccaactatgtagctaagcaaaatggaacaagaaatagtgtcttgggagaaataaaattgctggattagatacaggccacctttatataagaaaaaacgttaaattatgctactggtgaaataagtccatttgggttattgtggaattttatgtgagactgagatagctgattaagatggtgatgcttgagtattatcattttagtaataaatatttccagaatcaaagtgaataatatgtagggaagagggaggcaaactgcggccatgggccagcagcctggttttttgttttgttttgttttatggctcttgagctaagaataatttttaaattttgaagtggttacattttattttattttatttttttaggctagtctagtgaatacattttaaatgcttatacaagcactgagtgatagcctcaattttgcctgttggctcacaaagtctacaatattaattaactgtatcttctaaaaaacagtttgtcagcccctgggacaataaatagtagatatagcctgggcatggtggctcacacctgtaatcccagcactttgggaggccgaggcaggtagatcacctgaggtcaggagtttgagattagcctggctaacatgatgaaaccctgtttctactaaaaatacaaaaaattagctgggcgtggtggcacgtgcccgtagcacctgtaatcccagcaacttgggaggctgaggcaggggaatcacttgaacctgggaggcagacgttgcagtgaactgagattgcaccgttgcactccagcttgggcaacaagagtgaaattctgtctcaaaaaataataatagaaaaaaagaatgtatagtctcctgggtcaaagagatctgaatttggattttgcctagatacatcattaattcatttcaaaatacttatcaagtaggtattctttcttcacttggcttccaagatgccaccctctcctaaatttcctccttcctcactcaccaattcttatcaatcttctttgccagttgctcccagtcttcctaatctctcagcaccaagaccacagctcaggtcttggccccactcctcttttccgcctgtactcacctggtgcttgtgccgagagttcattcttcccattgtatttactaacaccaatgtgctgatgacttccaaatttatacttttagcccggatctctcccttaaactctacagtcgtaatgcaactgtcttctttaatatctccatttgatgatgaacatatatctcaaacttaacatgcacaaaatggagcttctgatcttcatccccaaacctgatttttctagagtcttccttgtattggtaaatgataacttcattctccctgttatgtcagtttcttcattggaaatgggcatagaacctgtctcagggctgatataaagaataaatgagataatatagtgttaccgctactcataagacctacgacagtcagcattcaataaaagtgaggagaggacagcataacctttccattctttcatctaatggctctgttctttccttctctttcagacccttactatcttatcctagaaccattacaaaaatttagtaactggtagccttgatttagtagtaaagtggtaattatagaaaatattattctccccatttaaagatgaggaaaatgaaacagccaagatgccctagtcccacctcctagcaagcaccaaagttggaatttaaacatcagccaactgaaaagccagtgttctccaggctcatcctctgcaacacagccttcaccagcttactgtcaggtgaagcgcacaccctacaaggctaaatatgacaacaaaacagggtaactggactatgggagacaagagtagaggttcctcaactgagctaacatatcagaattctctgaaagttttatgcagattcctgagctttgcactagaactactgaatcaggtcgggcccaagaatgtataaatttttagagctccaaaggcatttttgagcagtcagatttaggcgctcctgctctaggttttaaaaggaagatttcctaatatttagagccaataaatataatacaatcatctacaactctcaaagagagacgaaaaaccagattttccaatatataaatgggcaaagggcataaaaggaggatttacaaaagaggaagcaaaatggttaatagaaatatttcaagttatgagacctacttatattcaaataatacaaacttctaaatgttaataaaatgccatttttagctaccaaattagccaagttttttttaatgcgaatacagtattcctgtgagtatgtgatgagatgggcactttcataaactactgagaaggcaaatattggaggtaccactttgaaaagcaatttggtagcatgtaccaaagtcttggaaatgtcagtagtctttaattcagaaactcccttatataaatacatgcaataaaataatccaaaagcaatgaaaaaaatatgtactgcacctaaaagacatttataacaatcatttacaaaagcaaaataaataaaaataagtgaaatgttaaaacaagagaaaatgtgaattattcagcatcattgattattaagcagttatcagatctttcagaatacactatattatttcattttacacaaataaataaatatatatgccgggggaaaagtttgaatgtccttacaccaaactgttaacaacagggtctgtaagtggagcataatattgttctacccatataaatttgttcagacaaattatgctaaatccactactcaaaatatgatgtttcttctttttagaaggttctaccctgctttctatgctggtaaaatatttttgttttgagaactaatgcaagtgtcatctcccctataaaatctaagtgttttttacccaagcagtgatccgtttatcccctttatttgttagcatagattacctttattttagcacttacttgctattcaaaaattatctgttgctgtatttgttcctcccagcagactatgagctgcctgaaggcaagatctggggggtcttacgtggccagaagcgtttattaaattaaattccttgaatgatagaaagaaagctcaatggaaaccttccatttagtgtctgtgactccatcacaaagaatgctgtgcaaattgctaagaggatagataactgtttttaccaccagaaaaaaaaagagagaacagaaaatggtaaatagttatctcatgttgatgaaatggtggatatattaatcaccttgattatagtgtttatttcaaaatgtatatgtgtatcaagacatcaagctatgcaccttaaatatatacaatatttgtttatcaattatacctcaataaataggaaaaaaaaatgtgaaagacttttggcttctacttaggatatagaaagcaggaaagagtagcactcctagaagtactagaaaataatgctaaagaatctgcagattcacagctctttatttttatttatttatttatttatttaaactaatcagagaactgaggtcgcaagacaacaaactggtcctaaataaaaagtaagaaaaatgccggggaggagccaagatggccaaataggaacagctccggtctacagctcccagcgtgagcgacgcggaaaatgggtgatttctgcatttccatcggaggtaccgggttcatctcactagggagtgccagacagtgggcacaggtcagtgggtgtgcgcaccgtgcgcaagccaaagcaaggtgaggcattgcctcacttgggaagtgcaaggggtcagggagttccctttccgagtcaaagaaaggggtgatggacgcacctggaaaatcgggtcactcccacctgaatattgcgcttctcggaccagcttaaaaaacggcgcaccacgagattatatcccgcacctggctcggagggtcctacgcccacggagtcttgctgattgctagcacagcagtctgagatcaaactgcaaggcagcagcgaggctgggggaggggcgcccgccattgcccaggcttgcttaggtaaacaaagcagccagccgggaagctcgaactgggtggagcccaccacagctcaaggaggcctgcctgcctctgtaggctccacctctgggggcagggcacagacaaacaaaaagacagcagtaacctctgcagacttaaatgtccctgtctgacagctttgaagagagcagtggttctcccagcacgcagctggagatctgagaacgggcagactgcctcctcaagtgggtccctgacccctgaaccccgagcagcctaactgggaggcaccccccagcaggggcacactgacacctcacactgcagggtattccaacagacctgcagctgagggtcctgtctgttagaaggaaaactaacaaacagaaaggacatccacaccgaaaacccatctgtacatcaccatcatcaaagaccaaaagtagataaaaccacaaagatggggaaaaaacagaacagaaaaatgggaaactctaaaacgcagagcacccctcctcctccaaaggaacgcagttcctcaccagcaacggaacaaagctggatggagaatgactttgacgagctgagagaagaaggcttcagacaatcaaattactctgagctatgggaggacattcaaaccaaaggcaaagaagttgaaaactttgaaaaaaatttagaagaatgtataactagaataaccaatacacagaagtgcttaaaggagctgatggagctgaaaaccaaggcttgagaactacgtgaagaatgcagaagcctcaggagccgatgtgatcaacttgaagaaagggtatcagcaatggaagatgaaatgaatgaaatgaagcaagaagggaactttagagaaaaaagaataaaaagaaatgagcaaagcctccaagaaatatgggactatgtgaaaagaccaaatctacatctgattggtgtacctgaaagtgatggggagaatggaacccagttggaaaacactctgcaggatattatccaggagaacttccccaatctagcaaggcaggccaacgttcagattcaggaaatacagagaacaccacaaggatactactcgagaagagcaactccaagacacataattgtcagattcaccaaagttgaaatgaaggaaaaaatgttaagggcagccagagagaaaggtcaggttaccctcaaagggaagcccatcagactaacagcagatctctcggcagaaaccctacaagccagaagagagtgggggccaatattcaacattcttaaagaaaagaattttcaacccagaatttcatatccagccaaactaagcttcataagtgaaggagaaataaaatcctttacagacaggcaaatgctgagagattttgtcaccaccaggcctggtctaaaagagctcctgaaggaagcgctaaacatggaaaggaacaaccggtaccagccactgcaaaatcatgccaaaatgtaaagaccatcaagactaggaagaaactgcatcaactaacgagcaaaatcaccagctaacatcataatgacaggatcaaattcacacataacaatattaactttaaatgtaaatggactaaatgctccaattaaaagacacagactggcaaattggataaagagtcaagacccatcagtgtgctgtattcaggaaacccatctcacgtgcagagacacacataggctcaaaataaaaggatgggggaagatctaccaagcaaatggaaaacaaaaaaaggcaggggttgcaatcctagtctctgataaaacagactttaaaccaacaaagatcaaaagagacaaagaaagccattacataatggtaaagggatcaattcaacaagaagagctaactatcctaaatatatatgcacccaatacaggagcacccagattcataaagcaagtcctgagtgacctacaaagagacttagactcccacacattaataatgggagactttaacaccccactgtcaacattagacagatcaatgagacagaaagtcaacaaggatacccaggaattgaactcagctctgcaccaagcggacctaatagacatctacagaactctccaccccaaatcaacagaatatacatttttttcagcaccacaccacacctgttccaaaatggaccacatacttggaagtaaagctctcctcagcaaatgtaaaagaacagaaattataacaaactgtctctcagaccacagtgcaatcaaactagaactcagaattaagaatctcactcaaaaccgctcagctacatggaaactgaacaacctgctcctgaatgactactggatacataacgaaatgaaggcagaaataaagatgttctttgaaaccaacaagaacgaagacacaacataccacaatctctgggatgcattcaaagcagtgtgtagagggaaatttatagcactaaatgcccacaagagaaagcaggaaagatccaaaattgacaccctaacatcacaattaaaagaactagaaaagcaagagcaaacacattcaaaagctagcagaaggcaagaaataactaaaatccgagtagaactgaaggaaatagagacacaaaaaacccttcaaaaaattaatgaatccaggagctggttttttgaaaggatcaacaaaattgatagaccactagcaaaattaataaagaaaaaaagagagaagaatcaaatagacgcaataaaaagtgataaaggggatatcaccactgatcccacagaaatacaaactaccatcagagaatactacaaacacctctacacaaataaactagaaaatctagaagaaatggataaattccttgacacatacactctcccaagactaaaccaggaagaagttgaatctctgaatagaccaataacaggagctgaaattgtggcaataatcaatagtttacccaccaaaaagagtccaggaccagatggattcacagccgaattctaccagaggtacaaggaggaactggtaccattccttctgaaactattccaatcaatagaaaaagagggaatcctccctaactcattttatgaggccagcatctttctgataccaaagctgggcagagacacaaccaaaaaagagaattttagaccaatatccttgatgaacattgatgcaaaaatcctcaataaaatactggccaaacgaatccagcagcacatcaaaatgcttatccaccatgatcaagtgggcttcatccctgggatgcaaggctggttcaatatatgcaaatcaataaatgtaatccagcatataaacagagccaaagacaaaaaccacatgattatctcaatagatgcagaataggcctttgacaaaattcaacaacccttcatgctaaaaactcttaataaattaggtattgggtctcttaaaaaaaaaattagcttggtgtggtgggtatgtgtctgtggccccagctatttgggaggccggggcgggaggatgacttgaattcaggagtttaaggttatagtgagccatgatcgtgccactggactccagcctgggtgacaaagtgaggccctagctttaaaaaaaaaaaaaaaaaaaaaaaaaaaaaaaaaaaaaattgccggccatggtggccgcgggtggtggttggcgccgctgcgctgcggcccggggcagtgcggagccgggacagtcgcggcgctgacgcccgcgggccccagctgcagatatgaagcggagccgctgccgcgaccgaccgcagccgccgccgcccgaccgccgggaggatggagttcagcgggcagcggagctgtctcagtctttgccgccgcgccggcgagcgccgcccgggaggcagcggctgggaggagcggaagggccccgcggggcccgagggcagggagcagccgcctgccttggcctcccaaagtgccgagattgcagcctctgcccggccgccaccccgtctgggaagtgaggagtgtctctgcctggccgcccatcgtctgggatgtgaggagcccctctgcctggctgcccagtctggaaagtgaggagcgtctccgcccggccgccatcccatctaggaagtgaggagcgcctcttcccggccgccatcacatctaggaagtgaggagcgtctctgcctggccgcccatcatctgagatgtggggagcgcctctgccccgccgccccatctgggacgtgaggagcgcctctgcccggccgagaccccatctgggaggtgaggagcgtctctgcccggccgccccgtctgagaagtgaggagcccctccgcccggcagctgccccgtctgagaagtgacgagcctctccaaccggcagccaccccatctgggaagtgaggagcgtctccgcccggcagccaccctgtccgggagggaggtggggggggtcagccccccgcctggccagccgtgccgtctgggaggaaggtgggggggtcagccccctgcccggccagccgccccgtccgggagggaggtgggggggtcagccccccgcctggccagccgtgccatccgggaggaaggtggggggtcagccccccgcccggccagccaccccgtccgggagggaggtgggggggtcagccctccgcctggccagctgccccgtctgggaggtgaggggcgcctctgcccggccgcccctactgggaagtgaggagcccctctgcccggccagccgccccgtccaggagggaggtgggggggtcggccccccgcccggccagccgccccgtccgggagggaagtgggggggtcggccccccgcccggccagccgccccgtccgggagggaagtgggggggtcggccccccgcccggccagccgccccgtccgggagggaggtggggggttcggccccccgcccggccagccgccccgtccgggagggaggtgtgggggagtcagtcccccgcccggccagccaccccgtccgggaggtgaggggcgcctctacccggccgcccctactgggaagtgaggagcccctctgcccggccagctgccccgtccaggagggaggtgggggggggtcagcccccctgcctggccagctgccccgtccgggagggaggtgggggggggtcagcccccccgcccggccagccgccccgtccgggaggtgaggggcgcctctgcccggccgctcctactgggaagtgaggagcccctctgcccgccagccgccccgtccgggagggaggttggggggtcagtcccccgcccgccagccgcccgtccgggaggtgaggggcgcctctgcccagccgcccctactgggaagtgaggagcccctctgcccggccaccaccccgtctgggaggtgtgcccaacagctcattgagaacgggccaggatgacaatggcggctttgtggaatagaaaggcgggaaaggtggggaaaagattgagaaatcggatggttgccgtgtctgtgtagaaagaagtagacatgggagacttttcattttgttctgcactaagaaaaattcctctgccttgggatcctgttgatctgtgaccttacccccaacccggtgctctctgaaacatgtgctgtgtccactcagggttaaatggattaagggcggtgcaagatgtgctttgttaaacagatgcttgaaggcagcatgctcgttaagagtcatcaccaatccctaatctcaagtaatcagggacacaaacactgcggaaggccgcagggtcctctgcctaggaaaaccagagacctttgttcacttgtttatctgctgaccttccctccactattgtcccatgaccctgccaaatccccctctgtgagaaacacccaagaattatcaataaaaaaataaatttaataaaaaaaaaagattaatacactcaatgttatataaatacgtgtgctacttaaattttgcaccctaagaacttcacttgccttaacctagttctggtcctgctctgccacccctagcttagattacataggagcacaaaatagcttaatttaccaagagtgcatacattggggaagaaatagttcaccaaaaagaaattggaatacaattggtgaaaataggctgaatatatgatgtgtggcctgaaaaaaaatatccattacaaacatgaagatggctgtgatatattgccaaattcccacaaccttttatagcccctgtatccacatcctttgtcatgtaaattttcagctccctccctttggatcaggtttatatgtttgatgagctttgaccaacagaatgcaattggaatagaacaatattgggaaaatcttatttgttttaaaacttcattcaaaactagtcccatgaaaaggcaaactgagtattatgttagctgtgggtttttcatatatagtttttacatggaggtggtttttttatttctggtttgttgtacatttttatcatgaaagggtattacattttgtaaaatgcttttttctgcatcaattaagatgatcatgtgggttttctccttcattctgttaatgttaatgttaaataattaatgttaattaattatgttaatattatgttaattaattctcatatgttgaaccatccttgcattctaggaataaattctacttggtcatggtgtataatcctttaaaaaaaaataaataaattaggtattgatgggacgtatttcaaaataataagagctatctatgacagacccacagccaatatcatactaaatgggcaaaaacgggaagcattacctttgaaaactggcacaagacagggatgccctctctcaccactcctattcaacatagtgttggaagttctggccagggcaattaggcaggagaaggaaataaagggtattcaattaggaaacgaggaagtcaaattgtccctgtttgcagacgacatgattgtatatctagaaaaccccattgtctcagcccaaaatctccttaagctgataagcaacttcagcaaagtctcaggatacaaaatcaatgtacaaaaatcacaagcattcttatacaccaacaacagacaaacagagagccaaatcatgagtgaactcccattcacaattgcttcaaagagaataaaatacctaggaatctaacttacaagggatgtgaaggacttcttcaaggagaactacaaaccactgctcaaggaaataaaagaggataaaacaaatggaagaacattccatgctcatgggtaggaagaatcaatatcgtgaaaatggccatactgcccaaggtaatttacagattcaatgccatccccataaagctaccaatgattttcctcacagaattggaaaaaactactttaaagttcatatggaaccaaaaaagagcccgcatcgccaagtcaatcctaagccaaaagaacaaagctggaggcatcacactacctgacttcaaactatactacaaggctacagtaaccaaaacagcatggtgctggtaccaaaacagagatatagatcaatggaacagaacagagccatcagaaataacgcggcatatctacaactatctgatctttgacaaacctgagaaaaacaagcaatggggaaaggattccctatttaataaatggtgctgggaaaactggctaaccatatgtagaaagctgaaactggatcccttccttacaccttatacaaaaatcaattcaagatggattaaagatttaaacgttagacctaaaaccataaaaaccctagaagaaaacctaggcattaccattaaggacataggcgtgggcaaggacttcatgtccaaaacaccaaaagcaatggcaacaaaagacaaaattgacaaatgggatctaattaaactaaagagcttctgcacagcaaaagaaactaccatcagagtgaacaggcaacctacaaaatgggagaaaattttcacaacctactcatctgacaaagggctaatatccagaatctacaatgaactcaaacaaatttacaagaaaaaaacaaacaactccatcaaaaagtgggcgaaggacatgaacagacacttctcaaaagaagacatttatgcagccaaaaaacatgaaaaaatgcttatcatcactggccatcagagaaatgcaaatcaaaaccacaatgagataccatctcacaccagttagaatggcaatcattaaaaagtgaggaaacaacaggtgctggagaggatgtggagaaataggaacacttttacactgttggtgggactgtaaactaattcaaccattgtggaagtcagtgtggcgattcctcagggatctagaactagaaataccatttgacccagccatcccattactgggtatatacccaaaggactataaatcatgctgctataaagacacatgcacacgtatgtttattgcggcattattcacaatagcaaagacttggaaccaacccaaatgtccaacaatgatagactggattaagaaaatgtggcacatatacaccatggaatactatgcagccataaaaaatgatgagttcatgtcctttgtagggacatggatgaaattggaaatcatcattctcagtaaactatcgcaagaacaaaaaaccaaacactgcatattctcactcataggtgggaactgaacaatgagatcacatggacacatgaaggggaatatcacactctggggactgttgtggggtggggggaggggggagggatagcattgggagatatacctaatgctagatgatgagttagtgggtgcagcacagcagcatggcacatgtatacatatgtaactaacctgcacaatgtgcacatgtaccctaaaacttaaagtataataaaaaaaaaagaaaaaaaaaagaaaaatgccttcaggaagagccaggacatgaacacatgttttcttaggatagacgccacaagtaaccatataagctgttgatgataattcaactaatgttttaaaaattggtaaaggctgagtatgggttaagataagattatggaatccctgcaagccacagagaaatgggagttcacactattcactggctcttctcaatagactacaaatttcatcaggtgttcacaagaatgattggaggcagggtgagaatccaagaaaaatttactcatggctcatatttcaaagagaaaaatagcagcctgtgtagcattggaataaagccatagattcttcaccctacctcttctatagcgcacatagcttaagcttgtaagaaaaagacaataaacaatgttggccttgggacagtggtgaagatccactgcatctggagagaagaaataaacatagactctctatctctgaaagaaaggcaacaatacatgctaagctcagataaacagctctcttgcagtttaggaaagggcagtatcatggagaaggcaccactatcagggtattcaggaacacaatgcctatctgaaactgagcctcaatccaaacaacagaaaacactctgctcctctcctcagtcagcagcaggttcttgctatgagaggacaagagcatgtgaaaaaatcatcttatagcatcagagaaaagaaaagacctaaacctgatagtggagcaaatcctgaggaacatcatcttgcacatgagtctccagtctaaacacaagttacctctagaacttaaatcttattgtgcaggaaaggtaagttatatagtttggatatttctcccctctaaatatcttttggaaatgtaatccccagtgttggaggtgaggcatgtaggagatgtttgaatcatgaggacggatccctcatacatggcttagcactgtccccttggtgatgagtgagttcacacaagatctggttgtttaaaagggtgtggcacctcctccctctctctcttggtcctgctcttgtcatgtgacatgctggctccctgtcaccttctgccataactgtaagctccctgaggcttcaccagaagcagatgtcagcatcatgctttctgtaaagcctgaagaatcatgagtcaattaaacattttttttcttttttttttttgagacagagtctcacttggttgctcagactggagtacagtggtacgatctcgactcactgaaacctctgcttcctggcttcaagcatttctcctgcctcagcctcctgagtagctgagattacaggcgcccaccaccaaaaaaaaaataacccagcctcaggtattctttacagtaatgtaagaatggtctaatacagaaaattggtactgaggagtggggcattgctataaagatacctgaaaatgtaggaccaactttggaactgggtaataggactgagataagaagagtttgaagaatgcagaagaaagtaggaagatgaggaaatgtttgaaacttcttagaggctagttaaatgattgagaccaaaatgctgaaagtgatatggacagtgaggtccaggctgatgaggtctcagatggaaatgaggaacttattgagaactgggggaaaggtcacccttgttatgccttagcaaagaatttggctgcattgtgtttatgctgtagagatatttggaagcctgaacttaagagtgatgacttaggatatgtgggagaagaaatttctaagcagcaaaacatttaagatgtgacccgactgcttctaacagcttatactcagatgcaggagcaaaaaaaaatgacttaaaggtgggatttatatttaaaaagaaagccaagtataaaactttggaaaatatgtagctttgcaatgtagtagaaaaggaaagctcattttcaggggaagaatctaagcaggcggcagagtgcccacttgctggagagatcagcatgattaaaagggagccaaatgctaatagccaagacaataaggaaaggcctgaaaggcattttggagatcttcaaggcaacccctctcatcacaggctcagagaccaaggaggaaagaatgatttcatgggccagacccaggtccccactgacctgcacagccttaggacactgctctctgcatccaggccactccagttccagcctcactcaaaaggccccaggtacagttcaggtcacagctctggaaagcacattctgtaagccttggtggcttccatgttgtattaaacctgcaggtatttagcacacaaaagtaaaagaggcttggcaacttctacctagatttcagaggatacatgagaaagcatgggtggccaggcagaagcctgtacaggagcagagcccccacagagagcctctgctagggtagtgccaaggaaagatgtgggattggagcctccacacaagtcctcactgagacaactgcttagtgaagctgtgggaatggggcctctaccttacagcccctaaaatggtagatacactagcagcttacatcctgagcctggaaaagccacaggcattcaactacaacccatgaaagcagcaacacgggcttcgcccagggaagccacaggagtggggctgcccaaggccttaggagcccacccctcattcagggcaaagaatcaaaggcgattatcttgaaactttaagatttaatgacagccctgctggatttcagacttgtgtggagcctgtagcccctttatttcggccaatttgactcccttttaaaatggaaatgtttaatcagtgcctgtatctccattgtatcttggaagtaaataatttattttgattttacaggctcataggtggaaggatatgtctcagatgagacttaggacttgatgttggaaagagctaagactttgggggaccttgggaaaagatgattgtattttgccatgtgagaagtacatgagatttgggggccagagggagaatgatatggtttggatgtttgtcccctccaaatctaatgttgaaatctaatcctcagttttggaggtggaatctggtgggaggttcctgaatcatcatgggagcagatccctcatgaatggcttagtgccattcccttcataatgagtgagttcacatgagatctggttgtttaaaagagtgtggtatcgccctccactctttctcttgctcactctcactatgtgacatattggctgcctgtcatcatctgccataattgtatgcttcctgtgacctcaccagaaacagacaccagcaagttgcttcctataaaacctgcagaacagtgagccaattaaacttctttttataaaataaattccccaacctcaggtatttctttacagcaatgcaagaatggccaaataccataagcatatcagtaataaatcccaaactgagcttaatttctgacttaaatgactcaaaccaaagactatcttcccccaaaatcctggcaaaattcacagtatacccaattgattcataaaaattacatatatcagtcttgtcatataaaaatattatgaggtatacaaaaaataagacacaaagaaataaaacatattgtcaagggacaacgcgatcaatggaaccagactcagaaatgaaatagatgttgaaaacgtcagggaatttaaaacagctgattaagatattaaagactctagtgaaaaagatacataaattgcatgatcaggtgaattagcagagagatcaaaattttaagaaagaattaattgcaaatgttagaaatgaataaaactgtaacagagatgaagcatgcctttgatgggctcatcactagatttgatgcaactgaaaaaaaaattagagaacttgaaggtaggtaattagaaattatacaatctgaaatacaacatgcaaacagcaagagtagtggaaaaaataataggtcatccaagagctattcaaaatatcaaactatttaacattcagtacatgtctttggaattccagagaagagacagaataggacaaaagaaatctttgaagagataatggctgaaaattttctaaaattaatgaaagacattaaatcacatatccagaaagcccagagaatatgaaacaggataaacacacacacatacgcgcgcacacacacacacacacacacacacaccactatatatattatatttgaactgctgtagaacaaaggcagaaataaaatctttaaggcagcaaagctaaaaaaaaaagacatattatgtcaataaaaacaaagacttttgtcagaagctatacaagccagaagataatggagtaacatctttaaagtctcgagaggaagaaaaaaaatactgtaaagtaaaaattctatccatggtgaaaagaaaaattttctaatgaaggaatcataaaacatttttagtcaaacaagaactgacagaatttattgccagcatgcctgcagcacaaaggaagttctctgggcagaaggaattaaccagacagaaatttgggtctatgaaaagaaatggaaactcctaaaaatggcatatcaaaaagtacatataaaacctttaaaaattatttttaattattcaaaaaggttattcaaaaatctacagtaaaataatagcaatatgtatattctttgtatagcatgtataaaagtaaaatgactgacagtagcacaaatgttgggaggaagggagcgggagtcactctcgtttaaggtacttaaactacacctgaagtggtatcattttatttctttttctttttatttgaaacagaatctcatctgttgctcactcggagagtgcagtggcatgatcatagctcactgcagccttgaactcctaggctcaagtaatcctcccacctcagcctcccaagtagctgggactggaggcatgtgccaccacacctggctaatttttatttagttagttacttttagagatgagttctcattgtgttgcacaggctggtctgaaattgctggcctcaaaaaatcctcctatttcagcctcccaaagagctgggattatagatgtgagccagccctgttcgtatttgaagatatagatgttgattagccaaagatgcatactataaaccctacggctaccactgaaagcatttttaaaaagagatataagtacataatccaaagtggagataccatgggattcttaatactcaatttgaaagaaagtggaaagtaagaaaaaaataaagatggagcaaatagaaaatagctagcaaaatagcagatattaatcaaagtatatcatataattagagtaaccataatcaaaacacacataggtgtattaaaagatggagattatcagactggataaaaaagcaagatgcaatgttatgttttccatgtcttcagatagaaagacatactaaggtttaaagtagaagcatgagaaaagatataacattcacagactaattttaaaaatttaagtaacaatactgcatcagactaagtaggcttcgaaatagagaacattgccagggataaagaggggaattacataaaggggtttcttccccaagaagacataacaatcctaaatgtttaatcacctaacaatagagctttcaaatatgtgaaataaaaactgatagaactgaaaggagaaatagacaaatctacaactaaagttgaagtcctcaacacttgtctctcagtaattgatagaacaaatattaagaaagtcaataaacatacagaaaagctaaacaacaccatcagcaaagttgacccaatcgacccttacagagcaatccacccagcaacagtagaatacacattcttttcaatgtgcatggcaaatttaccaagacagaccaaattctaggccatcaaaagattttatttgcttttgaaatacgtgcttacaggcagatcaagtttggattataaagcaaagatctatctaatatatagatatatcagaaactaaaataagccatatcactgtgtaattaattccccaccagcagacacattagaggaagctttgatgactacacccagatattataagtaggagagtgacttttctgacttttagtactataaaaccattattcaaattaaaccatatagagaagactaaaatataaaacagatacaaggagaaccactgtaagtgtgagtctaattgatgtaccctcagactctacagtgggcctgagatataccacaagttatctaagactctacttaccatgactttaaactaccagaagagagaatttaggtaggttgtgtctattaatatacctttatctgaaattttcttcagtcatcattctccatacctctagctgactgtgtcctcactctcctaaatcctctatagtctttgttctgtaaaccagcttcactctagataataagataggtccttgaataagtgtgcctgtgttcaattttctctatatagttttcatagttgataatgctaagaaaattccataacttttcagtctttgttacttgacatgaaaagtggggataccaacaacatctatcacaagagattttctttcagtgaagtttttgtaagttttttaattcaaatgaagcattgagttaatgcatatgaaacagttagaatagtgtctgacatatagcaaaagtttaataaatattagtcattatttttatcagtcatcagcagctttttggtgtgcaaatagaaagagctttgaaaatggatagatatgggttcaagttcagcactgccaattaatagctctgtgagcacaggcaatttacctccaaatttttactttaatgtcctcattatttgttccaaacccattgattgagctcctgccatgagcttgctactcttccttgttccttttgtacaaaatttgggtaaagaggattcaaggagctaaaggatgcaagtaaattacttgggagtgaattggagggtgccgaaaaaattagtattgcctaggtcatctctaggtcctaggtctaagatataaaactatccattgagaatgcaatattttatatgttcctctatcccttgagcttataagacaacctgagacataattcgtgtcaataactgcttgctgataaaaatgtaattgccatccaaattgtggtaatagagcatgtgggaatatgatgttctttgtgggacccaatgaactatgggcccatctattcatagtatagtcagaaataggactctaatacatattgcagttcttcacatctcaagacctagcataaaatctgtatttttatatttattaccattcattcatttggatatgtacttgctagaaagaaagttgaagaaggtgcaaaaaaagtatgagggaaaacctccaaattgaaaaaatatattttttaaatttgtttattctctcttctgtaaacttggaacagatcatgatgatgaagtatagccaaagacaaccccaagtaaatttttaaataagctactgtgcagagatgaagtttgagagtcaccattggacctaaattcagcagcttctagcatttgattgacaacaatgaatgtttcccatatgtgatatcacatagttaagcccccacctccccgcaaaagattatgtgtgctgtcgcactcttcttttttaaaaataaatatttcttaccctcgaggcctctccagacttcctattttgggcagtttacaccacttgaccctttctgattattcttgtccctcaacagcagacttaagatacaaacctccctctctcattatactcctcctctttcaatccttatgaatgtgccatttacaatattaccttgagttaggtggatatctctttgcatctcttatcctaactgcattatgtgtgaaacttgttgagactttaagaatgcatttttaataggataatagtctttcctagtcatcctgagtactcagcattccccaaaagtgccatgtgctcactctcatatctgggcagctctgaacatgctcttctttctactcatcattctctattttatctgccctggctagtgaacgcttcacatccctcacaacttggttcaagcatctgttttctgcaacgactttatatcttaatatgtcagtgacagcgctggactgctttgtcaacagtcgctgtggtaggcagaataatgctcctccaaagtcatccaggtccaaattccaagaacctgtgaatgtgtcagcttacatggcaaaacggattttacagatatgattatattagggatcatgaaatagggggatttttctggattattaagatgggccaaatgtaatcagaagggccttataaagcaaagaagtaggcgagagagagtcagaaatgatggaagcagagttagagtaatgtactttgaagatggaggcaggtgccacaccatgagcaggaatgttgcagtctctggaagctgaaaaaggcaaggaaacagattctccctagagcctccaaaaggaaaacaactctgccagcagcctgagtttagcccagcaacatcagtcatctgacctccagaactaagaccataaatatgtcttggcttaaaccaaatttttcataacttgttacagcagcattaaaaaaacccaaaatggccgggcacggtggctcacacctgtaatcccatcacttggggaggctgaggcaggtggaccatgaggtcaggagtttgagaccagcctggccaagatggtgaaaccctgtcttactaaaaaaagaaaaattagccaggcgtggtggtgtgtgcctgtagtcccagctactcgggaggctgaggcagaagaattgcttgaacccgggaggtggaggttgcagtgagccgagattgtgccactgcactccagcctgggcgacagagcgagactccatctcaaaaaacaaacaaacaaaacaaacaaacaaacaaaaaaacccaaaagaaccttaaaaaaaaacccccgattgttttagggaatgaagaccattcttgtgtggtctttttatctagttaaatgcctattttccttaactattagtacagggtaaaataagggcggcttagcaaattaattatgattaacaaataaatacagggataattcactggacaattgttagaagaataattagaagttggatggaacagtggacggtgctacagactcagggtcagaaacatgaattacaattttagctctgccacctgcatggagatgaatcatttcacctttgaatctaagcttctttacctacaaaaagaaatcaagatattctttggtctctgaggtaccttccagccacaagactatgtgaccatatgccagggaatttttggaagacatgcctgaaccgggtcaggggttggactgatgacctcagaggtctcttccaactcaaagattcaatgacacagacacagcaggatgcatcttgtgtagaaagtatttctaagacaactgatttttctgagtctcctgggaggaggggaagtcctctgggagcaaacaaaggcaccagtagctttgggtcaagccctgcttcagattcgggccaaagacaacaagaatgccacaaagaacatcaaagggcagaatctggccctgaaacaagaagagggatggaggggaagtcatgatctgcagtaaaacaaataaataacctgtaaaatcacatctgcagacgctctaacgttcttaaatgctttccaataagctttgctggtagcatgccacaaagcctgtccaagaggatttacaacagatggaggcagggaatactgacctaggcctgattctgctactaaccaattgggtgaccttgggatcatcatttcacttcactgggctgtaagtttcttatttcaaagtaagaggactaaattagatgacttctgacctcccctctagcctcaaaatcttactaccttccagcccaagcagtaatcatggattctcaaaagcacaatggttagtttggtattaaacaagcagtcatttgcaggaaaggaaggaagggagggagaaatggaggggagggctataggattttttttttccttcttaaacaatttccttattgtttcctcctgtttatgcaaatgctcaaaattagcaatgaccactatcctttcaaatgaccctgctctagataaagttgtatagatcaggctttgagctgctgctgtctgtctgttcttaggcaaacttcaggcgccggcctcccaagcatgaaaccccaatcccaagataatgcgtggaatacttaatcctcctttgtccttggctttccagtgtgggaatccagcaagatggagcaccgagccatctcctagatttcccattttaggacaggtcttggaatagtttatgatgtaactgtttctaccgcatttacttcagaccgtctcctatctaagccaagattgttagagcaagaacttttagttttttgagaaaggcccaaaaacaaaaattaaaataggagatggtttatatttgccagatgttaaaaggtgttctaagtttgaacttcaataagtttataattttaccacgcccaatcctccagcggctccccagataccatataaacacaaagccaactgtgcccatgggatcatttttagttcctagacaccaggatatagttaccagggaagaatggaggagaattgtaaggataataaagtttgttccaagagctaattgtaagtaattccatgtatttgtagaatgctttaaagcagagtttccccaaatatggtatatatacatgtactattatacaatatgcaaaataattttaggtgggatatattgactatttcacccaagacttatatcttgacttttcttatcccttgctgatgggcattcctgctctcagagtgtaatcccaggaagaaatgctataaaacttaaaatgaggaagacacatattccattaccatgtttcctgaaagatctgtcacttccaaattgctggcttactccgctgcagtaacaccatgactccatctacatggcagtttccatttcctaaatcctattaatcatccctaactttccaagcatcccctcatccccaaagcagctttatatctcttcaagctctcccaatttttcagctttgacccttatgtgatgtccttaaactaaatgtttctcgaaacccctggctctagtttttcagtcacggcctctttctagcttcagtgccccaccctaccattcaatcaaaagccgccatcccgttctactccaaccttccttctcagattgcagttcacttctttcagtgagtcaacctgctgccttggatcttcctctcccttactcattccactcatttcatgccaatgtcttgagccaacacaatgaaaaactggtccccaagcccaagatccattcctgtctgctcttcctgaacacattcatgagcaatgctttctctcttaggccatgatcgtttctatagtttgctcctgtgttttttttttctttccattaatttccctttataaataaatgtatttaagcaaaaaagaagtaaaatgacttaataaaagtatatttactaaatactaaataacagtgaaagtgatacgtggatgtggtcaaaatttggatgactaaatgaatgacagcttaatgaagactgtcgtagaattacagaatattctctttgtttttaaaatctgtttttggctatcctgtaacggcaagaaggatgggaataattaatccactgttcagacaagaaagctaaaactcagagtttgtatgaatttctaataccatgcagcaagcagctggtagatgcaggactaaaatgagagcctgctgactccaaatccagtgacactctccacgcacatgtccttaaatacaatttcttcttagttgaagatatagatgccaggcatagactccaggaaagggtacctcccgggagtaaatatgcataaaatatatataaatattcatctcagatagtttgaacatgtgtcaaattaataagcagtatgatctatagccaaggaaaagatagcaaatcactgaaatgtaaataaggttccattaaagaatgtggcagaaatatggaacacaaacgtaactccaggaaaataagactcctacaaattcaaatagtagatgtttaaaaggatatgttgccaaaagataaaaaatgcagttcctgaataaagtcaaaagaacccaggttaaatcccagccccttcgcctacctgctgagtgatgctggcaataggcctaatatctgtgtttctttacctttaagaaagtgacaataacagtatctagctcctagagctgcagtgaggattgagtgagataattctcttaagaatagtagcacagaaaatgcccagttagacatggcggcttgaatctatgcttttactccgttcttttatgcaaaccaataaaatgattgtaaaggaatgaagaaatgatataaacttacaagaacaaagaggattggaaaggtaatgacatcagttgtgagatgtcaactaaattgttaactatgggaaacaaaaggatagaggtagccaactgatgagagcagagcaagctgaaaactaagtccatattagggatgtcaaaatctagttaacatcagaagacccagaaaagataatggctcattggcatccagtgtatttgaaaggggagaaaaatgagagggttgattgacaatatgtgtaaggaagagttagaaccacagattcactgtctagtcctaatagccaaataactccttccccaacacttactatctacagaggctctattacagaagaccagagaacatggagacactaggactatctgagggtggatacaagaagatatatcaaaaatgtaattttaattacatttttgtaatgtaaaattaagtcaaaatatacattttgaaaagttctatttatgatttttccctgacactgtcattcaggtctctattctccaactgtgacactggagaattcttctccatggagactatccgtctcaggaggaaaacaaacatgcagatactatcacaataaaatggcagatcctcttctcatcactctatggtgaggtcaaccagttgacagcctcagtcacatacacagcacctctaattaactttccagtgctccattctagttattagtggagtgccaaaaatcgtaaaataattgaggaaaatcttgaatatataaaacagagaacaaggtaagcatttacaaaataaaaatatccttggaattgttgtgaaagcaaatattaaagtgtcaagaaaaagggaggataattggaatactgcgttgaagaactcttcagaaatttgaaaaaataaaagttgatgagatagacaatactggagaaaggtaagaaaattagacaatcctctgggggtctaatatctaacaaatattagttccaggaaaaaaaaatgacagattagatgggaggaaattatctaggaatttttaaaaaatatgcacagaaccaacatatatgggtttctagactaaagggatttaacaagtttcctacgtcatgaaagaagaaagatccacatcatggggcatcatgacaaaatttaaaactccaagaataaaaagatactaagcgatgcaatagaataaaaaattgcctttaaagcatgaaaggttacaatgacattgggcttaatagcaacatcaaaaactagaagacaatggaataatattttcaaacacctgagcaaaaatggtttccaacctagaatcctatacccttagtccaatgtgtgaggagataacaaagacatttttagacactcaagtttcccaaaactgttgtctatcagacagccttactcagaaagctgttgggaatcatataccatcaaagtaagtcagctgggaaagagatctagaaaacaggagatttttccctaggggtactgacagttcactgctattgctaacctttggggtactgaacactcccatgtgtatgtctccaaacctttgcatagagtccatttataaaactctcctctgttacccagtgtaagttttgtatctgtctgctgcatgactgatatatacttgatatgcataataaatgcatatttaacaaagtctaacacaactaagcagattgggggattgtcaatgagttcagtttttcatgatccccattgctttggagagacttgctcgaacaggaagtattctgccagtccatagggaaggccttccaggtgccagaaagccccagagagattctctcatgctcctaactacccagaaactccatgtaggcaattattctgtacttgtgttttattgctctaagacagactcacacaaagttagcagtttaaaattacacctatttgttagtttacagtttacatgagtcagcagtctgagcatggcctagctaggctctgtgtttagggactcacaagctcgaaatcataatgtttaccaaactcaagctcatctcatctggaacgagggatcctctccccagctcatttagtttgttggcagaactcagttccttgttgctgtaggacagaggctcccatttccttgctggctgccatctgaagctgccattcttggccactaaaatacactctatttgttgccacatggctccctctgtcttagccagcagtggagagtctctatcatgttgaatatctcttatgctttgagtctctgacttcatttgtctctaatctgtagatccagatttaaagagctcatgtaattgggtcaggcccacctgcataatctccctttcagtgcactcaactgattagggcccccaattacctctataaaatcccttttgccacatatcatcatattaacaggtcatttcacacttaacaggaggggataataaaagggtataggttattagcagttgtcttcaaatcctgcctactgtacattgcctttagcaagccatgttgcctggctccaacacccaggatctaggtgccatactgccagtgccatcttgctgcattgtgtagaggttactgaattggccaggacatgcgtggagtcacattgcaactaagtggatgatgatgactgggctgtgggcatgggcaatggttgaaggcctgagaaggcctagacagagtaggacagaacatagccacttttttctttatggagaacttagagcaatagttttcatgcatagcccccctccctaagacaaacttacatagtacccatgatgattcccacctcacaaatgagaaaactgaggctctacaggattgggccaatgtccaaagttacccagaaagaattggtaagctaggattcaagtgaagatatgtaacattccaaagccctggctctcagtgactaaggtctaagaccacccagatagttttgtgttataaatcctaccttcccttcaacagtccttcattgccatttgcctgaacttgagctacttgactgaacttttccttaggatgagttctttcccagaaatgtctaatgaatactatttcatgcaaattgatctcaggtcctccaaagatgattggagagttgtggatctttacacagggacactgctcagcaaagaggctatcatcacttaagactgtcattcatgctcatcagcgtgaccacacattgaaattagtgtaattttagctaatactaaagaaccttgaaatttaattagtatgtgcaacctaatcattgataaatgtgttggacttttgaaatatttaaaatagctcaaatctcctattattactttgacagacatttaagaaccaaaataatccatgataaggaacaatgctctatttaaagctaatcgttttaaatttgcaattgtcccaatagaaaactttgcttagaattgaactccacatcccaatcctagaataaagaacctaatgtattctgtaaaattaccacaaggctcaagattcacaataaaattatattgagcaaattgtgagtgtgtgcagcattgaatcaagtagatgaatgataaacttcttactaaattaatcaataagtgggcccctctttaaaactctgagaaaatacgagattgactgggttttccatctcatcatgtcagttctatcataagactttttattatgttttatttttactgaataaaatttcatacccttagtaaggacagaaggatgcttgtggcttggtttctacctagttctccagttttgtctcctgtatttccttttttccttattcaatgaaccaatattgattaactgcctagtgggctagagatataaagacaagcaagacagtcacctgagtgttcctcttagctgtgcctttcttgatacaccatacctgtggttcccagaatatgcagcttgttgtagacttgtctgcccttgcgtgtgcctccctgctgtactcctctcacttctccattcccatcgttctggtgacttctcagcctcaatattgctgcttctgtaaagactttcttgaattccattcctccagctccagcagcttaccttccccaggcattgcctcctttgtgcatgactgtacatcagcatttaccacatttctataagtgacttctactggccttcaaactcatctcatgccatgctctccactcaatccataccggcctccttcatttctctaatgcgccaagttcttcatggcctcagatcgcctacacatgctgcttccctggactggacagttcttcccccgcattgcacttactctaactcacctttcaggtctcagcttgaatgtcacttcttcagaaagtccttcagtgactacctagtcttatgcaagtccccactgttatagcttccatgacaccttttgcttaattcacagtacttaccacgattttaattcatttttgtgtttttcattcgtctatttattccacgaatatttattaagcacatatcatgtgccatgcacaactctaaaggtgggatattgtggagcaactatcttctcagctatgaggagagatagataatgaacatatacagagataaataaattaaataattttaagcaatgataaatgtaattgagaggataatatagggtgatatttctgagagtaaccaggaagaggatactattttagttcagagaagaagtgagccaggcagaaatgaggggagctattccaagtagacaatatcatgagcaaagcccagggataggaatgagtttgaaatgttcaagggacaaaagaaagttcagtgtttatggacaatggtgaatgagcagggacagaagggagagtgaggacatcgaagtcagcagtcgagatcaagtcatgtcaggtcatacagatcatgatcataagtctggattttattctgggaacagtgagagctctggcagatttaaaggagggggatagcttacactttagaaaaattactctgactgcaagtaaagactggactattaaaagtgagttcaggcaatccagatatgaagctatttcaggagctcaggcaaggagagacagtgtcttggactgtcacagcagtgagatggtgaaaagtggttggatttgggatctattggagacataattgataagatttattgatggattgaatgggggttataagaaatgagacaaatcaaggtttttaggttttttgcctgggaagcagggtgtattgtggtactcaaattaggcagagaagtctgtggagagggagattcctttggaagacttcaggggttgggatcattgtcattattgtggccatgtgaaatgtgctatgccctttagattccaagtgaagatatctactgggtagttacatgaatgtatttaacttagaatatgagtttttgctggagatgtaaatctgaaagtcaccagtacatatagaaggtatctcaagctgtgaactacatgagatcataaggtaaaaggggacagagaaaagaaagggattaggacaaagccttgggatactttgacatatagacatctattcaatttgggaagagccagtatgggcattgagaaggagcagccagaaaaatatgagaaaaaccaagagattgttatagcagagaaattgagctatagctagaagatgaccttaccaggcaggattctagtaaaagttagaaggcacagtcaaattaagataattctgggaaggtttattcattaaagtactgtgtatgaagatatgtgcagggcacgggcaaccttaagagatggcattgtaactctgtgctttgagtgcagtttctaggggagtaaatactctgatgctattctcctctcttcctccaatctcctgcagaggtgcttatttagcaaattcaaccttaaacctgagtgcatggaaactattgatgcagtgtccaaggtggagaaaggtcagagtggatccagaggagccaagagaagacgtccagcatggtgacctgggctcaagtcaaggtccttatttctctggtaagagcaaggatactaaaacatgtttgagtgctgatgaaattgatcccatagagagaaaaatgttgagagtactggggaaaagggggatagttgtaagaatgaggtattttaaagtgttagaagaatgagatccaaagagcaagaactggcttgtcttagagaggagtagagacagatcttcaattatcatgggaaggaatgtacagatggagctaggggcatagaatcagtggagggaattgaagataatgtctatttcatctaatttttcagtaaagtatgaaaataaaacatcagctcacggggagaggtcctggagacttaaggagagagaagatatgcaatgattatctcagaaaatggaaaagtaaatctgctatagaaatgttagattaactgatatctgagttagattatctggtaaccaagtgcacgtgcaaagtgagtcctgcgagtaatattgtgatatttcaacttctcaggagcaagctcagactaagtgattgtttggatttatccagtatttatctagtcaagaatggcaaaaggagagaaaggaaagaaagataagtggtttttcaaggcactgatcttaatgatgggtcataaattataagctggaaggtgagagaagtgaagatgagaagggaaacatacatacagacaaagctgtagaagggtgagtggatttgagataatgatgtcagtctccagagggaagatgccagaatgaataagctactaggacagaagagtactgtatgcaagtggaatgtactgaaatcaagattttgaagatgatgcaattgctggagatgacaaatcctagggcatgactatgtgagtaggtggcagaggtgggtggaggaagaaatggtcagagctactaggccaaagagctaaagggccagagtcatagagattccaccttcatgaatgctgaatttgccaagaatgatatcggacagagaggagaagaggaagaagtaagccagacattcaagttatcagtcagttaataacaacaaaataattacagacacttacatggcacttaaaatataccaaacaccattcagtgtacttcacgtgtattacctcatttaatcttcacctctaccctatcctcattctaaagatgaataacctgggtcccaaagtattaattaatcttttttactgtcataactagtaaatggcagagactgaatccaacctaggcaatctgattccagggtctatgaccttgaccatgagtttcctctactgctctaaaaaacaaacaaaaaaaataataaaatatgtaagtaaagtcaacactttcctctatgccaagttcttctgggtaatgaagtctaatgatgggcttcaaaaatgctaggatttttggagtagggaaagacaacagagagaaaggagttagcttcctcacccccaggcctcaagttatctgaggtgtgagagatgaaacaaacagtcaccaatcacaggggaagctgctttatcagggaacagaaagtcttcatttacatcaaggaggtgataggaccaagaaactgtggaacatatgggggtttattcatgtcttattgtgaattccagtgtgcagagaaagatggggatagattcagatttgattcactgtcaattccaggggtggggaacaggagtttagaagggcagaaagagatggggatagagtcatatttgggaagcctagaggcatgtccattgataagagattagatgggagccttgacctctgatggtgactaaggagggagggatgagaggtgtaatggttatgtgataagtcccagcagtccaggagcatcagtgatagaagtcctgggttggggagggagctttacctgaatacactgagacctgaggggcttgccattgctgagatacactgacaactggcaatatgcaataaggtaagaccctcagggcaatttatctggtccataaacatattttattggtctttacacccccggaacccagcaaggttcccagcacacagttggtgcctgtactctttacacaggtagcaatgtcaacctctctcatttcaacttgaattaatatcctccatgctcacccaacttgccacactgggcttggttgtgttcccaaacctaccaagctccttctcatctgagagtttatgtagttattaacccatctacctggacaccaccactcctactcagccagttccttatatgcttggctctttcttaatcactcaaacctctgctcaaatgtttccttttcagagatgacttgcttggcttcttatcttcagcatcacaccgctgtgtacctcatcatcatattttatttcttttagagcacttatcaacaatcacttgtgtatttgtttgtgcgtgtgtacactactggtttcttgtacattttctgtctgtctgcactagaatgcctgtgaaggcagaagcataatctgtctgccttatcttcatgtcctgacacttaaaatggtaaatgcagtaaacattcattgaaaaactgttgaaaaaatattttgtttaaatatcttccaggttttcaagcacaacaaccattgtatatttaaaaagcccccatagttcatgaataaccagccctctgtagcctggcaagatcaggatctggctcaatattcccgagacagctcatcacactacatctgcaactaaccgtgtggtttcagtggccaaagctgaatagctcacaaaggggagtaagcaagtatttggcagggtcatttgccaaagagtcattgcccctaatttaaaagcaattaattatgggaattaaggaaaagaaatggtgttcatgtccctgggccaccttttctgaatgactcaggcggcccagggcaagtcaggacataaaagtaaaaataagccctgtgctctgaagccactgaggctttgacaacaaagctgatgagatggcaggtcacaggtaaggagacctgagtgtagaagattttaaagagcatgcctttcaaagtaaagggaacagaggaagaaaatgatttttgtaattacaatttaaaaatactgattaaaaaaaacaaaataacttagcatgggttaaagagagacaagatttacagcactgggaaaaccaaggagaacccgtgcaaagtgttgtcatgggattaagctattgagataagccctttccagctcgaatagaatgtattagtttgaaagcaaagtgggctttgtctctgccacttggtccatttgatttttattttctggtcaacttgacctttgagtcttactcaagtgatttttgacctagttgtggcatagggcctgaagctatataaaacagtaacttatttgattacattgctcagccactataagattccttcatgtttttccctatttttgaaaacgttttctcacctcagctaaacaaaaccggtcttttcagtttatggctacaaacaacagctcgtattgttttagtaccttccacagttaagaaatgaatttagcaatcatccagttaattcccaactctctgcccattttatggatgagcaaagtaagccctagagtgctgaaggacctggctcaagagcacagctaccaggtggcaggttgcaggacagaaaacccagctgttgagccaagtagacccacatttgaatctatctccactattcattacctgtatgaagggaccgtagcttctgtatctgcaacaaacaagactatttcctttgactgaacctcagtttcctcatctataatatggggaaaagttcatgaattccgtaaacatttataatggagaagcactatcctggaatctagggatgtagatacaataaaataaaaaaaaaagacacgtggaatttactcttttgataaattggtaactatgaatctcatcaaaagaaagcagaacgcagatattctgagtagggggtttgggggagaaataagagtgattcctcctatctgctgctagggccataaagacactacaccaagaggaagtgtaggcttggccaggtccctgttccaggccctgttgaaaaggctgttagctctctctccttcacaccttcagactctatacacagacaatattctctgtgccttggtgtgtagtattctagaataatggcttctattcagtaggggtttgacacagacatttttcatgttatagctcatacagaaaatttagttttcatagaaatctatagcccaacacacggataggtaaatgtttctgtaaaggccagatggtaaatatttttggctgtgtgaattacatagtttctgtcacagctgctcaactctgccattatagctaaacagaagccatagacaatgtggccaaggacaaggatggtgaagtttccataaaatttgatttacaaaaataggctatgggatggatttggcccactaactgtttgccaacccctggcctagcacaaagttaaaactcaataaatattaacagtaattgattaaatcaaaaacacatttactgagcgccttctatgtgccaggtactatccttggatagaggataaagtattcagtgacaggacacagttcttaccctcattgagcttacagtctaattcctaaataagttgttatgaaatacaaagcaatatgaatgaaacaactgtggttttgagataaataataatcagaaacccagatcatctgacatcaaagcgtacattcttatattgcttataagctatttggggatgagaaataaatctattcctatcatatcatactgattatgttatactgactagcacagttctgggcacacattaatcacttcacagaaaacgtgctgactttaatatcatagtaggggatttgggttgtaacggagatggagaactttgtatatatgacttttccatctttacaatcttctttcactttgtagatgcattaaaaattgcctggctaactgatgtgagtaatatgtcattgagcccaaggccatggggaatactaaagcaacctgtttaaatcccaaatctcaaatgactttgaaaaaaattgtggactaaaagcaggaaatcatcccaagaccttgtcttaacctaaattccccctaaaaagtaagacctgggatagagactttcagagagtttattttggagaagtaacttcaagaaatggggggtgggagttgtggagaatgaaacagggaatggacaggtgcactatggagctaacaccactgtgagcatctggggctcagtcccacttacagaccctctgagaagccttgtagaatgctctgtagaattgctacctaggggatagaagaggggattacttatccaccacttcaccttcactggtcaagggttatcccagaaggtgctacctcttctgtactctgagttgcatatgcatcagaatgactgagcaggttcctttaagtactgcatattagccatgtcataaaaggcccagggcagaaagcaagacttcaagggtgcggccaaggctagatgctgttggtttgacctgcgtggtaactggttattttagcaatggctggagtagaacatgtagaccaagaaggtgtaagatggaacgcaagagcataacagtattcaggatacagcaatattcagggacatagaagtattcagggatgcatcacagaaagttctatgctttgtttggagtgaacacccaaccatgtgtctaccaccagttctcacttccaaacttccttcctcaattgagataatgataataatccaccttcatgtaccacgtgcatagtacttttatgaacatttgactctcacagaaatcttgtgatgtaactaaggtctgactattattcttccttttttctacataaggagaccaagctcagacaagttaagagaattaattgcctaaagcatcattttccaatggaattgtctgtgatgatgaaaatgttctacacattgtccaacacagtagccattagccacatgcagccactgagcccttgaaatgtagttcacatgactaaagaactgaatttttaatttcattcaatgttaattaattctgatttaaattttaatggccacatgtagtgagtagacaaagcagtggcagacactttaacatgtctttttcatattgtattcaaaatacttttcactgttgaagtgcaatgaaagaaatgtgttgactttcttcatattgcgttcttatttacatagtcaattataaattaaacgatttccttgttttcttgctatcacctggttgctttccagcattaactgtaatgttaaaaggagggacttacccagaaataacactgaatgcaacctaaagcagcaagaatcttcatgggaacagaataaacacaaaggatgtctacccttcctccctccacccacttggattcttgtttctagtttgcacctggacataaggccattttgtacttccacacatagagcaaaactgttctacacacctaaaattatagtgtgtaccttgtgcaacaatgcatctaaaacacaatttgcataaggtgagacttgcataacttggggttgagatttaagactctatttcaaatcttctgagttttaagtttaggactcttaagcctaggactttttatttcatattttaccatttcttaattcaagtatgataagcatgtcaaattcatgttcattcaataaatgattcacgagctactaacttacactacaattgttttttaaatatttatgtgttgtttggagagaaagaggcattttaaatctaaagacagtagtagatcatccatcctgaattgttagagaatgagacacctcatattcgtgtatttttcagaagaccgaagcttactttaacccttaaagaatgagctttaaaatcctatccatttttggggggaaatatttctgcaagaagtctcttactttcttaagcagagtatttcaaactgttttatcatgaattgacaatctataattgtataaatttatggggtacaacatgatgttataatttatgagtgtgatgtggaataactatatcaagctaattaatattttcattacctcaaatacttaacattttttgtagtgagaacatttgaaatgcactcttagcaaatttgaaatgtacaattctctattattaactatgttcaacacacggtccaatagaactcaaaaaagaataaatcacatcattcatgtctcacagattttataccctttaatcattaattctccattcccccagcctctgtaaccagcattctactctgtttctatgagtttgttttagattctacatttaggtgagaagatgtggtatttgtctttctgtgcctgacttattctacctaacatcaagttcttcagtaccattcgtgttgtccagatgacagaattttcttttttaaggctgaatagtattccactgtgtatatataccacattttctgtatccattcatccattgatgaacacttagcttgattccataacttgactcttgtgaatagtgttaaatgaatatagaggtgcagacatctatttgacaaactgatttcaaatgttatgggttaattcccagaagtaggattgctggatcacatggtaattctatttttcattttttgaggaagctccatactggattttatgatggctgtactaatttacatgtcaccaaaagtgtacaaagtttcccttttctccccatccttaccaacacttgttatctttgtttttttgatatgccactctgacaagtgttgagtgatatcttcttatggttttaatttgtctttcctatatcattaacaatgttgagcatttttttgaaaacatatttgtggccattcgtcttcttttaagaaatgtctattcagattccattttttaattgggttttttgttaagtgagctccttccatattttggatgttagcccctttttggatatatggtttacaaatattttctcccattctgtgggttgtctatgcatgccagtaattgtttcctttaagatgcagaagtcctttaatttgacgtaatattttgtctatttttgctagactaatgtcttgtagttttttcctatgttttcttatagtagttttagagtttctggtcttaaatttaagtatttaatctaattcaagttagtttttatacatggtatgaaaaaagcatcaattttcatttttctgcatgtagaaatttgttttttctagcatcatttattgaacaaactatcattttctcattgtgcactcttggaacctttgtcaaaaatcaattgaccatgtatgtgtgggttcatttctgaatattctattctatttcattggtccatgtttctactcttttgccaataccatgctgtcttaattactacagctttgtagtatagtttgaaatcagatggtgtgatacctccacaaacatttttctttaatccattcacttatacattcatttattctttcagcacatataaaacaaatactacccatagaccatgcactgcaaaagggtctggggcagtccaaggaaataaatccattctgctctcaagaaactcaaaagtcttgaacaaaataccagtgtcccattcagtcattgttattcagaatccaaatcttctggaagccatgtctttaaaagagtaaaagaaacaagtgtaatcaagtttaatactatattttaactcaatatatcctaaattttatcctttcaacatgtattcaatatttaaaaattgttaaggtattttacattttttttatatttagtcttcaaagttccaagtgcattttatatgtacagaacatctcaattcatatcagtcatgttttgagtgcttaatagccacatgtgactagtggcttttctattggacattgcaatttcagagcaaaacaagtattggtgattaatcaccaattcactacaaggaagcagatacttaaatatttcaactttgtatgtctgttaacttcatatattcatatgccatatgaatattttaagttcatatggtttctcattcttccgcctcactctcaggcagcctgatttccttcattattgttgcaaatttgcttatgtctagcaaatgccagtgcctcctgtttgtcattattatagtctgatataagctagaaaaaattggtagtaaaatcgtgttgtattattcaaaacagagtaaatgggctctaagtaggggctaaagaggcatttctgtgaataaaacatacacatattaacgtataaaatttctaacacaggtttgacttctcagaagcctcctctctctttcagtcttcttggtcagtggtcttccaagtgttgtcctcaggcccacagcagcagcagcacccagggagttgttagaaaggcaaagtcctggtccccaccccagacccagtgaatcagaaactctgtgggtgaagtatatagcaatctgtgtttataagccctctgggtgattctggtgcccactaaagtttgagaaccattattctaaaatgttcagactgctatatacatggacttgagatgaataagtgttcctttactacttttaaagtcagtattttgattacttgaaaaggtaacaaagaggtctgttttttctctttgaaacatggtagtaaagttatgtcagttaatatatgtacatattactttcttattgctgctgtagtgaattattaaaaattttactgacctaaaacaggaaaaaaataattttcttttagttctggcaattagaagccccaaaggggtctcactgggctaaaatcaaggagtcagcagaactgctttcgttcttggaggctttaagggagaatttatttccttgtcttggcaacttctagaggacacccacattcctaggctcatggtctctctagcttcaaagccaaaaacatccgatgaagtcattgtcaggtcgcagctctctggttctccctattctgcttccctcttctacttttaagaggttttgtgattacatcggacccacctggctaatccaagaacaccacctcatctcgtgttcaactgattagcaacattaattccatctgcaactttaatgcctctctggcatggaccctaacatatttacaggttccaggaattaggacatgggtatctttgtggatcattattaattagacagtgatatatcctaatgcaaaaattttaaaaattatttacccttgcacattttcaggttgacatctagcatttttcactacagttgcaaaggatgtcatttcttgcattttgcaaatctcaatatttacatcactcttaaaaatatctaaatgaatttaaatgtgatggcaatttgatatagttattatccatttaatttgtttttctatacaggtatgaactcttttccaacagttgaaattgtatagccttccttttttttcctagcaaacatgttcccactttctttctccagagaatattatattcacatattttccacactttagggtttttctttgattactccaacacacatctctacaacaaaattatacacatactgtacatataattatgcacatagatatgtgtgtacattcaattttctgtgatcataaagtttaatgagtttaaattttttcttcatacatatataaatgttaatgcaattaatgtgaacagacaattgagctaaagagattatccattttctaaatattttaacttaaaaaataaatttcattagaaagacacctctttgtcatatatgggggtggagagagaggacattatggcatcttgattagatgaagcttttttaaacaatatttcaaatagtccctctgaagttttcacatctcagcacaaccctttgtagtatgagtctgtgtgtaagagacaaggcttgatttggtaaagtgggacaggatcaacagtgaaagcaataagaaagtcaggatgcccagtcgacgcggagcgacttttctcacaggatgtgcagactgtgcagcagatacaattataaatgcatcatgcattattttcttcgagtgcaatcacaaaatagaacgtatcagcagtccaatatttatagggcacacatctctagcagtactacaaatagcatgactgcctgtgggtgaggtaatatgctttatgcatcccaactatcaataataaacacaaattccagtcaaccatgctagaggaaagactgagttaacttctgattccctgtaaagaaaatgatattgagacaccactgtcatctggcagggagatctttgaaaagacaggcagcccaaaaaagtagcaaagaagttttattcaattgtgtttaaaagaaattaattaaaatattactatgtagatttttctgacattaattatatttgttaattttagttcattgtgcaacttgtgatatcttattctgagtaaatattcattttcacaactaattctgtatttataattggtatgccttttaaaagggaaactctattaagaagtttaaaatataactcaataaatcattgtcaagccaaattgaatggaattcacattcacttctttttcttttctttctttctttttttttttttttttttttgagacagagtcttacactgttgcctggcctggagtgcaatggcacaatctcagctgggctcactaaaacccccgcctcctggttcatgcgattctcctgcctcagcctgctgagtagctgggattacaggcacacactgccatgcccggctaatgtttttttttttttgcatttttagtagagacaggggtttcactatgttggccaggctggtctccaactcttgaccttgtgatctgcctccctcagcctcccaaagtgctaggattacaggtgtgagctaccgtgcctggccatggaattcatttaatcaaatgaaaaacaattactattaactgactcctggtgtatgtcagccactctgtttagactgtttggaaatggtgttttatttacttctcaaaaaacaagtgaccaagtacaagcatgcagaaccttatatgtatcattgttcatatttcactgccaaggaaaaattaagtagaatattcagtctcacagccaaacaactcagaattagatactagaatattttgacaataagtagtagaaaccatcaaatcattattcatacactcaaggggtagctcacggtaggcgcaacatagagcaaagaaagtgggaaagagagctcagcatggttgcggtggcgatggcgatggaaaccaggtataactttaaatagggagttcaggaaaggcatcatcaatagggcaacgcttgagaaaaattcaagagacaagaggaatcagtcatgtcaatatctgaggcgtgagcattgcaacagcaaatgcaaatgtttaaggtattctggtgtttgatgaacaaaacaaaagccaataaataaaagtggcaaacagtgacagctgaagctggggttgggtgtggtttgcagctcacagaggatttgtaagcctttattgggttttcagcttctactctgagcaaattgcaaagctgctgtgggaggatgcagagttactgatctaactcacattctccaacctgactgtagctgctaagtggaaactaggctgaaagttggggatggtggagcaaggggaatcaggtagaaggccattgtagtaatccaaacaaggtagtgacagcagcagaggcggtgagaaatgatccaatcatagacttattttgaaggcagagccagaggatctgctgatggtatcagggaggtatgagagagaaaggtcaaaaatgactccaatttttctttttcttttttcttttttttttttttttaaccctgagccaactgcaagaatggagtttccatttattccagggcagtcattgtgctaggttttttattcaaattatctataattctcatgccaacccaacattgcaggcaagatggcagaagcaagggtagaaacaaaactctgcctgtctcaaagtcctctgcatcacacttagcagctccatgatctggggcaattatcacttttaagaaggatttggcatgtgctaggcacagtgctaaaccttcttacattaatttttcgatttaatcctcaaaacaacttgatctggaaagcgttgtttatctacattttcagacaaggaaagtgaggcacagaaaggatgagttgcgtacagttgcacggtgaggaggtagcagagctcagatggggaagtactaatgtgtctttatgactccagagcccaaacgcctcgcccttacattagaaccctcaaacttattcagctggaattgcctcatctatacactgggaattatatttgccttttaacttaattatacataaattagctggcatactgtagacacccaatatcagtgtctctttatcaatgtaacgtatgcatgatgtcatggaattagcacataatgctgatccgctactcctagtgacaaatccaaatgtctgaatatgtctctgtaatcaaggttttattttgcttcatttttaagccacaattttgagtaaaattcttctacctcttgataaacaagcagtgagtggtggcatgtgcagagagatggaaggagttaccagtggacgtgttgcctctccaagacaaggccaagcagccagttcaggaaataagataaatggaagtggtggcagggcctaaccctatccacacaagtaaaagtcataaggggtctcagtggtatcatttttaagaagacaatcaaggacttagaatcccaatctgcccatcttctctaacctcatctgtcaaatattagttttaagtgacaggatttcttaatcctttccagttttatatatctatgagtggggagggagagaagatagagtaaaagaagaaggacaaggaaaggaagacgcaggaaggagcttcctttgatgcctttcagagattctatttgccctgagaatggctaattgcattttcagccttctatgactgattgagaagacccagaatttctcctggtccacagtttctccaccttgaagaaaatgactgtgagacctcaaagagccattctgggtgtaatgataacaaacagagggggaatgccatgaggatttgagatgaaagatgcgatagatgtataagtactacataggtatgcaaaaaatgaacgaggcatgatgtctgcctgagaggccacacaagcagcagttagatatccagtgaaagatctccatgggcaggaaggcagatgacacctcaggtccaggagctgaagtgagcatcactcagttgacagaaagcatctagaatgtgtcagcgaaaggcactggaattatcattccttcttgagaaggaaagaagaagaaagaagaaggaggaggaggagcaggaggaagaggagcaggaggagcaggacaaggaggaggaagtcttcttcccttgaggaattcttagtctcctgggaaagatagctctttatactgataatatgccacattttcttatgggtcttgatggacatgcacaaagtttaaaaatatcacaaaaaggagagatgattgagagtagctgatagagggtgaaagcagactttacagggtactggatgccgtaatagagctgtgagcactaaactggaatgtgccaaacacaagagagaatcgtggtgcccttcctggtagaggaaaaaaaaaaaaaaaacacgtgcaagggcagaggaaggaaaccatctggcataggatgccacttcttatcttaaatgagaaatccatgacctccagccatcaaagcttcattcattcacaagtcctctctggatccatccactgcgaaaaggagcccaaagataatgaatttgtaaaattttcattttcaacccttaattacatggaatatattgagcttctagcatatagcttggcatatagtaggtgctcaataaataatattaaatttatattaatataaagggaaaatagggaactacaaaaacgtttttgtcagtagcaattttcttgaggtattctttcttaatcagtcatactctcttgatatgaaatttaattccattcaacaagcatttgccgagtgtcagctgtgtttcaggcactcaggaagacaggcagagctgcctctcagctggtgcgcaccagaatgttctaggaggcttccatcttggttggctggagagcatgattgccagttgtgaatgatgaatatctccctgagtccagagatgaatcagatcctgtccttgctctcaatgatttacaatcagctgggtcagttgtggatctttcttgcagcaggaagtttggagaccagccctgccactgaattactgcgtaactaggaacagccactgagccacttacaaatgagtttctccacatgtagtcagtaataatctcaccttcccacctcacagggattacaccagttactaagctattgtttctcatctccaaacccaccctcctataccctgcttggactttgaaaactgccctagtcctgagctgcttggccccctgttctgttctgccaaactggaaggcaagagtccagaatgaaaaaataacttgtttttggctgggcactgtggctcatacctgcaatcccagcatggggtgggtggataacctgaggtcagaagttcaataccagcctggccaacatggcaaaaccccatctctactaaaaatacaaaattagccgggcatggtgacagatgcctgtaatcccagctattctggaggctaaagcaggagaatcgcttgaacccgggaggcagagcttgcagtgagctgatgtcatgcgactgcactccagcttgggtgacagagtgagaccccatctcaattaaaaaaaaaaaaaaggaagaacttgtttttgctgcactgtttgctattcctataagtgtcatcctggaacagtcttcatctagtggcaacagatgattctagttttctgcttttttccactctcagaccagcctcatcatgcccctggagaggtaccagtgccaactggcagggcagcaccttctcttcaccagtagggatcccatcttcataggttctcttttccaaatgtcttgaatctgataaccccaatctcttatatttgtaaggttaataactgcttcctgcagtaacttcactttttttttttttaccttttcattcctcttgtatttagccagttccctattaaattttccattaagacaactagtgtggtttttattttctacacgagagcatgatggatttggtgatgctatgacaattgattcacatttacttccacaaacatgtgttctgtctttgctatgctaagatgccatgctaagtggtaaggacacaaagatgaaaaagaaagaaagtctgacctcaaggatgctcctgagctagaaagacacataccatgctcactctgtacaaaaccaatcaggccatactccaaggtaaaatgcaaatactgccaacaaagtgcagtggccacacacagcgggcagtgactgattctaactgaaagagtcttactggctgacaacagggctgctccatgaagaatgaaattttatagagaaaacagaagaggagtgggtggacgcacaggaaacagcaagagcccagaagagtaaaattgttcagaatgtcagggaaaggcaagcagctcagcagagtagaaacaacactgaagctgtgatgggagcgtgtaagagctgaggcaggaagggggtggtgggtccttggatggcatgagaagaatttgaactcttattctcctaaaagtaacagacagtcatcaaaggaatttgtttgaagagtgtcatggtcagatctgcctttccaaagatcactctcggtatcccagagaagataggaagttgagctgtgaaaggaactccactgggagataaaaggactaaagtagggcattggaggggtgtgtggagtaaggggcaaatttgaatgagataacatatgtaaaattactttgaaacatatagaatcttgatagaaaatctaggtattattcttgtttcccttcatttcttgccactatgctaacagtagccacatcccaagtaggcaggcatccatgtcaacttcaggctctagatcttgcatacttttctctattcctcctggaacacatttgcagacatttaaacattttcaaattctatcttgttcagtcaatctcttttctaataattatatcgttatacagtctgggcattaactccttccagagctcaagccctgtttagggaagcttattggccagtgattgttagatctccaaatgacttcttggacaagatttggagtcctacagtgtggatcaagattaagcttggctctgtcatttactggcctcaaaatgtcttgtcaattctcattttcttaacccgtagaatgggaatcccagtacctatctcaaagtaagtgatttcctgggatataacaatgaagtctgtaggaaatctagcatgaagctcaatctacttgaaagcacggtcagagcattctttgggagtaaagtcttctgtgttcatcactgtatatttattgactggctagctcattcaaattagcatttgcttgtcttattttattttttgtttagtctacgtgaacataatgagggtcacttctgttccatagtgttcttatagaagcagaaatactgaagaaaattccatctccttatatttcactgcatcaccttttgcagtttcccaaagtctttcattttaatgaacagactggcctttttcagaagccaagggattgttatgtccatattacaagagagaaaattgagacccaaaggcagggaatgatttgagcatgttcacaaggctaaaataataaagttgggactggaatcagatgtgtccaactatatagttcattctatcctggaccacagagtggtagtaagatggccaggatttgctgttggggatggggaagagttgtgttcaggaaggagttaggggtcctgcactcaagctaatgaaggacaatagggcaaagttctgagcccctccctaggcccatggtgggacagtttatcctcattttgaatctgtatctagatgcctccttgcttacagccttcctctgtcaaagggtagtgcttgagccacaggagatgcttccgcttcattttcattttgtttccttccttctctttcttttcctgatgcactttatggaatccattgtccttgtcatctctactcatcgccttaatttatttataaaggtacccactaagaagggcctccttctcatcctttccccttttctatcctttggtcctatccctccatgtgcctgtgttagctgcaggggaaaataaataaacctgcccacattatgtacatagggaattaaaattcaacatcttttctttttacctatgacaaaacactttaattatactgaagcaaggtgagtgctgaaggcaaaaccatatcgacagaaaccagagcaaacacactcttttcccaagctagacagagtaggaaacagctttccataaagcaagggcatggggatggaagacagcaagacccaagtcctaaagctagtatcaccacctccttccaaatctgtgacttggtacaaataaccatcttgtctctcagaaaagctttgctgatcctgacatactgacatatatgttttttccccttgtagggatgagacaaattgtgtaactgattgtatttccttttagttctatcatgaagttcattggtttgtctggggctaaatttaaatacataaaatgatatctgtgaaaccacctttgcaaagattatggcagtgaaagaaatctaacatggctgactccattttacttctagcctaacaggctagttgttctcactcgttcctgggcataggacaagctaaccatgggagcaatttagtttgtagtttaacttggaagcaaggataataatagttcttccctaaaactaaccccctccttgttcaggaaccaaaaacgaataaaaagccgtgaaattagaattatgagaggaacctgaattctgctaagattcagaataggcatagtttctattaatcctgctcaggagtcatgtggccagaggtcacaagatttccaacttccccaattgctcctgtagataacattgttcttgtagaacctaagattgttcttttgagatgtttttccgacttttggattctggtaactgactgaccccattcagacctgtgactcatgacttaagtagtcctgtggccccctccttgaggcagacttagtgcacaaggaccgttttccacacccctatgatttcatccttaaccagttagcagcacccaatccctagccccctgcccaccaaattatccataaaacccccagcctctgagttctcagggacatggatttgagtaataactccagtccttccacttgcccagccttgcattaattaaactctttctctactgcaaccaccaagtctcagtgaattggtttgtctgtgcaatgggcaagaagaacctgtcaggtggttacatctgcatcattcccaacttatcctctgtttttctatcttctcagcatccctattttccatgattctggctttttatgtttgtattcatattttctttctacttgtattaagtgaacatgtatattcatgttattgaatttttatacataaaaacagattataagtaaataatctcttcccacttccatttttagacctataaaggtagataatagtaactaccacatagcattgttatgaggccaaaataaggcaaaatatataaaggttttagcatagccttgcctattaaatgtgagtgttctcgtttcctctctgaaatggaagcattggctgccatgtgtggctcattgaaaatgttttcaatcggatatgtcagatctgaggtgtgggactatgtagtcaaggctaaaatagtccacagatatgagcatcctccagcatctcatagctgggtgccaagtcaacagtcaccttacagtcttcagggttctctcagccttcactacaataagtgcaattttatgcagtgttggtgttcaatagtccacgatcttgggcaagttattaacctctctaaagattcggttcattcatctatagagcagaaagaatagtattatctctctctctttagactttaatgaagattatgtgaaatggaacatgtaaattgtttatatcatgtagtgcttaatgttagttgttaaatgtaagcccaataattagtactattgtcattccttgtacttatatttggcatcacgctatctatctcaccttatttttctaagttagaaaagcaggtattaaattattacctccattttgcagataaggaaattgaggcttagaaatgtttcatgactccacagtttaaaaagtgatggatataagtagaaattattgcataagaaggatttagagtcatctaaagttgtagaataaactagggcagttacttcaggttcagtccatgccaaatttgagtcttaaaacttttaaaaaacatttaattggaaggccattaggctgagatggctccagtgttttgggttctgtattagtccattcttgcattgctataaagaaatacctgagactgggtaatttataaagaaaagtggtttcattggctcacagttctgcagattgtacaggaagcatagtggcttctggggaggccttaggaaactgataatcatggcagaaggcaaaggggaagcagggacatcttacatggttggagcaggaggaagagagagagaagggggaggtgccacaaatttctatgcaaccagatttcatgagaactaattcattctgcagtaccaagaggggatgatactaaaccattgatgaaggatccacccccatgatccaattatttcctatcaatcaggccccacctccaatactggggattacaactgaaaaaacagaacttaagtttagccaatctgaaatcaccaactaacctccaactagagacttcccactagattgtacctaaacaaggcaaaaggcctatctgtaaccaatcaagcaatttctttactttgctttcatgtgcactctacagaagcccgctgctcatgctgctgaagcagagttctctgaaccttttccaagtggagttctgcctgattcacgctcaaataaactttgttaaattaattttgtctaaattttttaaacaacatatataggactagaatgaaatgtccatcacctagcatagcaccaagctcatttcagggattttagaacggctttaaaaaaaaagaataaataaataaaagctttattgaagtataattgatatacaaagacctgcacatatttaatgagtgatatttattgcaatttgatgagtttggatatacgcaaaaaccatcagtacaattaaggtaatggacatgcccattaccttccagttttgttatgttggcagtaagaacatgtaacatgagatcttccctcttaaattttctggtgcacaatatcatattattaacagtagataatatgttgtatagaagacctctagaatttattaatctagcataactgaaactttatacttattgaacaacaactctccatcttcccactccttggcaaccactactgtgatccctgcttctatgattttgaccattatagacatgtcataaaagtggaatcatgtagtatttgttcttctgtgcctggcttatgtcacttagcctaatgtctcccaggttcatttgtgcccgtgttggcacaaatggcaggatttttttctttttaagactaaacaacattccattttgtatatataccatgttttctttatccattcatctgttgatggacatttgtgttgtttccatatctttgctattgtgaataatgcttcgatgaacatgggagtgcagagataaatgaaggcttcaatgcacaaatagaaacaatgggtaaatgtagagccgcactcgggagacaagcctattttaagctgagaagaagattatattcccatcagcttactctttcctagagctatctgttgttctctaaaaggcagagcattggatggtgttgagattgactcagcttgggagttttggagctaaaacagatctgggctcaaatcctgggttttggtattgttaatatattaaatctttggtattctaaggaatgcccactactttcaaaagacataagtaacctcactactccagtcatgaacttgaagccagttgagattttgagtaaagtaaaaaaaaaaagacttactcatcaaataatctgaaatattttcttgtgaatgtaagacaatttttcaaggcaagtactggaggatttactttatttatagacagaaacctataaataggaaaaaaaatgtgttgtcttaccaagaaaggactagtccattttgcatctatctcattcattcattttatccatttctattcatcaaggcaccacatttttctctctttaaaaaatctaacttatttcatgcagaatggattctaatacgaggtaccctgtaatgtcagggagctatcctaagtattatgttaacttccatttctacacatttttcatacggatactcatattacatactccttggagatttaaaaggtttgcattgccttcatatacccccaaaactcagcatgatttgttcaaaattttactagtcagcactgaaataaaaaaaaatggtacatcatgcacaatgataaactaccccatgtggtttggataaattaaatactttaagctttcagtctccctaatgatttggaaatgaagaagctgtgatttatgactccagctgataggttagatctgaagtttacactttgaaaaatgccgtatttaaattcccctataaataaaaaataatattgctttaaaagcccagcctaagatatgtatgtaataaattagagatactcatattgagtgggggaaatctccaagactgatgactttctcccttgaaaaaatgcactgagtgaaccagatctaggtctgtgtctatctgctaccacttaatcaccagttattgtccctttctgtccagtcattcatttgctcatcctaatgactactgttaaaaccacctgcactagttcagttgtaaagatgatctgatgtggtttttaagtccaaatcaagtatttttaatcaggtagtttcaaaagtcttgataccaatatcattctttgttcctcgtgttttttgtttgcttatgtgtttattccaatgacatgactgcttttggcctctgattttctctcccaaaaagtaacagaactgaagcaggtaatcaatatgatgcacgttagtagggaaaaaaaagtacttggagaggagtccgctgacccacggtccagtttggcttcttctcctttctacctcgaagccattcacaaattccttattctctctgggatctttatattgcaagggattggcttatttgactccaaacttccttctgtctcaacaaccctatagcccaatgtttagtgtggagcaaacctaagttcaaatcctttaacaagttactgtattccctctgagttccagttttcccaggtatcatgtagggataaatagccccactacacagaattgtcatgaagattaaacaatagaaaatacagtaatttctagtgcataataagcactctaaataatagctgtcattattatttttataatttgtattaacagtattttcattattatgctagacaataaccagatataaagcgaggaaaggtgaatctcacaagcttcagagagaagatgacatcaaaataagggccttctctcacttgtttaatagccatagcagtcaagtcagcaaagcggcgaaaagaattaagacaaataccaagtcttcatgaccctgaacactcaccgaaagctacctaagacctcacacgtgtagacctgaattccatttctgccacttactagtgcttggtgttgggcaagtcacatcaccttgttgagctcagtttttacatctacaaaatgcagcagtaatccctactttatatggtgatagcattaagtaaaactgaatattaagcactttattttttacccagtcgacagcaagtggataaaaaaataaaagttgctactattactattattatcattatttcgatgattattattgatttttctggtactgcttctctgtctctgccaaagccacagacactcagttcctggtgttttcaagtttcctctgaggtcccatcacttcctttctcatttacttgcaccattccacttgacaggctccactcctttgcacttcttccactttccctgcttagtttttacgcaagtccttagcttgctgagaagggctcttgtctcatttatgattcatgaggcactgagtatacagatggcattatataaatgtttaataattgccatatggtttccccggaaatgctatcactcaacaaggaatacagacttgaggcttctcacatgtgaaataaaaaaaaggcagacctgcactctcctgctccccttcactgctacagcctcagaaaacaaacagaaacagttcatctcaggcttctaggtgtttagagaccaccacattttggagcagtaaaaaagtaaataaaaataaatgtcagatattactcttctgtgttaaagacagacagctcagttggtgctacaaaattccagtgtctatgttaattattatatcacagagcactgttttaagtggctgagtggccatggggttttcaattggatccacttccatcatgatctcatctctctcggccagtttcttaaagggcgttgcagcagccatttatttatgaggttctgcactttggatggagatgcatatgtaatggggagagactgcacatttgacaaatgggaatcatgattgtctgacctactgacagttgttgatgtgctctcgtgacctgtaaatgttgcagctgactgattacagtaattgattgagaaaacatttgtcaatagccttctaatgacagagagcagggaggaagagattgctggagcacctaggagctgggttttgcttaacagaaggagcactgacccatgttatagacaatcgcagaatttcatatccccatctataaaatgaaaacacaatacttctcaccaacacttatacagcacctactatgtgctaggttagagatcataaactggtgatatgtaagtggaatataaccctcagacttggtctgtgtgttctacgcagttgatctgcaccagccttttgttaaaattggaaggaaattgctaatatttaaaatcaggatatttcccacgaaaatctacatttctagtatctcagaaaaatcattatttggcagcactgggccagaatttctgcagggcaattgttgtcctgacttgggtggctggtggaaatgggcgtgtactcctaagtttgtcccaattgctaccgctctattacttcatcctttaatgttcactctcttggccctgtgggatttttgaggctgagattcctattttaggttctgaagacaaacacacacacagaaaagaatgatttcaggcccttccttgagcatactcatgatgctataactttttatgacagtaaatagtaagtatctagcaaataaggaaaaataggctttcttgtttattaaagactgcacagtgaagtcagcccacatctatcgatatggctgccatatgcaacaaactattttaaaacccgttacaataccctgactttggtggtagctggaattgtagataaaggaagactgcatttgtaagtagtggacttgggcagggttttcagtagtgtcacctgattgctggtgacctataatgagtccttcacttccttggaaatcttattcctccagagccaacagagtaggaggttgaaaagtgttctataaactataatgctctataccaggggcagtgatctatggccactagtttttgcaaataaagttttattggaatacagctacacccattcagaatataaactccagagcagttattttcaaagtatagtcaccaggccacttggttcataaatgcctgggccttgctactactacagattctaaggctccactgcagacttcctgaaacagaatcttacggtgggagaagaatgccagactctgttttaacaagaaccccagattattttgatgagtcctaaaatttgagagcttctaccctagggatagccccctctttctgtactatttggcacatacaaatttggaaggagacaggaaattcgtgtccaacacaatgcgtgagaggcatgatgagagctagcagcatgaattatgaatctcctcttgtcagagaaaacccttcaggcaagagagacctaagctggcttttaatggagtcgagataacctggttaaccccaagagttcctcctctggacagctgcctcatgagggagctctcagaatcacttcctgctccaatgcccagacccacactttgactaatttagtccagatggactcccgcctgccattcattacatatgtgggtgttagcccagtgtaactttagttcctctcttacgggtcctcttttaatggatgagggcatatgtgtaatgagaactctgaacacacagaattcatagggcttagtcatacaactagttttatttatttttgtccctgattgcccttttaaacctactagtgaggataatctttcccctgccactgggtgaaaattcaggttgttccaaggctttttggatcacttttacaagtcttgaatgcctaatctccaatcataaatcaaaatattcagtttaatacatgaatgaaaactcctatctatattcaagaataagaccttcctttcccctggtccacccaaactgctagagcctgtggtaggcaggtagcccgccttggggaagaatcatgtctcacgttctcacgtgcgactttctccactgactaattactgtttctgatcctcattttcattcagatcagggtggacgaggggagaaaaagaggtaagggaaataagaaagtccttactttcttatttgttgtactgctgtgaatcagctctgctctctctgggcctaacgggtgaaccctatagactgaacacttttcagcaggccagcctcaaaatgagctaaatgtttttgctgaactcatcaacaaaatgagctacgtgcctttgttaagctcacctactgcaacctcagttatacaggacgcggattcacccaggtccgtggataaagttctctacctacccaacatgtcccttgacgcacacatccagggagtcccatgggtagaaggcaaaggagcttgaggctagctcgctgtctctcctgtgtgcccacatctggtccagaggacactcaaacatcctattcactcaatgcatttgctgtgtgccaggagaaggggtcacctctttctcatgtggccagcaagcagctccccaacctttctctcttgctcagtagagtcccctgaagggtgtcagacatcaatccactactcactcccaaatcctagatacacacattatgttctctgaatggtctcacagaagcacctctcccacttggcttgaagtgagggacagacatccccagacacatccttagagaaggactcaaagcctgtcatcagctcctccaagaaattatccccaaataatcttctgtctgttggcttctgacctttttatattctgcatgggatagagtattttaaaattaataaaactggttttctggtatcttctgtgaatttttttctatgctgatacctaatatctactcaattttaactttattagttgaaactcagaatatactaatcttcagttatgttatcattatgtcatcttcaggattagctatgaaaaaattacttccatgaataaaacatctgaaagaacaaaatcacctaagaaaatcatacaaaatatggcaattagctcaggctcccagcttaggcttaacctcagcaaacttccaggagagatgccaatatctatagaaaactgggttcccccattattttcaggaggctagctctgtggtggatgaaatgctcctcccacaatgatgctgtgttttctctctcttaacatcttgcggtgtgactgtttgctgccatttccccataaactgaaaatctcttgaaaacacacttctgtcttattcgtctctatttctccaatgctagcaatggttcaacacttagaagacactaaatagatatcaattgagtaggatggaaatatttctcccttcccaaatttacctgtgatagcatggtcagccatattgagggagagatgactgatggcagctgaaagcactatatattccaggcctatctgtgaacagatcgaagcattaaggaaacagttgatagtgactttgaaaagtgagtctttcttgtcttctaaaatcataccatgagtgggttatgccaacaaagaaggctcttccacctcctgttacattttattgtgcatgtggtccaggtatatcatgattccttccaggtgcacccctggaatacaacatttatagcatgacctagtcagagatctgtttgaggcacaaatttcctgtttgccacttacttctttaagagcacctccttcatgctagtgttctccctaacttgctcagatggttgggctttgcagagatgcaccaaagcaagtgggataaaggaagcctaggggtctcttcctaggaaactgagccatagactggcagattttaagaagccccagagaatagaatctatacctgtggactgagcttctcttctcctggaaatcaaattgccttattgttctgggcaccaaggcctccacttatgctgtgcttttgcagcattttgctcatccttagagcaaagcatttaccatgctcttttacggtgaattcacgaatatccatcctttcaagactcagagctccttgcagggaggaatttttgtcttgtctcagaaatctgagaacctaaaacacatagttttgttaaatgggtggatgttaatgtttgttggatgacagataggtggatggatgggtggaagaatggatggatgaattaatctcttgcatgtttaccatgtggaaattagaattacacggtgtctctggattctctcaaagccaaacagtgatcaggaagaatctggaagtaatactattctctatcattaacagcagcagcaatatctcataacggcatgatatatctaaatgtacaaggaagaatatttatagtgtatgagaaaatctcttttctaatataaaatatatataataaaatatataaaaatatataatatatataaaagctattcaattttgtatttaaaacatatttaagtgaattgcctgaatagatgctgattagagtatctgtcatgttttgctaccagcatccagcagttcttcttcagataaccacgctctgattgttttccagaaaaccacctttcccaacagcctcagcccatgtgccttgattgaagtatcaccattggccaaagctactcacagtatttattcttcctgaccctaatgctcaatttaaggatagatatctgctccaatcagagctagagaaatggtatgagacttttgcttagacttctcggaaactctttctgcttacctaaacccgagagaatataaaatcttgttcctcgagagaatataaaatctggttcctcagcagctatctttctaccataaggagggcaatttgtctgagaaggtgattaccttagactagcaaacgaaagacagagagactgggcaattgtaacattatttaaatcttggaataatgctatatcttaacactacttctgtactatctttttctgtgtgtgcatattttatagttatttatgtttatatatgattactcaaacaaatatattttttcctaaagctaagtgggtcagacttttttttttttttttgcatttgcaaccctaagtcctaacagattaatttctcttttcaaaattaaatgctggtataagtttttgcaactcctactatacacatggataaaatcaactttactattgtgggaagtccatgtatggactcaggtgtttcacaaataataatatgaacttactcatccaggtcctgtgccagattcttgaaagacaaaaattacattccgtatctcaaggtgctcacacttttaataggaattagatttgtaaacaactaattataatgcaatatatgtgaataaagtattaacataagtaaaaatagtgtagcgaacacttaaatgacaaatcaattactcctgatttttaagtaatatttctaatttatagtcacaaaataagttagtatggtaagtgggtggatgagtaagaaggaagatcttttccatatactggaaggctttgtatatagggagcttttaaatgattctgatactgacatcactattccagagcaatttaaggcatactctctgagggacaggacccaggctttagtattttagaagctccagaggtgattctaattttcagccagggttgccaatcaccttttatagttgccaacgacagcagtgatgctcaaccttcttgtgcatccaaatcaccctgggcagtttatgaaaaatactcatcctcagtctccacactcagacattctgattcagctggtctagggtgggaaacaggtgtcagggggtttaaaactccccaggtgactctaatattcagccacgattaaaaaccactaatttataagaaactcatcattttggaggtgccaacagagtcctatgtatcatgctgagtacatttatatgcctgatttttctttgttcttcttaaaaacctttcaaacagcagcattatacagataagaaaatagacactctgaaagcaaaataacttgaccaatatgacctatataaatgacaagagctggaatttgaacccagttttgtctgctttcaaagtccaaattcttttaacctcagcattcatctattcgtttattgttagtcagtctgtttttctttcaacaagcacttagtgtcttttaataagtgtgtggcttatgtcccagaatgcaaagcatctccacaaagcggccacctacctccttaggaacacagccttgtagacctaaatgtgaaagacaaatccctgtttaatgaaccagctttaagccacccctagtacctcaggctgcaaatacagtttggttattccagtctctttgctctggacacaacacagtcccagtggcttcaaagaggggcaagccatattaatcatactatgggaagtcacttccagatcactaacccaaaaggcaagtgacatgaaatacacctggtcctactctagtcaaatgactgcagggagagtggcaggtagggttttctgttggagaaagagcacccgggagagacagaagggcaaagatagtcttggtgtgagaagcaagatttgcctcctggctacaaggaaaagctctctttgtctttcttagtcccaagaacaacctgccctttgtgatcaaacctgccagcaatttctgcctgaaggactggaaaagcctgtcatctcagcagacaaaggaggcctccagccccagaggcagtgcagtcaatgaaggggaagaggacagttacctttccttccactcaccttgatggcctcctgttacaggtgcctccctgccatttcagagatgcatgccatcctgccatctgctctcagagtgttagaattcaaggaattctgtgcttatcttgttgtccacacaccgaatccttagcccagcttggagcaatttaattccaacctacattttcagcttcatcacctgctgctacccacagcttaatgaccctttagtgtagtcactgaaggcccctttctttttggctttctctcacaaagtttctttcctgctgccgaaattctcttctcccttccttcctcttggaaaactctcacctacatagttatctaccgtactaggaagacttcctgctgtaccggtgaacagagtcacctttgtaattttttataaaacaaaattttctttacttctataattcccctgatactatactcatcttaggggcttagaattaaataatctttacatacctggctcagttgtgacctcctccaggaagtcatccttgaggccccacttttcagtcttagccctccttcatgctctcataatgctatactagtagctctcaaatgttagtgtacatcagaataactcgaagaacttgttaaaatgcaggttttggggcctcattcccagttactgacttagtaggtctagcatgaagcccaggaatttccatttctattacattttcagtgatgttgatgctgctggcccagggaacacccttgagaactactggtctatatttactcaaacataattctctcattgtgcttataatatgtgtggcaaattacttatttatgattccacttgccccactcactacatcagtcaataaggaaatttcagaaaaatataaagcaacacaaaaaacaattcagagtatactaattatctattgtgcaataaatgaccccaaaacttagttcaaaacaataaatatttattatagcattatttctgtaagttagaaatcaggaatggctttgatggatggttctggctcaagatctttcacaaggttgtactcaagctgttggaaagggctgcagcctcatctgaaagctcaactgggaaaggaacctcttccaaacttacaccggtggttgttagtagggctcaattttccactggtggttaccagaaacttcaagtctgtcccacatggacctctccatcagatggactaatgtgctcaaaacatggtagctggctttccccacagcaagtaacccaaaagagacagtgaacacccaagatggaagtcgcagtcatttataacctaatcttagaagttatagtttctgccatgtgcaggtggtaaaacaaaccaaccctagttcagtgaaagatgggactacacgaaggtaagaccatgaatgctggctatcaatcacatggggtagtcatagagaatagagatgacccttttatgtagggtgtctagggaaaacctttttggggagatgctatgaaaaccaaaatctaaatgaacagagatagccaactgtataaagacttagaagtagagaattccaggcagaggaaaagcaaaggctctaaggtagaaatgagcttggtatatttgaagaagagaaagtgggctggtagaagagccagcaaggagcaggaggggcagctgttattattaacatcaaaaactttttttattatactttaagttctgggatacatgtgccaaatgtgcaggtttgttacataggtatacatgtgccatggtggcttgctgcacccatcaacccatcatccacattaggtatttctcctaatgctatccctccccttgccccccacccaacaacaggccccagtgtgtgatgttcccctccctgtgtccatgtgttatcattgttaaactcccacttatgagtgagaacatgcagtgtttggttttctgttcctgtgttagtttgctgagaatgatggtttcaagcttcatccatgtccctgcaaaggacaatgaactcatccttttttatggctgcatagtattccatggtgtatatgtactacattttctttatccagtctatcattgatgggcatttgggttggttccaagtctttgctattgtgaacagtgctgcaagaaacatacgtgtccatgtgtctttaaagtagaatgatttataatcctttgggtatatacccagtaatgggattgttgggtgaaatggtatttctgattccagatccttgaggaatcgccacgctgtcttccataatggtttaactaatttacactcccaccaacagtgtaaaagtgttcctatttctccacatcctctccagcagctgctgtttcctgactttttaatgattgccattctaactggtttgagatggtattgcattgtggttttgatttgcatttctctaatgaccagtgatgatgagctttttttcatatgtttgttggcagcataaatgtcttctcatcaaaaacatttttaaagcatctactatgctcagggtcttatcagccatataaataaggaaaaatacaaaatttcttttttttttttttgagacggagtctcgctttcacccaggctggagtgcagtggtgcgatctcggctcactacaggctctgcccactggtttcacgccattctcctgcctcagcctcccgagtagctgggactacaggcgtggaaaaatacatcatttctaacttcaaggaactgatcttccagttgaagaaacctttcatgctttttaattagtgcaatcagaaagtctagataatttagcttcaatacattcccattaccacacccacattttttattgtatgagtttcaattatgtttaatcaactcaggagcaagagtttgagggaaaaaagtaccaattagttgagtaaagccaagactatgccttatatttgtcaaatttaatgagccagaacctttccaatcttggagaatatgcaacctggaatcttgaaaaagctggaagagacttcagagatcattccatccttctgtcttcatctccagcttgatttttgaagaagaaactgaaaccagtgagctagagaaaccagcccaagatctcaaagactgttggacagccctccatccactaattgggttaatgagcttaatgagaacccgtcccatgcaaggtgctcagggtagcagaggaacaactaaactcccatctcaggatttctaggtcagcctgtgttccatggcagagataatccagaagctgccttaggtgtgggaaagagcagagaaaggggaagaaagaggctaggacgcagcctccaggctctcctctgctcaaccacagcagacaccttcatctactttatatgtaggagtttataaatgtctctgctaaaagaagattgaaagccactttataataccattcttttttctttgatagttaagcctagaggtcagcaaacttcatctcctaaacccaaactagcccactgcttttatttatatgacctgtgagccagaaatggcttttgcattttcaaatggtcaacaaaaaaatcaaaagataaataatattttgtcacacatcaaaaagtagatgaaattcaaatctcagtgtccataagtaaagtttagaacacagccacacccatttatttaagtatcatctctggctgtttttgtgctactgttgcagagctgggtagttgtgacagaccatctggcctgcaacctaaaatatttactatgtgacctttatagaaatgcctgcaacccctggtacagccaagggtccaatagatgcctaaatccctcccttcacatcttccttctctttttattccttctgcttcccagcaaaacttcattatatgttggtattcagaatatagtttactgggatccacaggtctgcctttgatgctagtgtattttggggacacaacactagggtttcagattcctgattcaaaccatccaaaccccatctgctctttctaataacatcctgtagtcagcattgcagaaagagtttgagtgattacctccctactcttatcccccagccaatgaagcatctgctaatgatatgagctgttctttcctgtccctgtggtccataaaagcctgggttacagaaagaacgaagtcgaagtgcatagacaactccaccacccacagctacttgagctcctaaatatctctctagaagggcagatatgtgaagaggagtctggcagacacattgcttattcttgttgaaggtgtggattgctagcaaaaggttcattgtcagagataacctaggtctgaggaagcagaggccaatagtttttacatgcatcagagtgttagacaataagatgcagtgtaaaagtgtttgttctcactgctaaccaaagacaggcaaattaagactattaaagtatccttttctacccactaaaataattttagagaaaatttaagattacaaagctcagcgttagtaagactgcagggaaaaagaaacacgcacacattggaaaaatcatttcggagaccaaattagtaaaataaataaagagccaatataatcatgccctttgacaaaggaattctcctggattcttctaaaggcataaattaaaaacaacaacaaccacaaaaaccaaaaaaacttgtacaaagaaattcattgcaagatatttacagtgtgttatttaaagtaacaaaaagtccccaaactctaaatgtttgataatatattttgatgtattaaattatggtaaactaacccaaaggaaatatcttatggtcattaaaatgaccatgttgtaacatataaattcctttaaaaatattatgaaagtagaaaggtagaacagagaacattgtatacatactgcaattaatgtaaaaatatgcatgcatctgaataaaaatgagataggaagtttctgacagttcttttctgttagccatggggagaatatgggtgaatatttttttctattttaactttcacgaaagttgttgtaataagtaaaaggctttgttttacttataagcatatattttaataaaagaagatgagaaaagaagaatgagtcttctttataacattactttttgggatactgagaagcagcattacatttgagagagctggtcacaacccacagtgggtacctctcaggaccgtaatgcagggatccaagagggaaggaagctgtgctctacccatgaaatctggtaatcgtgacatcgatagagatggatgcttctgatgggaggcagagatagggccactgagaaagtgactcagcagggccagatggtatttattcaagagctcatttatttggatcaactaatgtatgaaatagcagggatcctgacaaggacatgcgatacctcatttccttgaagattaaggagctgcaaaggaagtatctatcctccaaagagagcctaaggaagacagaatgaggctcagaggtggccaagccctgagcagagcccagcttccatgagactgataaagacagaaagatgtttgcctggagttatgggttgaactgtatctcccacccccgccctcccctccccaaaagatatgttgaaatcttaacccccaatactttagaatgtgaccttatttggaaataaggtcattgcagatgtaattagtttagtgaggttggacgggtgtgggcccctaacccaatacaactggtgtccttataggaagaggagagcacacagagacacacacagggagagcaccatgtgaagacacagatggagacacatacaaagggagtgtcctgtgagagagaggcacaaatggagggatgcatctaaaagccaaggaacgtcaaagattgctggccattaccagaagctaagaagggtcaaagaaggatttccctataggtttcaggagtatgaccctgttgagtgcctgattctagactttccgtctccagaactgtgaagcaataaaatttctgttgttttaagccatctagtttgtagtatggtttacagatgccccagctaggaaacaagtataccctgaaagtctctgtggtcagcggagtgagtctgagccagttgcttttccttccttaacttttggattgctgcagctggttgcaacttgggtcttactgatacagaccaagcagaaataacctagcaactggatacccagcttaggcccaaaggagggtacacaaagcagaagtgtgggttctgagccaggcaccttctccccacagcagcatgtaagcatttaataatgggaggacaggagtaaaatgggggaagcgtgggaaggcgaatgtggtgcccagatagtaatatgtagtgtatgatatgtatagtgagtgaggaagcacctggattcagagttccaatctcagttacaccacctaactagcggtgatcctttaagttacttaacctctctgtggctcagttgtcttatctataaaatgggactaataatagtttctccctcacagggctattgtgaggggtaagtgacttaataactataacttgcatagaacggagcccagtgcatagtgtgataatgttaaacattacctccacctttccatgtatgcctttacagttattctatcaactattctatgatgccaatcttattaagttatgagtagagagagaaactcaggcttaagaggttaaaggaaataggttaaagaacatacacaaaataaagcagcttggcaattggagattcaaactatggcaagaaggagcaagggaggacaaagcaggaatgtgagatgaaagccaggaactttctggtaagcagatcaaactggaagccagattacctggcgccatagtgcatcctttgttcagttcttcactgtcctgatgtcctaagttctggttgatctgccatcaatttgctgtacagccttcagtaagtcacttgcatttcttaacttacatcaacgtttctcaacctcagcactgttgatatttcaggtcaggttattctttattgtagggaggtgtcctttgtattgtagaagatttagtagcatttctggcccttgtacactagataccaatagcatctttcccacatgataataaaaactgtccccagatactaccaaatatcctccagaagggaaaattgtccccagctgaaaattattgacctacatgataggattaagttacctgtgaaactgcctaattgagccattctggggagcaaatttgataaatacgtttttaatctttaaaaaaacacaaagtattgctaatataagatattgtaagacacataaaatattatttgttagatgtcacttaccacatgcaaaaaaatgggtaacagctttctcctttcaaaaaaattacaaccaaggagggaaggaaagaaaagtatgaatgcaatgagcattgttgaggccaaaaggcttaggaagaaattaccctcaactgagtcaataaggggattttataaaggaaataggacatgagccacttattgaaggatgggaacgatttctgcagacagaaatgaaatctcccttagagacagggagatacatacaaagttatcacacatcaggagccaagtgagaaaccaagaagagactaagctgatgaggactcctgaaataacttgttttttcctcttcctagaaggcctttcccactttcacaaacccaatcatcctcgtccttcaaggctcagttcagatgctacctcctccaagaagccttttctgaactcccaaatttggcaagataccgctttgcattgttcctctttgctcccagtaataacccccattagtttctcttatagggctgccattggcagtagggtgggttggttcttcattgagtaattggattgttttatgcactgtagaaagttaagtattcttaactttcactccctaaatatcaatgatattccttatcatcgtgatgaccaaaaatctccatgacactatcccaaatatctctaagtagcaataaaaaccatatcgcagtgaaaactacatcttaatacttaatatattttgcctgaaaccatgcgcctgtctcctcctgtcgacagtaagcccctggaggacagattgttaatctcaatcatatctgcatcactaggacctactccagttcctagtttacaactggtatttgataaatattcagtgatctatcaaagcctagattttatctaggggaaaattgtgaattcagaattggaacataaattggggccagattgtaaacaactttgaatatgctaagaaacattagttttattctattaggtgaaatcatatgaagttatcatttttgtaagtcaaaatggtcgattttcagcagctgcatataacctttcctaatgtaagccagtataattttttaaaaattgaacagaaccaaagacaaaaaccacatgattatctcaatagatgcagaaaaagcctttgacaaaattcaacaacccttcatgctaaaaactctcaataaattaggtattgatgggacgtatttcaaaataataagagctatctatgacaaacccacagccaatatcatactgaatgggcaaaaactggaagcattccctttgaaaactggcacaagacagggatgccctctctcaccactcctattcaacatagtgttggaagttctggccagggcaattaggcaggagaaggaaataaagggtattcaattaggaaaagaggaagtcaaattgtccctgtttgcagatgacatgattgtatatctagaaaaccccattgtctcagcccaaaatctccttaagctgataagcaacttcagcaaagtctcaggatacaaaatcaatgtacaaaaatcacaagcattcttatacaccaacaacagacaaacagagagccaaatcatgagtgaactcccattcacaattgcttcaaagagaataaaatacctaggaatccaacttacaagggatgtgaaggacctcttcaaggtgaactacaaaccactgctcaaggaaataaaagaggatacaaacaaatggaagaacattccatgctcatgggtaggaagaatcaatagcgtgaaaatggccatactgcccaaggtaatttacagattcaatgccatccccatcaagctaccaatgactttcttcacagaattggaaaaaactactttaaagttcatatggaaccaaaaaagagcctgcatcgccaagtcaatcctaagccaaaagaacaaagctggaggcatcacactacctgacttcaaactttactacaaggctacagtaaccaaaacagcatggtactggtaccaaaacagagatatagatcaatggaacagaacagagccctcagaaataacaccgcatacctacaactgtctgatctttgacaaacctgagaaaaacaagaaatggggaaaggattccctatttaataaatggtgctgggaaaactggctagccatatgtagaaagctgaaactggatcccttccttacaccttatacaaaaatcaattcaagatggattaaagacttaaacgttagacctaaaaccataaaaaccctagaagaaaacctaggcattaccactcaggacataggcatgggcaaggacttcatgtccaaaacaccaaaagcaatggcaacaaaagacaaaattgacaaatgggatctaattaaactaaagagcttctgcacagcaaaagaaactaccatcagagtgaacaggcaacctacaaaatgggagaaaattttcacaacctactcatctgacaaagggctaatatccagaatctacaatgaactcaaacaaatttacaagaaaaaaacaaacaaccccatcaaaaagtgggcgaaggacatgaacagacacttctcaaaagaagacatttatgcagccaaagaacacatgaaaaaatgctcatcatcactggccatcagagaaatgcaaatcaaaaccacaatgagataccatctcacaccagttagaatggcaatcattaaaaagtcaggaaacaacaggtgctggagaggatgtggagaaataggaacacttttacactgttggtgggactgtaaactagttcaaccattgtggaagtcagtgtggcgattcctcagggatctagaactagaaataccatttgacccagccatcccattactgggtatatacccaaatgactataaatcatgctgctataaagacacatgcacacgtatgtttattgcggcattattcacaatagcaaagacttggaaccaacccaaatgtccaacaatgatagactggattaagaaaatgtggcacatatacaccatggaatactatgcagccataaaaaatgatgagttcatgtcctttgtagggacatggatgaaattggaaatcatcattctcagtaaactatcccaaggacaaaaaaccaaacaccgcatattctcactcataggtgggaattgaacaatgagatcacatggacacaggaaagggaatatcacaatctggggactgtggtggggtggggggagaggggagggatagcattgggagatatacctaatgctagatgacgagttagtgggtgcagtgcaccagcatgacacatgtatacatatgtaactaacctgcacaatgtgcacatgtaccctaaaacctaaagtataataaaaaaaagaaaagaaaaaaaaaaaaaaaaattgaaacatttttctggcttaaatacctacctttggtcttatcctaattaggcaccaatattcatgcaataatagattatatgcagtaattttttaattaaaacattaaaataattttgatccttaacaattaatgatcatttactcaccccgtaacaatatattatgtgctacaagtagagacaggtactgctgtaggaaactgtgccgtaagcaatggggatggatccactgcagtctgaggataatagtgtaataatgaaataagggaggggagtgtttttaaaagaagggggaagaagagaggaggaagaaactacagagaagaaggaaaacgtggagaaaaaagagaaggaaaaagagaaggaaaaataacaacaaagtaggaagagaaaagagaagaaacagagggaagaaaaggcagtaggagatgattactatgagctcaaatttgtttctccctttgttcccaagttccactccaatgctgcagtacaatcagctcagagcctgattatcatggctgacatagcctagcgcctgcttatttttagatgaaattaatcattttcatgtgttatttttggtttagataatagctcgagtacacagcagcttcttcattagctgccaacaagaatgtaaacaaggttgcatctctccttggcaggttctatattcagctctgccatgaagaagctgcgttcctacagaaactgagaaactgcttctcctgcagcccgtgagagattgcagagaggggcttaggcagtcataagagtagctggatggaagggagctggaactgctttgattccaatgctctctttgttcagtttcttttaagtcaggaactatttgtcagtattattggcatttgcactggatcattctttgttggggccgggggcactttcctgcactttgcagatgtttagcagcctctagacaatagatgccaataacatccccaccctcacccaaaaatgtctccagacatggacaaatgccccctggggagatactccaagacacccccagttgagagccactgatttcaatcaataaaatgaaaccgtaatcgagtaacccaaattacggtggaacagactcccaaccactttactgcagaaattaaaatttccagggctgtcttgtatatgtgaaagaacagaatgctcatatttgtctcctcctgcctccgggtcactactgggtatccttgagagacaactgctccagtgggcacagactccaagctttccactggtagccacagctggtactgccctgtctggccttggaagattcctcagctcactccttccttgcttcataccaggcatgcaccatgtcttcctctttaactccacacagcagaagagagaaccaaatgtaattgtttcttaagtttttttttaaaggctcagggacactaacaacaggataaccatgatctctactctggccttccctggccagcgctgggctggcttgtcatcgcactcctagcttctctccatggggccagacatagcatgctctttccactgaaatctgtctagttaaatccattgcatttaaacgcagccaaaccatgactgctccttgcacccaatacccacaaaagaaggcatttttctcagagtccagaatcacactcacttcccaagtcctcacttgccactccaggactcacctcctcccaggatgactgcaaattggaatatacataaatttctgctcttatccacaggagtgtatctcaatgttgcattttcagaaagataatcacccaataggctgatattagtgccccccccccccgaaactgggcacatgggacacaaattactcagaaaaagtccatttttccttagtttctcctcatcaagcccaaagggaaacatctgaagacaactctataagccaatgatcatattaaaacatgaagaagtttcatcaaaacctagagaaaagcacaaagccaaggccaagacaggaaagaagaattggtggcagaggtgagacagtagggggaataacaaaaacagcccaggagtcagccagataaagttcacagggagctgggcaggaggggaaccgcaaggtgattttcaaagcaagtgccccccatggtggaaaacagctttgggaggccaaggtgggcagatcacgaggtgaggagattgagaccatcctggctaacatggtaaaaacccatctctactaaaaatacaagaaattagagggcatggtggcatgcgcctgtagtcccagctactcgggaggctgaggcaggagaatcacttgaacccaggaggcagagcttgcagtgagccgagattgtgccaccgcactccagcctgggcaacagagcgagactccgtctcaaaaaaaaaaaaaaaaagaaagaaagatacaaagatacaatacagattttcaaggatgtcaaggatgaacagtgctgagagatcagacttaggccaggtcagagtctgatctaagaagactagaggagaccaggatctgatgacttgattttagaagatgatcccaatgttcctggctgggctgccctacgatggtccctctgacagctggctactccggaaatgtgccagccatactaccctttaaaaataagtaccaactcccattttctgttaaaaagttactcttaattttcctaaccataaggatggaaaaaagaagaacattgttttcttgtattgattaggccagagtgaaatgagagcttactatgagcactaaggtgaaggctggctggcatcaccctgatccccaggcagcttgttcccttgggacgcctcttcaatgaccctgggtgtgattttaggacctacactcacccctgacttacagacacaaacgcacacacactcaggcattcaggctaagtgttatagactaagggtttgtgtcccctgaagttcgtatgttgaaatcctaaccttcaaagtgatggtgttaggagatgaggcctttggaagacgattgggtcatgaggctggagccctcatgaatgggattaatgcccttaaagaagaggccccatgagagctctctagttctccaccctgcagagacagtgagaagtcatcaatccgcaacctgaaagggtcccttaccagaacttgctcatgctggtaccctgatcttggattatcagcctccataactgtgaccaataatagtttattgtttgctgggcgcggtggctcatgcctgtaatccagcactttgggaggccaaggcgggcggatcacgaggtcaggagatcgagactgtcctggctaacacggtgaaatcccgtctctactaaaaatacaaaaaatagccaggcatggtggcgggcgcctgtagtcccagctactggggaggctgaggcaggagaatggcgtgaacccgggaggcagagcttgcagtgagccgagatcgtgccactgcactccagcctgggcgacagagcaagactccgtcacacaaaaaaagtgtattgtttaaggcacacaattgatggtaatttggtatgtcagcccaaaatgactaaaacaccaagtcaaggaatttctactttcccagtttagactactagtttccaccttctctgtccggtactgaacgtgaataaaatatcaagggggagagagctgctaattttcctctgggacacttatccagtgctgatgctgctgtctcctcctagccacagccttgtggttggtggtggttttcaggtagaatttcctaatccagatccaaatatcagatacagataacagctttaaatagaatctaaaagaaaagtcagattgggctatcccagtaagcttgccagtagaaatagtgactctcacatactgaaggcattccctgcagaagtaatgatcaccattaggttgggaaggatggctgtttctacatgtgccaggagtttttccttcataggatgggctgttactcaagattctgtaagtttcaaacaatagaaacacaacgagaattagtttatgcaaaaagacaggaacttaccagttcctataaaacacagaatgtggagagatgggtctaagctgtatgatgggtttctgccagagcaaaaaacctatcagggctttctgtcctttcatttctcagctatgcttctattgatgtgctgacttcatcaccttctattgagataggcatcttccatgcaacacagaccatgccagaggctgatctagaagcacattctaaggtagagatgaacacatctcctccttcagctcctatttgaaaccatagagagagatgctgattggcctggtttaggccatgtgctcatccctggacaaatcagaaaagcccagagtatagggcattataattggcccaggctgaatggagccgtttagatctacagtgagaaaggcagaagcaatccttacctattagtatatatgaacagttaccgctcctatcgaagccaggtactgtatcctctcttatatactcaaaggttttgcatttcgaataatctcataggtctcgtatcaatcgttcctccctcttattagtgtacatataggtgcatacgtctgaatgtttggaaaggcaggggaaaaaatcagtatctcctactacagataagatcaataaagcccctttaaatctaagcgaaattttcaagtttcaaaatagacttctaacttttctaattttgtgttacataatttttacctgttaaatcagcgatttttccctcttgttagatcattctaattaaaatataaatatactgatatataaatatatccttctatcttaaaagaaaaaaaaaaacttccttaacctcatgccccccttcaacaactgccttagttttttctctttacaaacaaagttattgagggttgactatgctgtttccaactcttcacctctctttctctctttaacctgcttttatcagattttgtctccaccacatcaataaaactacttttgtgaagctcatcaacatcctccatctggcccaatccaatgggccccagttgactgacttctaagccttatttgacaattgtgcacacctccctttctgaaacatttttttcatttggctctgtgaccacacattcttctagttctgcttttgcctgcctggctactccttcagaatctccttggctgggtcctcctcttgttcacaacttttaaatgtagtaatgtgcttggcttatacgcactctgcactctctctggggaaacacatccatggctttaaataaaatccgtgtgctgactactctagttgagaactctcccttgattatcaggcttgtgtttccagctgtttattgaatgccttcattagcatgcctagtgatcttaaatttactaaggccagagcagaactttcccacctccacttcacatttgcttctctccaatctactcaatctcctttaataatagtactattcactcagttgcccagccatcagcaagtactattgattctgcctccaagatacattttgagtagcagcatttttggcaacctccactgctaccagctggtgcatgttaccaccagatttctcctggaccactgcaagagcctcctagccatctccctgcttcacctctttctccttgacagttcattctccatccagccacaagagtgatcttctggaaacacatttaaatcatgtttctctcttgcttaatattgaacaagctctccacagtatattctgaattatatttatccatgcttttattcccttttacttctccattctttcctctctggcattttttctgttcctcctccataccaagcttattcccttttcgggacctctgttctgtttattctttttaaaaagtgtgtcctgtaccacagttctttacccagctgtcttttttgccattcaaatgtcacttcttagagaacctttcttcagcaattctttgtacaaccggaacacttagctggtacctcaggaaatctttatcccataaccatattttatttcctcggtagcactcttttaaatgatgccatttatttatgtaaatatatttgtgcttttcatcttcccccccactggagtgtgaacaggtaccatatctgtcttattcctttggtttcaactcatttgcctgtgtgtccacaactctttgatcaatatctggcaatagtaaattctaaataatgcgaaagaataaacttgtgtctcccattgcccttttcatagtagatgtacaataagttcttaagaaatagttgaatagataggatggtgggtggaagagtggctggctggctggccggttgtgtggacagaggtaaatatgcaaaatcaaccaatttaatatctccccattacttgcaaatataggatagtgagcaggttatttaagtaatctatagctgcattaacaacccgcccaaaatgtcatagcttagaaaagtagttgattctgtctcataattccagaagttcattgggtgattcttcgggtccacatggtattggctggaatgctgacatggctacagtcatccaagggctaggttgaacagaaacattcaaaatggctcattcatgtggctgttgtggcagagttcagctgttcatctgggactgtcaaccagaaaaactacacatgtcatctccatgtcacttgggtttctcctggcatggcaggtgggttccgaggcttcccagaagtgagtgttctaagagattcaggcagacactgtaagacttgttatgacctagccttgaaagtcccaggacgtcatttctgccacattctattaaacaatcactactgtcagcctagatgtaagactccacctcttgaagtgagcagtgttggtgaagccatcttggaaactgtctaccatacctgtaaagagacagcccactgggttctgcagggaaatcacatttatagattttgattcttctgttctttttattgaaaccactttgggaatatgcatctatgtgttttactttcagcagatcagatcttactaatcacaaccgagtaaagtaacagactttcataactccagccttcataattcagtagctgcatattcattatctgaaaactcactcttcagaattccttgcatctttttggttccaaaaatacaatcttgtttcactttctttaaagtagtctgtgtattctaatcagggttctctgttttttccatcgctatgttcctgccacctgttccctttccgcaaccaaatttccttctctttagcgcagataggctgatacagaaagaaaagtcagttttaaaattaagagctagaaaacaagatctgcacaatcaaatgaagacatagtcaaggcaaaatattaagagttgaactattaaattagtgattgggttctgttcagttaggatgctactgtcttccctttcagtgtttctcacataagtatcatacatggagtgacaacaaacaaaagcgcagaacatcctgcacttcacccctgacgtacaaatcagaagcttaaggggcatagctggacccctgcatatatgttttttttttatcatactttaagttctagggtacatgtgcataaagtgcaggtttgttacatatgtatacatgtgccatgttggtgtgctgcacccattaactggtcatttacattaggtatatctcctaatgctattcctcccccctccccccaccccacaacaggcccctgtgcgtgatgttccccttcctgtgtccaagtgttctcatgttcaattcccacctatgagtgagaacagacccctgcatatatgttaaagatccacctaggtgactctgatgttctgtcggcatgcattccttcttctaggtatcaagataccacattgcaaaggaaaacctagctcttttgcaattttggtttatctcattagcacacttactattttcccattgaagcagtgactggaactattggttatgtttcccagtgtgttttatatctcagtttctggatgaacatatttgtacaattataaagaaaaagtaagaagagagctttcaatatgtgaagattcacttcccaggcatcttttcaacattgatcctaatctgcaaaagacattgacctcacaagaaacaattgcaatcaggttctcactgagctgagtttcttcaagtacacccctgtaagtgggccacagctgcagccagcagattttgcacttctcttgttcctgctgaggatgaaatgtgctgaagccaataacctggtgaataattcatttttccaagaaacaattgctaagcctcagaattgctttttacccagacagagagcaaattatttaaccaataataatactttctgtatgtatagaatcttgtaatttttaaaatcattctcctaacaataaggataatgaccatagctaatatttatcaaaagcttatcatgtgccaagttttgtgctatgtccttcaacatagatcatctcatttaatttttgcaacattctgagacaggtattgccatttttatctctctttttcagaggaagaaactgaggcttatgaaggttaagtaactttcccaagtccacacagcatttaaatccacatcacagccatcatgctagactgcatcccatttctttattgatcagtagacagatagaagcagacatatagactcatttgataattatgaaaaccctgggtgacaaaaagtatcacatattagggctaccaaatcagataagaaaatttaggctacagatttaaaacaacctgttcaagtaacacattagcaaggcaaaatcagttttctgatctgagtcctgtggtcctcccatagccctggggcaactctaacagaatcaaaaagatttatttaatttttgccttgcagtgtgcatgggagtgtgtcaggggaaagggaccggatacggcagtgtaccgagccctacgatgacattttcagccaagaagaagaagaatgcttcatcaaatctcccatcagcccaagactagattgtaccaagattttgcaatatgaacataatgttctctactgtccaggatctaatccttttccatcggggaacacatttgcaaacaatgactcctaactgatgaggaacaggatccaactgttactccacaaactaggacctttacaccacattggaggcaatagccctgaggttaaagggccgttccgtgtctaaccactgaagctcttgcttgaaggaaggtttcccaaaatgaacccccaaagaaactgaaaatggcatgaacgtacatcctgttactcaacactccccgagtttcataacgtgaagtcaggaagaaaaggtgccaacattcctgaatgttattatcattaaggagcaaactcttaatgttcccacacttgaacgttaaagagatgggatcattcagtctcctctttacttatggaattgctgcaaaaccatatgggctgaattaggcatccaaggctaatgtttcctaccattccctctggggggcctttggggctcatcccaggcacttggctttaaagacaaggatatcctatttggaaacacagtcatgagccctgatattaataagcacttcctgacttcaaagcatctttataaccattgccctaattaaatctcgtaacctcccagagagaatgcaggcttcatcatttccactttacaaatggagaaactgaggcagagccctatggaatatgaaaccgtatcccacctgattgaggaaccactggagattttaatcagtttcagattaaattacaatgttaaagttttaattttttattttaccatttggtgagattaaaacaaggcatttaattgtgtattctgatggttaaaaccaccagacctggttgtgtggccttggcatagggatcaaacttctctaaactttaatttcctcattgggaaaaatgaaaataataacagagtctaccataatgtttttcaggttaaataatgtatgttaagtttctggcatgcaaataagcactcaataaattgtagcagtttaagtcagcttattttccttcagctacccattcattccttcattcactcgtttcctagtatttattacagcccattgagtgctgaaggctgtgcagtccacaaaggatacagcagcgaacaaagcagaaaagggactatttcctacatatggaatatatcttatttatgattataaattaattcacacaaaatgtgggttattccctattgattttgaactgatctcaccacttacttataaggtctctttgattgttctttcagctgaaccatcacattccttatacagagtgggacagcattggctgagttctactagcaaatgccggagatgtggttcctgttggccttttaactgatgtgatgaaataaagtcttccataatttgacaactagtttataagtggcagagtttgaatttttgtctcaatgtatgcagttgtgggaatctgtattagatttctgttgcttgcaggcactgtactgggcactgtggtgagaaggagtggcaggaggaaaggcttagccaatgtggtaaggctaactgaggccctacaggatccatagcatttttaaaagaaatagtatcagtaaaaatgtcattccaggggagggcacaggatgagcaaacccatggaggttctgttctctggagcttcttgcctggggacctcaatggtctcagctactccaaattgtcttctgcactcttctaattatatttatatgtatttatataatgtttgtgtgcatacgtgtatatatgtgtgtctaaaatatacatatatattttttcatcaaacaaatgcttgttgaatagtaactaaaaaaggcatttattgagcttttattctaggtcagaaatgctgaaggatgccctgacatgtattagtacatttaatcatcctgagattcctatgtatataattatttttctcattttacagagaaggaaacagatgtttggagatatgaaaattttgcttgtggtttataagtggcagagttggaatttaaagccagttgtggtcactgtattcaaacgatcatcataacagaaaggatgaaagggaaggagggaagaagggatataggaaatgaggaaaggagagagggagggaacaatttaaaaaccattcaggctgggcacggtggctcatgcctgtaatcccagcacttggggaggccgaggcgggtggatcatctgaggtcaggagttcgaggccagcctggccaacagggtgaaaccctgtctctagtaaaaatacaaaaattagctgggcatggtggcagacgcctgtaatcccagctacttgggaggctgaggcaggagaatcacttgaacccgggaggcggaggttgcagtgagccaagatggtaccactgcactccagcctgggtaacggtgagattccatctcaaaaaacaaaaaacattcagcaacactaatggatggcaaaaatgagctacacaattcatatccacattttaaggcccaagaatttagtgtttgggcccactgagagaagatggggagacacatatcaagagaagctatgtgatgagagacgaaggaggcggtgtaggtaaagatggaagtgtagcctcagtcctgcaagcctcactcagaagagcaccataagctgcatagcaatggcagcagcaattattttccacaggagaacagacatacaactgacacctctcagcacccagtggccaggcagagccttcgatatgtcagtccaagccaaggagtcatctctgtccagccaaatcttttcatccttcaagatctaaatgaagtttctcttctctgaagaagtcttgttttaattcaatatttgcagaaaagcaacttccaaaaaatctttcatgaaaataccaagcccccaataccctctcctttgtctgaagcccttgtaaataaaaaagttataaaattgacaataagtaatatttactaactgtacacgaggttctaggcatgttttcattatttaggcatcacattttaaataactgcaatgatctttggaataagttgctttttattcccgttttacagaggccataatggttaagtaatttcccaatgtcacttcacactcaagtggaagagcaaggtggccaacccaaagcccacgtttcttctcctatagaagtcttcctcgtggctgactgcttgaaaatttagccaggtgttaaaggatcaagactggaagtgactggtgaaccatttgcagtggttccaaaggagccctgcaatggaaaagaaaggagagagagaaactccatgtgtggaagcttgatctcctttgaaaagagctcagcttaaaggatgatatcatggggactgtcaacaggaatcagagatgcatatccaagggcagaatctaatttcaattccaggacgtttcatgaaacagaatgcaaagcaacaattatctgctaaatggaaaattaaaggcataaataaagtcaaagctcaaaccagtgaggcaaaaatcacacgggctccaatttccttttgctgcttgtagctgcaagtttgaaaggaaggacacatggggatagtaaaaatatgagagcaatggaccacgtttaatcgatagtgaaggctctgatcccacaaatgctccccttcccactattagcccttccccacctactgccaaaacccagcaagctgaatggagcaagacatctgagaaagaggcccctgttctctccataggaacttcactttcctataaatgtgctccagcactgagtaagttctggtaaaaaagagctttatttccccagactccttgttcctccacttctgccaaaatacatttcttaagtattccaacctgaaacacacacatgcacacacatacacacacatatgctgccaatttcttggtattttgtcaatactgactttgccccttttctaaatcttcatctccaattaaggcttcctgtttgatagacaagtggtgacacatgacacagaataagcccagtggaagactttgtttcccacgggtccatatgtaagacactgggtcaagtgtcaaatgctttgggccatgatttacaaccaatgcttgtgacttccacccctccctcaccctctgtcttccctgctctcctttaaattcttccccacaagtgtgtttccaatcttttccctcctcttgatccccactgcctcttttacttggaccactgcaaagttcaccacttcaattccactctcaaaacagctgcaacaatgacttttctaatccataaatctgattatatttttcctttgttcagaaaacacaatgggctcccattgcctacaagataaagaccaccctctatggccatgcctaccaggaccttcatcaataatcccccttaacctcctccaccactgatgtcattcatttatcttttcactcattcattcaaaaccatgaagcatccactgtgtgccagccatcattctggacgcacagccaaactaaacttctctttcccaaacacttcctgccctcttacaacactgccttctcacagcgttctctttgccagaaacgcttctattcctcttctatcaaactctcattcacctttccagattcagcctcctcggtgtgtcctctgtgaagctttgcctaagacagacacacgcatgcacacacatgttccaagcaggttctgtcttctgtatccccacccaccatggttttatgaaatgaccatgacttgtatcactttgagaaatcactgcctgcttgtctgtttcctttctaaggcaaagattgtatcaacctcaagggcaggagagcattatatacttttctgtatacttaactcactgattggcacataggaagtgcctgtgaatgtttgctgtgaatgtgaacctgcctccaccacctggcaaaaaaaccacttagccattccaagctattctgaggagtgagcaaggtgagtggctacctacccaatgacacctttcccatcatgaaattttaccatcaccaccaacctacaccccagtctctgcaattgcgccattagatatttagttctctgtacacaccacctttttttatctttccactcttgttttctgatccgggaaacacagtcctcaagaagacagaacctgaagtcagggtgcttctatgaacccaccagctttgccattctacctgggcaacctggtatcatttccatccttcactcatgaaatagggatcctcataatactcagcctcacaaggtggttgtgaggattaaggaaggtggtacttatgaagtgcttaaaatagtaagtggcacactgtaagtgccaactatgctaaagtatttgctattattgttgttgttgttcttattttctacccagtcctaccttcaccttccaaaccaagtttttcataacccttaaactcgtctttccctttcaggctttcctgctatttcttaccttgaacgtccttctctttcacctgttcattcttcatgatggagctcaagtctccttcataaaggcaccaaagaccactcctcaccgatttgtctcaccactggagcctgtgcatgcccagatcccagcatttcccacttgtggtttacagtccgtttctcctagtaagtccagagtgctgtgacttcagggacagtgtctatgcacctagcatagcttttctgaagtccttccctgggctaggcattgcggcagcttctgaggataccatgtagctcaagcatagtccctgccctcaagaagcagacaagaaactaacctgaaagtctatggtgatgataaatgtgatatcatatggtccctgccctcaagaagcagacaagaaactaatctcaaggtctatggtgatgataaatgtggcattgttcttggcaactacaaggaaatcagtgaaaaggggaggacagagagaagaaagcccagaaaaaggaaagaaagcaagaaaaagaaggagggaggaaagaaagaaagaagtgaattgaggccatggagttacttcagttgtcaaatgttccactggaatatatttacaactatgaaaaggaatcactttcactattccagacacatttttgctgattcctttagcacagtgtttcccaaagagtggccaccatgccccaggaggcatttgaccatagtgtgcagaaggatattttaaattgtaataattgcgtacttcaacgtgtgttagtactaagtttctagcctttcaaacctatcttttcatggatattattgctttgtttagagtgagtgtaaacaaattacaagtgagtaaaactgaggggttctgatttcatgtcttgcctagaaaagagcttctgaggagaaaaaaatctaggtctaccaccaagggaagggaagagctaaaagccaagatttcagaagccaagggcagacctttggctctcactctgcctgaccagcaccttcaaaacatctatgcacactcaacagttagaaaggggctcctcgtctgtttttggtcagcagacttcaaaagtctcaaatgctctcaattcatagatagagagatgaaagccaggaaaattaaatgttattaatatttcactagtttagactaaatccatctgtagaaaaggtagtctgaccaactgcgctttttaaataaactttgttactcccatcacagaacgtgttccacaaaatcagcttatgtgagtaattcttttccagccttaatctcaaacccccaaggaatctcatttggactcagcatttgtgtataagcaacagcagaacaaatggtgcaatagctcattaatatccttcttggcaggatatgccattaaaacatatacatcaagttatagtcatgataggatcacacctcattttaaacagtacatggggctctgctacctgcagggtgttagccctgggaaacaagcagcttccaaaaataaaaatgtctaacctgctcattatcttgcagataaatgactttgtgcatcttcctctttttctcatgcttacttttcccttgtattgtgccaggcttcctgtaccctgttattgtaggatattgtcctgacatgctacaacacaacgtagtatagtgaatattgacacaaccagagcaccatggcaaacacacacacacaagaagagcaaactgaagactttctctattgattcaggtagcagaacagcctgaggccaggcagtaacatatttgattaaccttcagtataccagagattcctaacaatcctcagctgagcattattgctgtagccaaagcaggaactcctctgaaccaaagaaggtctattgacatcatgctcaggtagtcggtcaggtagattgattgctcatccactcctaactcaggtggattgtccacatctggacgacctcatccctggtcactgtcaaagccactagttgagtgaagacaggcagttggtgtcattcaagactaaatgatcaccagactaaattaaattatgtgttcgtagcatccctaaatccccttctcagtacagaaattgtcttgcgtgttagacacaattttatttggaactggcaatgaatttttttcctggctctcacccttcaaccaattggttaactcctatttcttcttcagatttctgttcagaaaacacatcttcaggaaaatcacccctgactcacccaggctaagtcacaagcttttgttataaggtctcatcacaccatatgcctctctttcaaaaccagcacctgcagaaatgtaagtgtacattgatttatgtaagtatttgaattatgactgtttttgtatatgtccatgagctccctgaaggcaagtactttgtctgcttccgcctgtttcataactatcatgcctaacacacaataacctctcaattaatagccaagtttattagcaaaaaaaattgactgaaaaagtgaatgaacgaaaatgttgctaccaacataggcattataatgagatgatatcagtgatctgagctctgaacaaatttattcttctcttcctgggtacatacctgaattatattatttcccaatctccttagagttaaaatatagtgatgtgacttttgagacatgtgacttccaggtctggccctggaatctccaacatgtgcttcttcaagcccctttgcccttttggctagctgagattaaaatcaccatagcaatcttagaagcagatgttaaagatgacttagttctgtcagcctaggtccctcaatgagcacatggagcagaatcacccaacaacatattcagccatcttcagaactgttaaattgaacaagaaagaaatttctgataagtgtgagcctttatgtatatggaatttatttgttatatcagttagggttacttgaagtaatacaactcttcccagtgatcctcaactagaaaagaatttggagggcatgttagaatctcatgggaaaaggggcagttggaaaaatcttccgaagtataatcactgtcttatgtactttacaataaacgcagaaatttaaagacatatttgactagatgaaaggatttgtggaggtatggaacacacacattcacccacatgtgtggacatagaaggcagatacaacaaaaattacggttcatcaccaatagtggcagaggatgggtttcgagccacttcctttcaaaccaaccacaacgtcataagtgatcaccatcattctagttcctgtgaagaagagagagctgtggaaaaaatgctttatgccctcaaaagagacagcacaaaatttcagtttaaaaggcttgcctcctatgtgattcactagcaatgaaaccttggaaaaattatttcaaccctcttttccttcatttgttaaaagaaagtgtttaaatttgcaactcagcattgttttaatgttatatgattcaatttatataaagggtcttgtggagaggacataaaagtacatcaaggattatagccaaatgtttcttatgctggaacagagttaggtacaaagggttatagaaacatagcctgccaggttgaatagtaaagaggagggacagagaagacttgtagtaggaaataatccctgattccagggccaaatgtgggattcaaataatggaggccctagcaattccgaggtgatcaggtggactttcctggatgttctgggtcttgacctgattgctgaaaaatgaatacaaattcagagaagaagaaagctagtatgagactaccaaatgatcatcagacatttcttgaacaccaattaaattgctaggtatgctaaagtttgcaaaactggtatagacaccaagagggaggtatcaacagagactccccaagagctaagaggaaaccaccttggactggaagtcaagagccaaaattctagactctactctgtaattaactacctatttgaatttggaaaaatcaccatcaactttcccagcctcgttctctgcatctgggaaatgaaggcgtcgtccaaatgattacaagcttcttttcctgctcttattgcatgattccacttccacagccctccagcattttttagcagctgcatcgctccatagagcctgcagagggcactagactgggaattagaaaacctgatttcccttccagctccacctctgaccaattgcctgaccctggtcaaattgcttaacctcttcctatctcagctccctatccataaaacagagggacgaataaactctcctcctaccactaagaggtgtagccagagttaataccctcatcgtcctttgagctcagcagatgaaaggcactgagaaaagtacaaagaatttttatgtgctattgactttattttattttatgtgggggagggagccggccccagctggaaagctgctttctctgaatcaaagggcaggaacccagcaagtttctcaggattggggccttagactgggctgtgtatacagacagtgccagccaaccccacagttcagtttcctttaacctggtgctccaggcaataactgtgcaactctgcaatttaacaatgtgttctttgtcccacaactgttctcgtttctcaactgcccaggtaatatgtttgggcctgtaggaagagtcaaatagttaataagggaagggtttggcatgccctacgtaagttctaccagcaagtcccaacaagaaggcattctgtgtctcctgattcctgacctacccccaaaatgtacaaatgtacaaggaatgagcccactttcccagcaggctgtaataccagtttggcctatatcaatgcattggtgagctgtgttttgtttatggttttatgccatctattttcccatggatattatgttttctaaagagcccttaagtttacgtcagcttttaaagctaccagcagcaccatttcagttcatattaagcccttaatatggtatgaataggagagctattagactaaagagccataatcatccctgaggaaaacatccatcaccaacatttatgtggtccctgaacttctaaaaggtgtcatctctctggggtgtatctggtgagagctttctctgggagatgccaaaaagccaatgcattagatgaagcttagaagggcattttctaaccattacaaattgcctagtctagcatctcaatttcatctacgtgaagagccttaattaaatttgttggggtttgatcctttatccccagatgtggcgctgacagagattgcttacataaataatgtgtgctccaagtgcttgccaggctcctggctcagctgggacagctgtagctttttgaatgtcattcccaagatatcctgcaggtgttcagcttcccctgttctactctgggaagagagccgtgggcaacatcagcccagaagacactagtgcatcttgacagagcattcccactggacaggtgcactacctgcagacacctccaacagtgaaagcaccccccggctgcaagtattgtctcgccaaacggaaggcatttcttgtatgagtcttgaatctgatattctttaataagactttctctaaaactgtatacacacacgcacctgaaaacgttatcaggcttttacttatttgacagtaatattccaggaaatggtccaagtagcaaaatcttctctcagtggctttctcgttcctcatgtctgacttgctttcctgctgtctactggagccaacaagagaggcattctcactctggaagttgttagttcattacagcctaggttgatctcatctggctctggttgggggttttattctgaagattggctggtaaaagcctccacaaagtcttagctagaacattcatagccctgtgttgacttccgcctcaactctggcttgaacttagctgacggtcctatcagtttgctcaaaggagcttttttgctgcaggcaacagaaaggagtggaaagaacacactcattggaacccaggagatccaggctcgcctctggctctaggacttgctcatcatgtgatatcagatacatgacttcatcgctgagtctcagtttccttatctatgaaccggggatattcataccttcttcacaggacaagagaggcacatacaagttcatatctgtccctctatttcaagtgattctcccacatcagaaccagtttggcttccccggcctggtcttctttcaaaggatgcacaaggccatttacaactggcctgaggaacagaagaaaaactttggcaaagccgttgcagataaaacaaggatgagacacaaaagcaatttttattctttttctggttgaaatccaatcaaggagaagagtgctcctttgattctgtatgctattattatgcccaaagctgagaaactagtgtttgcccaacacattagagttcacgtgacgagcccatatctatgatggtgtttgatacccaggcttgattagtaagactaaaaaaattgccaccactgcacaagtgaggacagtaaacctcaaaggagtcaaataacagcctgaagtttatgtaggtggatcaaagaaacaaggctagtctatgaatccaaatctggggtgccttctcctcttttattgcctctcttgctcccattggcctgcgggcattcattatatacttcagtttgttaaatgttaggaagaaaatctaaaaagtaaattgctaacacaaagcaaacaaatgaaaattccaaattgatagcctgttttctaccacaaaaacgacattatgtcatataaaaagctgacaccacctgcattgctagttccctctatcaccccttctttctgaccctctctttagacataaaaagggctggtcatttttaaatgatcccatgatccctggactctttgacttctcaaggcttagactcgtgcttcctggaatgtccttcattcctctcaggctggtacattccaagtctcccttcagcacacagcctacatgtgaagaacatgatcgcagccctccagcaaggccgggtgaaaagaaccactgccttagaaccctgcagatgcaactttggtaagagcccttagtcctaggtttgggaccctgggaagattgctttacttttctgagaatcaagggaaaagtatactgtccctccagcagtgatggaagattaaacaagaacatatataacaacagcacagcattgctactcagtaccactcaagaattgctactctacttcccctccttcctgcttcctctgttctccagaaaaatcctatatgcccaccaattatagtgctaatcacaccgtattgcaatcatctgtgtccttttcactagactgctagtaagttcctcagtgacatgaaaacagacatttttatctccatgccccagaactcagctggacattcattaggcattcaatacatggtgaatgaagaagccatataagagcaggaagttatacagaaaatgtttccctttctttgcctaggaaaaaaagtatgttatctctgatttctttaaaccagctttgtctgaactttttgaacttcaggtggctttaaatgttggttctaactggacggctcaagccagcacggatatctccatcaggaatttcccatccacattccacaagcaactgtgtctgtgcacaaagttggagggtaaatatctgagtagagttcctccttcctggatctgccagcccagcatgcatatggctcaacagttcttaagctgggccaagaatccacacattataaaactgacatgaaaataggcactagccagatggaatggaaatcaagcagcagatctaagggaagcagggaatggaaccaaagaacagttctctgcctctcacccctttgtgtccatcttgtgaaaatctaagctcatttgagatcattagagggtgggtgaccacaaagccatgaattatttaccctctctttacatcagtttcctcatcaatgaaatgcaggaataatattctccataaaatagggatattatgtggtggcaatatcctcaccccatcaactatttatttggattaggctttccctgtgcagatccagccttgagtgacatctaccctaattgcaaaataactctgagaacatttcatgagtaccattaggcaccattgcctcctgcgtaaccccatgaataggaccattgcatcatgtcactgtttcttaccccactatgtggggctgttttcttctatcctaaaataagatgttgcaggataaagatgcaccctctatttagtgacggaaaaatgctgggattctttctaggacagcagcattccagggacaggggccttgaggaatagagggacttattataaactctagaatgccaatttcagaaaaggtgtgtggcataagtgtttctatggtttagaagaatacttggtgaattatggagtatgaattagaggagggagatggtggttgctgagagattaattaaaaagtttttctatagatcagaatgagagatgataggatcctgatttaggccactagcaaaagggggaaaaaggagagtgaaatatgtatactttgaatgtaaaagctgcatggtttggggaccaaatttacaaatgggaatacagtagaaagggaaaagaagcaaaatagcttatcttaacacaattaaatatattccaagcctcctttccctaagaagccaggataaactcacctatttgtgacaaatgttttgtcaagataatatttgttcaataagatttccttcttaagatattttatcatttaactcacccccagaagaacagaattaaatagtaaaagtgatttggtcattaaacaagagggttagactgatcacaccagctcttgaaagtcatttctgtagttaatcatataagaacgttgactccttagaatggttgaaatggtagtattccactcagaaaagcctaatctaatcctggagcaccaaggttacgaacctgaggccaaggttttaaattccaactcactcaggacgagtactttgtagagacttcatccctgacctaggtgggccatctccaaacagaacctttggacagttccgtggtcagcttttatcttgcattttagtaaaatagaaacagttgtcttatgtgtgtagcatttaaacattctagaaaaaaagaagaaaaaaactgggttcaaaagcagtggagttggtgtatagaaaaaaaaaaagcataaacctcaggattcctcataaattccataggattctcctaggtaataagaaagaaaaatgaaggagagggagattatcactggatatgtttggacacagggctttggaaagctgatcggattgatgtgtcagtcaggctcttagcaggcaataggagcacacccaaattagggctctttgaagggaaccactgcactctagcctgagcaacagagtgagatgaaagaaggaagggaagggaaggggaggggaggggagggggaaagggggaaggggaaggaagggaagggaaggaaggggaagggggaaagggggaaggggaaggaaggggacggggaaggggaagaggaaggggaagggaagggaagggaaaagaaaaggcactatttaccaagtgtgaacaggaccccaggaaatcttaagaatattgcagtaccccagggttcattatagatttatacatcaaggctagaaggggaaagtggatagagtatttactgaaacctggagtcaaagagggcccagtggagaaaggagcctagagctttggtcaaggttaccctgcagggagggagcatgtgagtcatctttccaactccactcacctactcccttcagtcttctgttagtgctcacccttgtctgaacccaggtagacatcagagacatgagaacctgttgatttagtccatacaggtcagtctcctggggaatagagcaaggtagaggagagtggaaatggcatcagagaactgaatggaagatacacagctcaaatgcgttcctgagaacccttacattctatgacatcctagttaatgtgcactgggttgtaccaaaagctgcgcctattcagcagcagttctcaggctgatgtgatggtagacatatgcagtgagattctcaaagaatgtttttggggtaattcaactgtaatagcagatttcagaattttgtttataatcctaatgaatggcaaagatcctctatgatttaaggggaattttgctttaacatccactactctacaacacatctgtggattggggctggccaggtagtattatactcattttccagatgaggaaacacagcaatctctttgcccatcttagttcacaaagctcagtgaaaacttgtccctgggttctgtgccatgaatgccaatggcctaggtctacttcttagcttgccttgggggaaataaattgaaaacaatgatttctctgaggagctacttgtaggaaactcatcagctttagtttcagatacttgaataagacgctagtgtctcattcagcaagtccatctatcatccaacatttttgtaaccctcccttctgcaagatactttgctagcaaatgagtggaaagaagaggtgaggagtgttaggatttggagacttggtaacagcatatcagataaaaatcttgtcctgcccagtgggaatttacagaaaaaagaaagaaaaaaaggaaagaaaagacaccatttaccaagtgaacaggacctcaggagaccttaagaatattgcagtaccccagggttcattatagatgtatacctcaaggctagaagggacaaatggagagaatattcactggaacctggagtcagagagccaggtagagaaggaactgagagctttggccaaggttaccctgaagggagggagcagttgattctaatggagaactaacccagaggctcatcaacaggagagtggaaaataaatggtgatatatccatataatgagtagtatacaacaataaagggaataaattactcaggcatgctgcaatatgggtaaatcttaaaaataaattaagccaatgaaaccagacccagatatatactgtataattcaatttccatgaaattcaagaccaagcaaactaatctctgttgatagaaattatattagttatctcttgatgtggagactgagttggaaggaccattgaggacacttccgggatggtggaaatgctttatatttttgactcagttgtggttgcatggatatatatatatatatggatatatatatatatggatatatatatatatatggatatatatatatatggatatatatatatatatggatatatatatatatggatatatatatatatatggatatatatatatatatatggatatatatatatatatatatatatacctgcaagagaaaaatcatcaagtggcatctataaaattggtgcaatgcatgtttataaattagatcctaacatttaaaaatagaacaggaaatgctacagtgaaacatgcatagtgattaaaatgctgtccttccagcagttttcttctccacatgagtaatgccctgagagccttatgcatgtgttttggggaactgaactacatggttgtaaagagcatgggctttgctgagtgacagatgtagctcaaattctagctctatcacttcttagatgtgtgaccttgaacaagtcatgtaacttctctgagcctgagtttcctccttggtaaaatctacctccaacatatagtgttgttgtgagaattaagtaataaaatgaacgaaagaacttagccaacttccgggaacattctatgctctcaataaatataggctactggttattatcattgttataaatgctgcttttctgccctctgctccactttacctgcagtgaggacaattcagagagagaaaaggagggtggacagagggaatggatagtatctgtgaattttcttttcttttgcttttccagcagtttcttatagggcacgtttgaggctgactgcagtggaagatgtaacttactggacatcatagggacatggtgcatcctgtccctatgatgcaccatgcctggcctgcgggccttcttaatatgcagggcaatggccagtgctgctgtccccctgcacgcagacttgtcacagtggcactgtggggctctgctggactcatcagtggctccctcacccacagccttcacaactctgactggaattc

SEQ ID NO: 52 - DNA, 166639 bp, Homo sapiens
gaattccagggagaccaggaggattatagtctgggggagtatggaggatgtgctactgtgtggcaggtgctttgcaaactgcattaaaatagtcttgatattttcagaatctaacgggatcccatatactatgattctgaaattcacttgcgcttctttagattttgcatctacatgatgcatagtaacagttcttaatttggtttattcctagcttatctatggttgtcattatttcaagagcctagtaaagttgaaatcaattttagaactacaaaaaaaaaaaaaaaggaagagatgtgagtagggtctcactgtgttgcacgtaaatgcattgacatggaagatttaaaacacctgatgagttttattctgtttctttattctctattaaaggtagtactgtgcaacattccctaccctctatttttgacactgacgttgggcttattttgattgtctaagaggtcctgtgctacaagctggcagggcttgctgggatgaagtgacaagcaaagatttgctatatggtatagccaggggcagagacaggttttctgggggcatgagacttctacagtggggagacactattaagaaatagaatacaaaattatgactacaaaatgagaggccccaaagcttatgtttcattagcttcacagggagctcacttctgcccagagccaaggactgtggacatgacctggtaatggcatcaaatgattccctttattgcctcccctggggcagaaatggtggcagcaaagcaacttccaatcacaactatcttctttcatttgacacaggaaggggaagctccctctttaatctctaatagaaacattaaacagcaggccatcacaatttctagctaaagagttttcataggacctttgcaaaggttgcattcctcccttcccttgtggcagtatgcataatgtaccttttaggaatataaattcagtgtcttggaacacatgatttagaatcagtgttcagttaccaactatcaaataaaaaaataaatccagcatatgactaacggaaagaagtcaatctgaaatggttacatattatatgattccaactatatgacattttgggaaaggcaagactatggagacagtgaaaaggtcagtggttgccaggggttagaaggaagggagagatgaatcggggaagcacagaggatttttagggcagcaaaactgttctgtatgatactataatggttgatacatgtcattgtacatttgtcaaaacacatatgtcttggtccatttaggctgctctaagaaaatatcttagactgggtggcttataaacaacagcaattggtttcttacagttctgaagtccacgatgaaggcactggcagattcagtgtctggtgcaggcgatcctcttgctttaacttcactggtggaaggggcaaagcagctgtctagggcttcttacataaaggtattaatctcattcatgagggctctgccctcatgacctagtcacctctaaaaggtcccacctcttaaaaccatcacactgggctttaggtttagtggggatgaattttgtggggaacccaaataacagaccaaaattcactgggaattgttttggggagacataaacattcagaccacagaagcacagcacatacaacaccaagagtaaatgtttatgtaaactgcagatttttagtgatgtcacggagaaaaacttctcctcgactctcttaggtttagtgcttgggaaccagtaaattaaactaactaaagacaagttaacaagagaaaaagcacaagtttttattgatatttacatgcataggagttcatggaaaagaaatgaaattcaaagatgcaattagactcacaggggttatataccattttaacaaaggaaaggtttggggcttcaaatgatgctaaattgtggggaagtgactaggaaagatacagggaaacaaaggaaagataagggttattttactaaggtctgtttatgtaaacttgtctgactctcaatctccagtggtaagagtggctctcctcttcccagttcaggagagggagacaccttcacaagaggaaatgtatgccctgattttaatctgataagaagagggcagagaacccttcctacatttggttgttttcaattgccttcagctcaaaatggtccttacgtggaagtgacatatttttatggtggtggtatattctgatctctttcaataataattgtgtgtcaatgagtctcattgattataatagatataccgctctggtgcaggatttgatagtaagagaggttgtacttgcgtggaggcaggatgagtaggtgaatgaactttctatattctccactcaatttttgtttgaatttaatattgctctaaacataaaatctgttcaataaataaagtaaaaaacaaaacaataaaataaagtaaaaaaaacaaatctagactgaggtaagtagaagctttattggaaaagattattacagagggggaagggactccaactataaaacagcaagcttctcagagctcaggcagaaaaaggcttttcttttatacgaaggagagaacaaggctagaaagaaccagatgtaagtaagtgaggtggcctgattggatagtagatcagagaacgttttaccctcaggccagccgcttcctggaaggagccattgagaaggagctaaattctggctcgacttagaatgcatcagagttcaagagtctggggaaaagaaagaaccgtaaccaaaattttttcaggtcaggttaataggcattctgttctaatagatcactggggacaataaatttagctaatcatttatgaagccaagaacaggagtttggagcgtctgtatctggctttgtcataggtaaacaatgccggcaatccttgagcctcatctaactcatatcgggaagggtggtcctttggaataagctattctctgaaacagtttagtctaagtacaatgtatttcaccagcaaataccttgattgtgccttggaaggaaggggttggtgatggtaagtctggaaaaggccagacaaagagagggagaattctggtccctgaagagacatcccatatgctctcgggtgagattgtgagaaatgctggaagaatgaagtggatgactaccaagcccatcttatttcaatgtacatagataatacttcattttgcaaaaatgaaaagtatgggacaaatactaaatcagacagggcactgggataagaggcgcgaattaggatatgtagtcatttactgtactaatttgcatgaatagaaatgcagagagagctctataaaagaaaaatattttgtgtaatctattagtatagaaactcgtaattaatttactaagatataacgatttattcgtcatgttaggcaacgtattttcaatgtcatcttatggagaattgtaaagattttcttgtatgttaaaggtctttggtcaccatcattattcacacgattgttattcacctggttatcattattcctcatcattaaggacactagtaatcttttaaacctttctggctctttctggggaaaagggcaggcttaatacaggcattcctcattttagttagcttcactagcttcactttattgtgcctcacagatactatgtttttcacaaattgaaggtttgtggcaaccctgcctcaagcaaacctatcagcaccattcttccaacaacatgggctcatttcctgtttccacgtcacatttgggtaattctgacaatatttcaaaatgtattattattatagctgttatgatagtcagtgagcagtgatctttgatgttactcttgtacttgattggggaaccatgaaccacaaccatattaggcagcaagcttaattgataaatgttatgtgtagtctaaccgctcctccaaatggccattcccccatctctttctctctgctcaggcctccctattccctgagacacaaaaatatttaaattatgctaattaataacccaacaatagcctctaagtgttcaaataacaagaagagtcccacgtctctcactttaaatcaaaaccttggcataattaaggttactgaggagggcatatagaaagctgagacagaccaaaagctagacttcttatgcagaacagttaaccatgttgtgaatgcaaaagaaacgttcttgaaagaaataaaaaatagaagatgctaccctctataattctatgaaggttcagagaggtgaggaagctgcaaaggagaagttggaagctagcagaagttggttcatgagatttaaggaaataagccacctctataatataaaagtacaaggagaagcagcaagtgctgatgtagaaggtgcagcaagttatccagaagatgtagctaagatcattgatgaaggtggctacagtaagtaacagatttttaatgtagaccaaacaaccttatgttgaaagaagacaccatctaggactttcatacctatagaggagaagtcaatgcctggcttcaaagcttcaaaagataagctgactctcttgttaggggctattgtatctggtggctttaagtcaaagccaatgttcatttaccattctgaaaatcaaagagtccttcagaattatgctaaatctactctgcctgtgctctgtaagcagaacaaactggatagcagcacgtctgtttatagcatggcttactcaatcttttaagcccactgttgaaaattaatgctcagaaaaataagatttatttcaaaatattactgcttattgacaatgcacctagttgcccaagagctctgatggagttgtacaaggagattaatgttgttttcatgcctgctaatacaacattcattccaaagcctatggaccaatgagcaatttggaatttcaaatcttattatttaaaaaatacattttgtaaggctatagtttctatagatagtgattcctctgacggatctcagcaaagtacagaacaacatggctttgaactgtgctggtccacctatacatagatttttatctgcctctgccacccctgagacagcaaggcccacacctcctcctcctcagtctactcaacgtgaagatgatgaggatgaagacctttatgatgatccaccccacttaataaatagtaaatatatgttttcttccttatgattttcttaatacattttcttttctctagcttactttattctaaaaatccattatataatacatatgacataaaaaatatgttaattgacggtttatgttatccataaggcttctgttctacattaggccattagtttagtttttgggaagtcaaagttatatacaaattttcaactgtgcaggtggcccaaatccctaactcccacattactcaagggtccactgtaagttgaaaactcctggaaaggattcatcactgtagatattagggctttcatgattcatggggggaagtcaaaatttcaatattaacaggggtatgggagaagttgattccaacccttatcgatgactttgaagggttcaaagatttagtggtggaaggagctgcagatgtggtagaaatagcaagagaggcctggcgtggtagctcacgcctgtaatcccagcactttgggaggccaacgtggtggatcacaaggtcaggaaatcgagaccatcttggtcaacatggtgaaacctcatctttactaaaatacaaaaaattagccgggtatggtgacgcatgcctataatcccagctacttgggaggctgaggcaggggaatcgcttgaaaccaggaggtggaggttgcagtgagctgagatcacgccactgttctccagcctggccacagagcaagactccatccaaaaaaaaaaaaaaaaagaagaaagtaagaaagaaagagcaagagaactagaagtgggtcctgaagatgtgactgaattgctacaatctcatggtaaaacttgaatgaataaggagttgctttgtctgaatcagcaaagaaagtggttgcctgagatggaatctacttctggtgcacaggctttgaacattgttgaaataaagacaaaggatttagaatattgtacataaacttaattgataaagtggtagcagagttcaagaggattgactccaaatttgaaagaagttttattgtagataaaacgttaaatagcagcacattctacagagaaacctttcaggaaaggaagagtcaatttatgtggcaaacttcattgttgtcatattttcagaaattgccacagacacaccagctattagcaactaccaccctgttcagtcagcagccatcaacactgaggcaaaatcttccaccagcaaaatgaatatgagttgctgaagactcagacatctttagcattttttagcaataaagttttaactaagatagtacatttttaagacatatgctattgcacattttatacactacagtatagggtaaacataacttttatatgtattggaaacaaaaaaaatttatatgactcactttattgtaatattggctttaccgtggtgatctggacacagaatccacagtatctctgaggaatgcctgtagtttgaatatgagtgatgcaaagaaggatttttagctattgtagtatctctggatgtatttcccacaatctttttgggttatagttgctcttgtatctgttttgcctttcccaatagtgattgcacttagcagaatttgtgctaggaaacattgttattgttattgatacaaaagtaattttctgtaaagaatagatcattttgtctgattcattattttagtggctctctgaaaagtatttttcttcatttcacttctgaaacagaatctagaaaaaaaaaataccatcagctgagacatttagaaacatctgtactttcacacaatgcatagacaacaaacccttacagaattatttttaggaactctattgaaattagatattttctaaaagtatttgctaaaagagaaatgcattttagcttacatcatattgtttaattttaaatctatcatattgtgacaataacaagaataaaaacaatttcaccctcagtgtaaaacttacagattttgttgccgagaaacttcaaaacatacctctgaatagtaagaagtgtagtaaaatttaaatgaaatgttgggccaaatatagaatgattgaaaaatcacccttgaattataaaaatttgtgctcatcttgtgaatactttaaatgtcttgctcatggtaaggacttcgtgctatctttgtacaattaacatatagggcaaatttcaataccaatgacagtagatgtaatttcacatatcaagtagtttccctaataatttaggacttttttcactgacttcttgtcatatatgattctgtcattacttttttatatagctcaaaatatggctgatggagtgcttgtgcccttccatggttttttcatttggtatcactagtattatatttatttattctttttttccaggacatttgcaagacattcgtcaagttttgaggtttatttaaggtataactagataatgtattatgtaaatcagcctaaccagcacgcataaactaaaccatgtcacaggatgccaatagtgacagacggagtgctgatgcctctggaaatctcttcacattgtggagtttctcctcttctcttgggatatcttctctattttctgtgacagatgcctatttgctagatcaactgagagcatcagtgcctataggtaatgaaatacaaataaaactcaatttgtgttatggtctgaatgtttatattcctccaaaattcatatgtcgaaatccggtccccagtgtgttggtattaagagtcgaggcttttgggaagtgacagggtcatgagagtggagcacttgtgaacaggattagtggtcttatgaaagatggagcgtctgtttttcccttcccccatgggagtgggaaaatacggatagaagccactatccatggggaacaagcctccaccaaaaactgaatctgctggcaccttgatcttggacttcccagcctccagaacgctgaacaacacatttctgttgtttgtaaattacctaatctaagacagcagcctgagtggactaggacaattggtttcttttttgtttaggtagcaataactagaaacagaatttctacagaggcaacacacacaaaaataggtgtgattttatcaaattaaaatacttctgcacagtaaaagaaacaattaccaaagtggaaaaaaaataacctatggggtgggagaaaatatttgtaaaccatgtatatgataaagcgttaatatccaaaatgtatgagaaattcctccaagtcaatagcaaacaaaccaatagaaaaccagaagcaaaagaaaaaagaaaataagttaaccaatttgaaaaatagacaaagaaactgaatagacatctctcgaaagaagacatacaaatggtcaacagatatctgaaaaagtgtggatatcactaatcaggaaaatgcaagttaatatcacaagataccacctcacagctgttaggataactattagcaaaaaaaacaaaagcggccccttgctttgtgtctgccagaatccattatggctgccactatagttctccaggagtctggatagcagtcccggctgggaatgtctggagtctgcaggccccagtcactatggacagtttttccttcagtattggggttctaagaggcagaaattagaaataggaatgcagatggttgcagagtgtggttgggggttagagcggcgccctggaaaaaaaaaaaaaaaaaagatgagtgttggaaatgatgtgcagaaaagggaaccccagtatattattagtggaaatgtaaattggtgcagcctctatgaaataatgtatatttcaatacataataatgtatattccaaaattgtttttatagagtagattttagatgttctcaccacaaataaatgataagtatgtgaaatgatgcatgtgttagcctgttttaatcattccacaatgtacacaagtataacatttacattataccacataaatatatactctatatatatactatatatatatatactactgtttgtccatttaagtaattttttacaaataattgttctaaataataagattatcttataaaggagacagtaggtttgttttgctccagatggtagagttaatccctgaagctagaagatgcttagggtgaagtttgtgctcaaaatatttttctaaaaatagagcagactgcctcaaaggtgaggtatgttgcagaaaaaagtcactgtaaggtatgtgtgggatgctgtttggggataatcagggactcaggatagggaactaaggagtttaggttgtctgctgtatagaggaaactagaggagatagtttattcagccatcattaattcattcattcagtaaacattactgaacacctgtgtgccaggtgctgtgattgacactggagatttaaagttgaataatatctagtcactggggccctgatgtcaaggcacatgctctagtggaagagaggcacacgtagctaagagtgtgtggaaagtgttatgaggaaagtatgttcaggatagtgtagaggctgaggaagaggattcccatctcacctgctgcgggcaaagaaaggtggatggtattcattagggattatcacaggagggatcaactgaactaatccttaaaatataatacagtaggagccagcccacaaaatgctaatagaggcagtggggagggtggtggaaaaaaaaaataggtatgagtcaaaggagagaattccagacagatgaaagctgtaaaaatagtttagttttactgtaaaaaggtcaaagccagaagtaaggggctgcaaagtccatttaagctgagaactttattacagctcctgttccaagcccatgctctgtgcgactgcagatgggatattctaataccacttgtggaaatcaatctttttggacaaagaccaagagagacccatgttgtgattcactctctatggcaacccaaaaggaagggtgaatgcctgcagatgagagttgcctcttcatgccagccacttaataggctatggaaaagggaagagcagtccccatggtgggcctaataggaatcataatctaactgattatcacagcagtgactctttcaaatctggcctaactgaagctagcaccacaccaggatctctgctgggcacacaccaatcacccaggaggtcagtatcatccccattttacagatttgaaagctgaggcacaaggtaaataacagttatgcagaagtcttgcttcagtgtctaacttcctcatctcactttattctgtttttcaataggagaagagatataatctcatgatgaaaagtgccatctaaagtggcaccttagacacagtaagcaaactggattggaagtgaagaagtcagtctcaagatacttgacaatgtctcctatttgtagattgtttagcaaaatgctttcacctgagttatttcatttgttgctcacaaccaatctgtctggtaggaaaggcagatgatatgttcacctccagataagaaaaatgaaattcagagaggccaaggggcttgctcaagattccacagtgaagaatctacttgcaggaattttaacaaaggttttcaaattcagaagtccacaggatgactgcccttgaaatccagtggtaacatataataaggtgtctttgagcaggtaagagaggaccaaccttttctaaagcctttctcctcttgctctctgtgcgccaacctgagcagcctcctgagagattctggaacatgctagaatttttcttgctttagggccacagttcatgtcactccttcttcctggaatgttcttcacaagcactgtgtggctccttcttatccttcaaatatctgctgaaatgttcccttcttagaaaggacttgctgaccaccctgatggaagtgccctctccagctcacctctttactgactctgtttttattccttttgcaagcacattttataatctatatgtagtgtttaatgcaacagtttgctaaggactgaaatttgcattcctccagcaatcaaaacccactgcgatggtttgtggaggtgggacttttagggggtaattaggtttagatgaggttgtgagggtggggcccctcataatggaattagtgttcttataagaagagacagagagaacgaagctctctctctttgtgtgtgtgtgtctctctctctctaagacatgggaggacacaatgagaagacaactgtctacaagccaggaaaagggacgtcaccaggaaccgagcctgctgacatcttgatcttagactttccaacctcccaaactgttagaaatcattatctgttgtttaagccacccagactgtgatattttgccatgatgcctgaactgactaatatacagtttacctgtacattgtttgttcctctagattataagctctccaaggcagggaccatatagttctttaaaagataatgtcatggctataagtttactgctatttccccatcacatgggaaaaagaattgtcagagttgtcagccattagagtttatttaccttaagggtgtctgacgaaatgatctgattatctccttaacttcctaaatagctcaaacttcataatgtttgaatttggaaatatctgttgattcaagagagacagattacatggtctctcttgaactttggacatctcttccacaaacttccaaatattaggccatctattaccagaccttctgaacttaaacaaatcttactttcaaccccactttagccaccttcaccatggcctaacttttgcccttgttatttgttatccatagttttctaaacttagaatccttaatcactggcattatagttgtttacttcaacctccaacacttacaggtccctcaaatcctcatttattcaacccttgttttttgtcatcttataaactgcaaattcttgaaaatcacatgtcctctctataaatcagatcccttcatatcatgttttcaatctgagtttggctccatgattaatcttccaaatcaaaggtttacaaactgtggcctgtggaataaatctggtctgcacctgttttagtaaataaagttttactggaacacagtcatactcatccatttacatattttttatatccattttcatgttacaatggcacaggtgactagtggcaacagaatctgtgtggctcacaaagcctagaacattttctatctgtcctttatagaaagaagttaccaacccctaatcaaaatcaataatctatgaagtagaaagtaaaagatgatcttttggtgctgacatgaacatattatgattaaaaaaacactttattgaggtttgattagcatacagaagctgtacataacacatacaacttgaagggtttggtgatcagtatgcaatcatgaaaccatcactatgatgaatgtcataaacatatccatcacccccaaaggtttcctctgccttatttatttatctatttataagaatacttaacataagatttgctaccctcttagcaaatttagcaactctttgagtatgcaatataatatagttaactatagacactatgctgcacatagatttctaggacttatttaacttgcgtagcaaaaactttgttctctttgcccaatacctccctgtttccccctccttcatcccctggtaaccatcattctactgtctgcttctatgagtttgactgttttagatttctcatatgagtgggatcatttagtatttgtccttcgatgtctggcttatttcacttagcataatgttcaccaggtttatcaatgttgttgcaaatgacaagattcctttttttattattaaggctagataatattccattgcaaatatataccacattttctttgtctattcatctgtagatgaacattcaggttgctttcatgtcttgggtattgcgagtaatgttgcaatggacatagaagaacaggtatctctttgacatactaatttcatgcctttgggtaaatacccagaagtgaaattactaaatcacatggtagttctattttttggtttttgaggagcctccatacagttttccataatggctgtactaatttacattctcaccaacagtgtaaaaaggttcctttttctccacttcttcaccaacatttaaatttcatctttttgataatagccattctgacagatctgaggtgatatttaattgtggtttcaatttgcatttccccaatgattagtgatagggatattgggctttgttattaataacccactggccatttatgtgtcttcttttgagaaatatctgttcaagtcatttgactatttttaatgtaatcacttgttttcttattattgagttgtttaatttctctctgtattttggatattagagccccttaacagatgtattatttgcacatatttttctcttaacctatgggttgtctctttattttgtaaattgtttcctttgctgtgcgtaagctttttagtttgatgcaatacaataactaatagattaatggtctctttttgtttttgttgcctgtgcttttagggtcatggtcaaaaaaatctttgtccagatcagtgtgtggagctttcctcttacgttttttatttctaatagttttatagtttcagatcttatatttaagtcttcaacccactttgagttgattcttgtatatgggatgtgatgtgttcaatttcattcttcttcatgaggacatccagttttttcaacaccatttgttgagaattcaataaagttgcagtatataaaatcaacgtaaaaaatcagtaggtttttcatacactgacaatgaactatctggaaaagaaattaagaaaataatcccattttaataccatagcaaaatacttagtggtaaatttaaccaagcaagaatatggaaatatctatattctaaaaactataaaacattgatcaaagaaattgaagattacacaaataaatggaaatatgtctcatatccataagttgaaaaccgatattgttgaaatgtccatactaaatgtgatctaaagagtccatgtgatttctataaaaaatccaacgtcatcttttatcgaaattgaaaaaaaaatgctaaaatttatatggaaccagagaagacctgaataaacaaagcaatcttgagccataagaacaaagttggaggcatcacactacctgatttcaaaatatattgcaaaactatagtaatcaaaatggcatagtactggtgaacaaacagatacaaaaaccaatggaataggatagagagcccaggaataaatccacaaattaaaaaccaactgatttttgacaaagatgccaagaatggggaagggagagtttctttcattatttattctctgtattcttttcatctcaggaaaaatatccagtttcctcaattgtatatccattcactcacccgataatttcttcattcacttatttgtttattcatttaatctcaattgtttgttcattctgtaaatattcagatttctttttatgcattttctcagaattggaagcataatactgaacaaaataactataaatctcagcctcccactcccatatttacagtttgattagggaggcacatttagatatgcagtgataattgctttgcttagagaaattcaaggtgatagaatgcatggtgacacctaacccagactggtagagaaagggaattcttccactgggaatgacatgattatctaaataagtaggctcaatcaggtcaggaaagggcctgaaagactatttcaagcagagggaaggtatttgccaaggccagggtgtgtagtggagagaatgggcagtggcagagaattatgaagtgttccaatgactaaaagtaaagtaacaagttccttgtccaagagcttggattgtatcctaactgaaatgagtatacactaagtgtttgaagaagagggatgaaatggtcaagttttcattacacaaaaataacctgttcctttcattttatgtttatttatttttttaattttctgactgctcctttctggaaatctcaaatttatatttgccaaatattgtcacattttcgatggagaatacaaactaagaatgggttagggaactgagtcagaaagtccctgttgtacaattcaatcatgtttttctaaggatgtgcttttggacattatggaaactatcttaggctctcacttggatcctagaaaagaaggcacctgttaaaaggaatgtccagccccacctaatttggcagctgcccctccaagctaatgacattagggatgtagtggattcaagaggctgatgatgccatctggtcaactcatgtgactatttctatcagctttatttctgcaacatcctgtgcccacagaggggacacaaaatcgctttataattccttcaccatgtgaagatacagatacacccagaaccttaaaggcaagaatatgattgaaatgtcaaatggggacttggtgatctaaattatgtcccccaaaagccaatgtcttgccaccaccagtgccctatgggtggagtttctaaacagattactcaaaacacaaactttcaaaaagggaaagtcataaccctctagtcatcagggcaattacggaataacattgctggagtaaggttttctcaatgcccaagagatgagctggcaatgccacaacaatgtccaattcttagtgggtccaagaccatgtgttacatttccctcccatgattactcacagcttcacagttctgctgtcctcttcgcctctctgccacctcttaactgcacctttgacctcctacccctaagattcaaccctgtgagattacttgtcttttcatctacactctggtcactctgacccccattctttagattcaggattttctcttttcctggcttactctccagcacaagtagaaaaatattgtgcttcattggaaaatgcatgttgtttgaatcacactctttcagattatacaattgtagtctttcattatctttgagccattttataatgctgtaaactaatattaatgcatataattcttgtctatagacatgtaaattgtgtccaggggtgatttaattgacttttcttccccattgtggaaaaggctagtagttttgcctccatttgcccatttatttctatattcctgatctgtaaatgcatttctgggttttcccttggactcattctaacatctcttctttttcctcattaattaattaaattaaatctttaacacctcttcatatttttgtcagtatgagagtataaaaaaaaatctttttttgaaaattatcttttaataggtgacaaaaagaataaacactgaacaagaagtcctgagctcctactacaatccaaagtgaactagttgcagtgccataggatgatgtttctcctgagacttctttactaggatcatttagactgttataaatgcagattcctgggcctctccttagacccactgaatcagacactctaagaggagggtcagaaatctccatcttagcaagttaatgtccaggagagttagagactcactatgacgtatgataaaaagtagaaggaaggactttccagcaccttaaactacttggaaagatagattaatgtctagatgaaacttgatgagactttagactaatatgttacatatacatcaggagatgcatgtataaaccaaatccaaataacccaaagcaaaatttcttttagaaatagtgataaataaatgagtgaggagtttgtcactcacatcccccaggtaaaacatacctttttagcctaaataaatgctatagtttgaatgtgttccctccaaaattcaggtactgatagttaacagcagccgatatgatggtattacacaaaatagtaggttctttaggaggttgttaggccatgagtgcctcccccaagaatgggatgaaggacctcataaaagaggcttctcacagcattgtgacctctagccctcccaccttccataagtgaggacacagtgttcctcccctctggaggatgcagcaacaaagtgtcatcttggaagcagaggagccatcaccagacaacagaaccagccaacagcttgatcctggacatctcattttctccagaactgggataaaataaattcctgttttttaataaatttcccaatttcaggtattttgtgatagcagcaaaaacagactaagacaactagtatgaaaatatacattaacaaataaaattaatcataatatatgtttgcttttaaaagaaaataaataagccaatatgctttctgttgattgattgatttactaaacattgattggccatctccactggggatatggcatttaagagatctctttgatcttagtacttttactgctttttaaataggatcaaatacacccaaggtaaaaaatagaacacactatacgttacattttggaactgttagaaattcctttgaagctaaaattactgctatcatttgacaacttttacccctaaaataatgtggtgctcaccagcttgcttaagttacagcacttgctgtcttctcagatacaatatcagaaacttataatccaagaaaaatctaaatggcaagtgtgagttaatggaagcctcataaagcaagaggtgttttggaagtgtatggaagacatcaataaatgatatgtataacatcaagtgcaaaagtgtgtgctaggaaagttcaaaaaagaaaaaaaatatggtaaggtaagaccagagattggggagtatatagcttttgggaattcaggaaatgctaacgtctatggagaatttgcataggtgaaagatcagattggaagcctttctctgtggaagcattgtggatctaagtccagaagtgatcctgagccacctactatggaaaggtgtcagtgagcaagagactgtctgacaaaggtggaagctgagcagacttctactgcgcatcgcctatgtacaggccagattccaagggctgatattacactgctagtttgatctttctcagatagctgggtagagagggaaaagtttcaccccaaataccagatgcctccaaacatctagatgcttggtgttatgtatttcaaacagcaggtttgataaagctgtttttactctccagttggatgttggttgtcaaggctgtcattaacttctgggagttcccaaatcctcagagagagagaaataagcagttctgcctgcaatcagaagctggctttgagccccacatggcaacatgcctgtatttaattagaagtggcttagttcttgggatttactgtggattgagtctacgaagctggaaggttttatcctgagtattccactgtctcctcatgtggattttatcaaatttctcctttaaccatataagcgctttcaaagttgacatatcacacttagttatgaggggaacctagaagtatgattgtgacgtgcattgttgagagaccatgctttgtaagtgttaataattaaaattattttgaacactaattatgctgaagactggattttctactccttcagatgttttccagtggacatattttgcccttttaataaattgattgcgaacttatcttcatttcacctttatgatgttataccttttcatttttgtcttctcatagctagggtctcctggtccccaaatgtagacacacatcttacaccaatcccagagccattttgtataagagccaccatggatttaaccagctttagctccagtatttgaacataatgttcagcatcatcacctggccaccaaatcaaaactgagcaccctttaatccatcaacaagttctctgcagccatgcaaggttatgaaatgggcacagacatcaatatacagtctttgtgtttaagaggttcatggtctacctgagaaatgcatctttaaacctaaagtagacgctctgtttattccataaatgatttttaagcatcaatggtatatcaagcactgtactggcttctgggctataataaatatataaagaccacaagtttgaatttcatgacattgaactataatgtttaaatgttataataatcatagtaaatgtccttgaggagctacggaagattcctgcatgaagcagaaacaagaagctgaagaaaaaacaactggctttgggggctatataaatataaccctcaaattaaaaactcaatagtttgattgattaccaaatcaatacagccagaaaataaatgtattaccccaaaagcttgagtgaagaaagacttctgtaagttactagaaagcgctaaggaagaaataaaagaatgatattcctgagagccaggtgctttctgtaggacacacagatacagaatgagggaaaacagaaaattctatggttgtggattcaaaatagaggcatcaccatgtctatctcatcagggtttaaccagaggaaaccaaaccagtaagatatctgtattaagagatttcttgcaaagaattgacctatgtgattgtgggcactggctaggtaaatcctaagtccacagagcaggcaggaagaaaacaggctgggacttgtaggcacaggatgaagctgcaatactcatgtggatgctgctcttcttcagggaagacttggctctgctctcaaggactttcaggtgattaaatcaggcccactcacattatctaaaataatctcccttactcaaaaccaagtgattatggactttaatcacatctataaaatatcattatagtaacacctaaattagtgtttgaataactgagagttgtaactgatatggtttggctatgtccccacccaaatctcatcttgaattatagttcttataatccccatgtgttgtgggaggaaccaggtggagataattgaatcataggggcagtttctcccattctgttctcatgatagtgagttagttctcaggagatctcatggttttataaagggcttccctctttgctccactttcattctccttcttcctgctgccatgtgaagaaggacatgtttgcttccccttctgccatgattgtaagtttcctgcggcctccccagccacgctgaactgtgagtcaattaaatctcttttctgtataaattacccagtcttgggcagttctttatagcagcatgagaatggactaatacagtaactttaccaagtggacacataaaactgatcattacaatgtacagtgaatatttggtgagttaatagatatattcataactgaatgaaagaggatggtgattcctacttcagggtggtattatgagagttaaaagggttagcatagatagaacacttttctatgattgatctaaggttggcttttagggactacattatacatatgggttttgtcttcatgtttttgcttgcatttctctctctgcccactcttggggctatttggatgtcacctcttcttcttctgagctccagtctatgtattccctgttccatcatcacaaccactgaagtctacactcctcattagattcagggaacccagatgccagccaaagacatccctttccctcatgacccagttgaaaaaattctccacccttctgttaattctagaatatttaggagtaaagatcttttccctcagatatctgtcaattcccggccttatatctcaaagccccttttcatccaggtttcctagatcatttcttgtcgtccctgtgctataactcattaacccaggcataaaactcatcagctactaatgtcctcttccatcccagactcccctcacaccaataattcttgaatagagcaacccaaattgagaattttaagtaaaattgaaggtaaatttaattgcaggaggacatacaacattaacctttaaatagagatcctaattcttaaaaaaaaaagtcctcattgatctcggggccgtttcacgcaggtgcttttctaaatcatcaaggttatcttcagcttcactttcagtctccttcttcggctctggcgctgccactggctcttcctgtgctaatgtggttgtggcagctgcaatggctgcaggggtcacagcagctgcagcagctgcagccacagccttttccttcttgtgttttttgtgcttcttgtgcttcttatcctttttgtgtttcctgtccttctttttcttctttttctttccatctccttcttgatctgaatttcttggcagtgatgggctcggtgttgggcttttggcctttttgaccggtacagctggtgaccagtttgtagacggtgactgagactggatgggggatggagatgctgggggctttttagctgctggctcaggagacccagagacagatcgggaggatgagaccctccttacagactgtgggcttggggaagcagcctttttttatctttttaggttccggagtcctggagactctcctaatgggcctagtacttggagacggggactgccttctttggggtgatgacgacgctcctcttcgaacgggtggaggacttgaggtctgaggagctcgaggccgtgatgagggcgaatgccatttgtttggatgcggtgatcgggcctcccgggtagagcggcttggggaagaccctttcctatgcttggatgatagtgaaggtgaacgtctcttggtgactggggagcttctttggaaggtggagaatgggagacccgccgctttggtggtggaaatggtgatgctcttcgtttaggagggggaggaggtgaagccgttcttctctttggaggtggagaaggagagtatctcctctgtattggaggagagtatcttctaggagaaggtgagcgccgacgtaggggaggagaaggagtccttcgtcgtggtggtggtggtgtgggagtcctgagccgtcgaggatgaggggcgggagaaggagaccgtcgccttctggtgggtggtggggatggacttctcctccgtctaccatgaggggaagtctctttttggtgctttcgtggtgatggagaagcactccgggaaggggaatgtctccgccgcttgccaacctcaccattcttcacatgggatctcttgggtcgttcatcttctgaggagaaggaggaaccagagtcagatgaagactgctggttttgtcgtctgtattggcgtctctgctgagatcaatgaggaaggcccaagtgtccccacagtcttagggggaaatgtttgttatgatgtaaattttatttggtttgtacgcagttcaatttcaaaattgctaaaatgtgtttgagctttagactataacatttgttgtaataattgctaggttgaagttcaacatgtaaaaaaagggggcatggatttacattgcaaaaggtgtccacagtgtattagtgacattctttcattgacagctgacataattcattgagtgaaatattttaagccaaaaaaaattccctttttaaaaaagggggtttaaatactgttgacacttttatggttcctttaaatgctctggctattcccagaggggtttttttgtttgtttttttggttttgatttgctttttgtttttctttcttcttcttacatttttttccatttgagtcttagctcccatttaagttatgcttctgaccttgtatggtctgtaagcttgcccagaaataagaccactgttttgaactaccacaaaagtataaatgaatattttaatgccacagtctttcctgttgcctgtggagtctctgctgaaatgaatcaggattcgagctctaggataagacagaaaatgaaagcatgttgtttgccaggacactgtgggtttatattgatgtgtaacaacttgatttggaacactggactctcattctgttcttctggttttgtttttttgttttgtttttttcttttgtaaaggccatgaactagtcccagaaaggattccttcagttacatacaatttgtttaatgaaatgtcatggctctgttcatatttttgtcttgttcttccaattggtgtatacaactttcagagcctcttgtatttggaaggctggaagggcccagactttggaatagtgtctcggtttcactgtttttgttttgattttttttttttattttttttaaactaaagctatataaagcttgtggattaaacagaataaatttctaaatttaaaaatttaaaaaaaaaaaagtctattgtcttccctcccctaccctaagcaatatgcaatagtggctcttcaatagtcccagactcttcttctcttcctggactgcccatctcctgatcaacccttaatttctcttccttctctcacccttcttttcaggattgaattaatgaatcctttcttctcactcatgcagagtaagtttctgcctccctgggtctttctgtttactgaccgcaacaacttcagattatacctcttctactccaagtgctttcaaagaaagtcctctgccaagacaaattcattacgttttttccctctacctgtttgcctttattctcttttgtatttcatcttctcatctagattgaataatctttgagagcacagatgtttatttatatttttcctttccatttctactcagcatgaggtgtccattgaacaaacttgatgaatttttattgcttaatatcttgctagaggtggggagagaggttgggggcggttaaggaactatcagctagcctaggagatattagagctgcagagatttggctatcttgttcaacgttatatccctagggattagtacataggcttgcaaatagcaggtatgaataaaaaattattgaatgagtaaatgaatttaaaatataagttacttaggcggtatcttcaggcatatctgtgtttatgtggtattcaatggcccacaaatgtctacatcctaattcctaagatctgtaaacattaatttgcatgacaaaagagactttacagatgtgattaaatgaaaggattttgacatgcagataatatcctgtattcttcatgtggaaccaatgtatttacaagggtccttataagtaaaacagagaagcaggaaaatgagggtcgcaaaaaaaaaaaaaaaaacaaacatgaagacagagaagaggttagagtgatgttggctttagagatggaaggagtcacaagctgtcttaaaggaataagacaagctgtcttaaaggaattgttataaaggaatagctgaagctgggtaatttattttaaaaaggtttattttgctcactattctcatgtctggaaaagtttaatattgggtagctgcatctggcaagggcctcaggctgtttccactcatgtcagaacgtaaaggggagctggtgtgtttagagatcacgtggggagagaggaagcaagagagagggaggaggggccaggctttttttaaacaaccagctctttttttaaaaaaaaattatactttaagttctggtatacatgtgcagaatgtgcaggtttgctacataggaatacacatgccatagtggtttgctgcacccattaacctgtcttctacattaggtatttctcctaatgctatcccttccttaacccccaaaccctgacaggccctggtgtgtgatgttcccctccctgtgtccatgtgttgtcattgttcatctcccacttatgaatgataacatgcagtgttgggttttctgtccttgtgatagtttgctgagaatgatgatttccagcttcatccatgtccctgcaaaggacatgaacttatcctttttatggttgcatagtattccatggtgtatatgtgccacattttctttatccactctatcattgatgggcatttgggttggttccaagtctttgctattatgaacagtgctgcagtaaacatacgtgtgcatgtgtctttgtagtacagtgatttataatcctttgggtatatacacagtaatggaattgctgagtcaaatggtatttctggttctagatccttgaggaattgcaacattgtcttccacaatggaacaaccagttctcttaagaataaaagtgagaactcacttccctggccccagagagagcaaaagcaattcatccccatcacccaaacacctcccattaggccctacctccaacattgggatcaaatttcaacatgaggtttttaggggacaaacatccaaactatgtcacaagacaattcatgtaagcagcctctaaaagatggaagaggcaaggaaacagattctcccctaaagcccacagaaggaaagcagccctgccaacttcttgattttaacccagtaagacccgttttggactttggacaccaagagctataagatgattatgttgttttaagccattaagcttgaggcaatttgttacagcagcaattggaaactaatacagatcacattctaattcaattagtattgttcccagttctctggacctcagatttctttcctgaaaaacattaaaaataatacctgaaagttttgcacacgagtgcagagtgcctatttactagagagatcagcatttgtttaggctctgaatagatttgaggatgaaattaaatagcataaataaagttcctagtgatgcttctgataaaaaaatatctccttcaaaatgccagaggcaggtcctaaaaacccacaaagcaggtgaactggcaaaagactgtaaaaagcaaagtagaggttcctcttcaaagactttcctctccatctaattaggaataaatagtaacttatcttagaaacaaaatttattcaaagacctgtgctaacattctgaaatatctgctagccgtaataaataaatcgatgtactttatgttcttagctcccacaatttaacctaaatatttgccctggcatgcttatactggtccaagcaagcattaggtcatagcctgttcctcttctttattttaaggtgtttttacctttgtcagcatgccacaagttacttcctccttcctttgttctcctctgcctttgactcttttaaagagtcctaagttgctagccaatcaggacaaatacagaatgtgaggtcccgtttcagccaatggaaagtggacacagcaggaaggtggatgggtcaggttataaatgaccctgtctcctttgttcggtgtactcttgtggcaaaactgctggcaagtgtaccctttctgcaataggtaaaaactgccttgctgaggaaattaaatttatgttcaagtgctatttctttatggcaccggggaacaagcatttctaacaagactatgtaatttaatttcaggaacctaaaaaagtgggatgaagaactgaggttgctaataaatctatacaacttataagtaaatatttaatttactaacatataataataaagacatcattgtaagacaatgttaaaacattttacacattttaaatgtgcaatagtaaatccttcactattcagggattatttggaatcccttgtcaccagaagctcttaaggaaataacttctacttcgttgcaaatatgttcttggcttagttgaggtaatgcaaatactagaatacttgtttgtttaacagcttattcttccctgaagctgttcctccagtccctgccagtgggatcttatgtctccaggagtacttaacacccctaatagccccatcttttaagcctccctgggacctgccctcgcagtacctcttatacctactccacttcctcctcatggcctcctgcagaatgccattctaaaattaggttctattttcctcgcccgcattctcttttgcaaagcctccaaaaaatttactttgcttctctgcgcctgctttatctctattttctacactcgctccttctttttctaattatctataataggcgtcacaaaatttgcatttgttggaaccaaaatttccatggttgcctcaaaatatacagatgtaaatttgcatataattaaattttgcataagggaaactctcatttggggagatatgcaatgcccaataaatggcagtttccttcaatgtccccaggccagcctcccagtctgtgtgtttccccctggctgcagctaccaggactctgctctggggatttacggacaagggtatcaagttttaattaaactaaccctctcaaactgaatgagtggcttaaaatcttcctgtaaagaaaccgcaaaataataatgctggcattgagaagtaagaaaagagcgagccagcacccccaccccccaaatcctgtgacaaggtgtatttttgtgttttgttttttttctttggcagcattatgggggaaaagcaatgatgatctaatgagatctgataagaagttagcccaaaacaaggaaattgttgagggttctctttgaagtatggatttatacccaccaaccttagctgcgaaccttacctcaagtgttacctgtgccttgagatgtttcctggtcatagtactaagctatcataatgagcaagacattcaataagcaagtgtgatggctatgaggacagatcttaacaggtttttttttctggaaggcttaaaatcatgcattactcaatctaatacttcacgaaatttcagtaaaacctaatgataatatagaagcttgtgttgtagttttgtaatcaacagcaaaacataaaatttaaaaaaaacatacattactggggctgtatcctgctacaataataaggctgacataatagatggagaacaatatggtaacaagccaaaatgtattacttcatccacaaatagtatcgtgctatatatagacagacttgttaaaaatttaaagaaatacacaatcaattacacaatagaaaatttgctatatggtgcatggtggcatgcaactacaaatgtttctaacatgtttctcttcataggattttctgaattttcatttaatattcaagcacatcaaaaacaccttttcaggtgtgatcctatacagcaaagctgtcctcacaaacaatagttgactaaataaacacatggctttatggaagaaatgtgtaagtatagccattgttggagcagatgctctgcttaaaaagaaaaaaaataagttaaagttatagatctcaccatgcttatttactgcttaagtcatagccaatttattgcaccaaagttgaagttcaaagcataaagaatactatatataatgcaattaatgaggttgatgtccctaaaacaagagagaattagtaaatgttttacaatagttttcatgagatgggaaatgacaatagaaatctttgttacaatgcagattttattgtggaaatgatctcatggcaaagtttttaaagaggctgcagaacaataaagagagataacacattttgcttttatgaaaaagccgatgttccaaatttgctgaccttctctgtaaataagaagtgactgtcagtagccagcagatgtgtttataaaaataacccacttgatctgtccctgcaaggtaagagtggcattttcaaagtgcatgagagaactgctctcaagagaaaatcatactgtaaagacagcatttcaaaaacatttatttggaaatatttaaatgatgtgatctatttatttatttggtcaaaaatgcccaacttgcctaacattattttattccttaaaacacagatcaagcaacagatcctacagttagactcttctgatcaccctgagagttagttacccctttctttggtttcttctctttaacgtcctgcatatatgctgccattgtgtttatagcacaatatcagagtgtgttatttatacgtgcatctccctcattagattgggagtttcttgatgtcagaacacagcaattgtcccaccagaataaaaagaatattgccaaaagatgctctataaatgtttggccattggtttaaaaaacaaataatggaccaatgggctcaaaagcaaactggctaatataaaaataataataacaaccacaataataaaataagggctaacacttaaacggttgtgtactcactatgtactaggcactgatcaaagtactttgtacatattttcttatttaatattcgctaccatcatattacaatatactgttattaaccccaatgtatagatgtaggtgaagaaacttgtcacaaatcatacagctagttgtctgagatgcaatccatgtgatttgttcacagagctcaggttctgtgaagcgggtaaaaacaaaatttggcatccagtttcaaaaggagaattgcaaactaatagaacatatagcacaaaatgattatatcaatagaatgctaattgcatatcaaggatatttggtataatacaaattattctaccttaaacatatggaaatttgtggtccatgatgttgtagattctatcttcccactctgcattttcaaaggcatatggtattgactcattcgattaattgttggatagtctttattatagactaaatcatagaataaatacatggatacatgcacgaatattatatctcaagggctttacatagttcattatctcacttcatagtcaaaacaaacctactgatagttccaatgcaaagcctagaacgctttggcttagagaggcccaagtcttttctcagtgctgcactgctggtacgtggcgtggtcccctctcttctctcagtacacactacccatgcagactatcactctcagtcttgtttatctcaaatacagagggtataactaactggaatgtatccagaacagtgaggccaaagtgtggggaagctccttaaccatgctgctgcatgaggaacagctggagagactgagaacatgaggcctaaagaggagactcagggagatgggatcacaatcttcaaatatttaaaagacatcaaggggaaaagagattaaacaaggtaatgtagctctagagagcaaatccaagagtgttgagtggaagtgaaagggaggctggtttcagtcagatagtaggaagaactttctagtatttggtactacaatgggaaagactattttgtgagatttttttaaatttttttttaattatactttaagttctagggtacatgtgcacaacgtgcaggtttgttacatacgtatacatgtgccatgttggtgtgctgtacccattaactcatcatttaacattaggtatatctcctaatgctatccctccccgctccccccaccccacaacaggccccggtgtgtgatgttccccttcctgtgtccaagtgttctcactgttcaattcccacctatgagtgagaacatgcggtgtttggttttttgtccttgcaatagtttgctgagaatgatggtttccagcttcatccatgttcctacaaaggacatgaactcatcattttttatggctgcatagtattccatggtgtatatgtgccacattttcttaatccagtctatcattgttggacatttgggttggttccaagtctttgctattgtgaatagtgcctcaataaacatacatgtgcatgtgtctttatagcagcatgacttaaaatcctttgggtatatacccagtaatgggatggctgggtcaaatggtatttctagttctagatccctgaggaataaatgaccaactattgagaaattgcagggtagtccctacatgagggttaggtagaattgacctgctttctgcctcataaattttagaaaattaataagataatttattacggggtggtgtttgttccctcagtactttatcatctatgttgataatgttaataattaattgcataattaacaaatagcaaattattgtgggggtgtgtgtgtgtgtgtgtgtgtgtgtttagacagggtcttgctgtgtcacccaggctggagtgcagtggcgtgatctcggctcactgcaacctgtgccttccaggttcaagccatcatcctgcctcagcctccctagtagctgggattacaggcgcctgccaccatgcccagctaatttttgtatttttaatagaaatgggatttcaccatgttggctaggctagtcttgaactcctgacatcaggtgatccatccgactcatttcccaaagtgctgggattacaggcatgggccatcatgcctggcccgcaaattgttgttatttataactcttcaatccaaatcatcagtgtctatgttgtttccttaactatcaaatgatgataataatagtaccttcttcataagatagttgaaaggtttttaatatccatatggtactgagaatgatgcctgaaacatagtaactaccccatttttattatatttctgttaataataatacataccattattgctcttgcataccatattgctcttgcataccatatatgctcttgctatatgctacacacagtatttcatttaggcctcactatgtccctgatgtaggcattaatatctttattttgcaaatgagaaaacagtctgtaccttgtatgccatgctgctattgtttatctgtttgaatctcaagcaaatctgcttgataattggtaccaaaataagcctttttctgggtaaggaatctgatattgtgttttaaaaaacacacatttaatcctggggctgctgcattactcctgctgccccatcctactgtgatcaaaggcacatacatgagatggtgagttgtccccttgccaatgagggtttggtaagaaaggaaagtgcagtacttctttgtttctgaattgcaagtatgtgtgggttagagggggaggctgaatatgaaggtcctgggacagcccaccaggtatcccatgagactttgcaaaggaaaaggaggtgagtgacagcccagggtccaataggatagaaggaaaagccaggccatggagttcctcagacctgctttctaagggcaactctaccacctcagcaagccattgaacttctctgagctcagtcctttcatttataaaatggggtgacagtgctcacatgccaggaatacaaagggattgaaagataaaacacgtaattaagcacctgttgttacacatctgtcagggaccccaataaggtcagctgtcttcctgttgacttctgttcttggtggttctccaagatcataccttccatcaacatttaccgtcactcccccaccccatgcccaatactgaacagtggagggacgcttcacctacagttataatgttgaaacttcaacccaaagcaagtactgttaggatctctggaaactttccctcaaataagggatttgaatgggacaagaagaagttttacagatagccaatggagatgatttaatggggttatgatagaaacgagaaagtaaaacaaacccatgctttaaagtctaccatttcaggtccatattttcgcttgaaaattgagattcctattaaacaatgacatttacaccaaaaagtagaggagttggttgaaggacagggtaatgccaggaggaattgggaatttgagagtcaagtcaaaggactgaaatactcagaatactaagggcacctcagggctctaccaaggacacgtagaagctttgaatttgcagcaccaccctaatttaacgagctacctcagcacgtagtggagccttggaaaacagatgtcacaaactctcattagattgtcaaacattttccagcatttcctctcccatcatagctggttatcaagatatatagacacacacgtgcatacacataaataccttgataagttactagagaaagcagaaaaatgtctgacagtttaatgagatttgggtgaaagaaaattctatatttcattgttttccaggcactagaaataattcatcaatgtttctaagactcattcagcgtggctgcattttttaaaatattttcataaattttgaggagcaaataccattattaggcactaaaaaggttgaagtctaatagattagccgcttcatcctccttcactcagctcagcattcgttcaactggctcttactggttaacatccacacgcctcctgactggctactcagtgccgatgacatttccttcacacacagggctggttttaagatacattgaggtgacatcaggtggcctgtaaagtggtcattttaggatatcctattcaaagacatctgtggaagtgtggaccaatttattgatgaataacagtgaaggggtttccaccagcaagtaacataattttttacaatgatgatgctgaagtagaaagagtttctagtcagggactggacaaatcaatttgcagacgatttttaggaagaaaaacattgcaacagtaaattgtaattgataacttctagagccactttaagtactgctattttaggattctgaggggaagaaagtgttctgcaaagcaataagcaaagtgatttgttccaagccccaaatttaagcagtttgagaggtaaaaagagtcattaccaatgtgggtatagaacatgtgctaggcaaatctctttcacatacatgtggggaggtaataaaattataatttgaggccgggcacggtggctcatgcctgtaatcccagcactttgggaggctgaggtgggtggatcacgagatcaagagattgagaccatcctggccaacatggtaaaacctcgtctctactaaaaatacaaaaaattagctgggcatggtggcacacacctgtagtcccagctgctcgggaggctgaggtgggagaatcacttgaacctgggaggcagaggttgcattgagttgaaatcacgccactgcactccagcctggtgacagagcaagactccatctcaaaaacaaacaaaaattatagtatgaaataggcattaaaatattgtgtattttagaggagactgaggattggaggctgaagaattactctaaattaatcagcttgtgtacttcagagctaagatagctctttgggttctaaattctgtgatcttctttttgatttctcttggagcaataatgaaggcaaaacatcaataaacataacaaactgggtaagggagaccattgagaaggactaaggacaccttcaaagttctgagtgagtttaaaaagaagaatgatgaaaactttgatagaaataggaaaaaaagtagaggaacttgtttggcttgaaacttcttaatgtttaggctaattatattgaagatgacagtggtcattgagaaaacaaaatccccaaagcaattttggaataagagccaacatttaatacttaccagacaactattctaagtattttactatattcactcatagcaactctaaaaagcaggtagtattaacagagaaaatgaggcacagtgaggttaaatagctggtccgaggctacacagctaatcagtgggagagttgggacttagacccagaggtccagttttgaagtccacacttttagccattacactacaatggaaagaaatttagaagatatacacagaaaactataggcacatagattaggggttagtagaatgctctgggcagttaaaggaactcttcttaaaggaggtaaagcttgaatgagactgttagtaagctatttttcactcattggtgaatgatgttttgtgcagtgtgtttttttccccatagaaaaataagaaagaaaagaaaattgagaactctctctataaaaatgtgtaacatatctcatattccaagagatccttttggtagtattaatttttatctgctcacagtactggcttcattatttggagttaaaaattaactcaaccagataaaaaaatcagtgctgtgtatttgtttatctttcaaatctgtgttctaattttaaaaagttatttaacagaacgaagctatcagctaagacaatggcaaagccgtaaacaaacataggttgcgtttatgcgaatggtcaggtccaaagtagatgcagaatatgccaggttcactaattttaatccctattcagcccaggactatgtaccataagattactgctagtgttttctgaaaatgatgtatcaaggcattttctgtagaaatacgaaacagtgacatacagtagggagagctggattgaggcagagtagtatagatggaagtttcctgaaagcattttggggaaacatcttttgggtatggttcttggatgaagagttgatttattagtactggaagggtgtatgggagagaggaagtgagaggttatgagagaatgaccctcccgtgatggtgagtgggagaattattgcagtatgtacgttagcattgctatgtggtgaagttcttgggatttcctggggtccgtgctggacagcatgcttagccaccagtcacatgtgggcactgagcactgacaatgtgggtagtctgaactgggatatgctgtaagtgtaaaatacaaactggactccaaagatttagtatgaaaaaaagaatttgaaatatctcattaatgatgtgtatttggtttcatattgaaaacaactttggtattatatattgagttaaataaaatgtcattaaaattaaattttacttaaactaaaatttaaaattctatctttacctttttttttttttttttttttttttgaggtgccgtttcactcttgttgtccaggcttgagtgcaatggtgcgatcttggctcaccacaacctccgtctcctgggttcaagcgattctcctgcctcagcctccctggtagctgggattgcaggcacgcaccaccacgcctggctaattttttatttttagtagagacagggtttctccatgttggtcaggctggtctcaaactcccaacctcaggtgatccgtccacctcggcctcccaaagggctgggattacaggtgtgagccaccgtgcctggcctatctttacctttttaaggtagtgactagcaactttaagattcatatgtggctcatgctgtatttctattatggaactgccttatgactttcaatgggtaggatggacacatccttggtgggatggagaaatctatcatagcagctggtcttgaaggtgggtggggatatgataataacttaggtggggaggctcaggaggactcacagaataactggcaaccctgcccctgtctgtaaaaaccccatcctggaggaaataagttaggaaaaggttttgcattttgtggaatgaaaagtctgttgcatctagcttgagacagagcaaaaagagttgattgtcagcttcatgaagaccagggggtctaaaagacccagggatcaacaaccaatgagagcagcatggaggccaagaaccaggcaaaatgctgattccaggactgggattcaggatgatttccttctatgcaataatctgctccttgaaagggtatctaattgggcattgcttttacttgctgctttcaattcttttatgttctttcctagtaaatattttttcttaatttcattgcagctcgtatttatcctgggaacagagagaaatgtttcacaagcttaagccagtcttttaaaaggagaatggcaggactccaaaaacagacatgctgatatgtactggggaatttttaagtgctgaaacctccaagacaaaagagactgtgtctttattgttctctgaattactcgtacccagctcggtacctggaacatgatagggatcccatagtggtttgatgaataaattagtgactccaagagtaaagtaatcctcaggaggacaaaggcagatagcttcccttccctatcagaatgtacttctcttaaagcttttcttggtataattcttggagaattttgccttacagaagtcaaatcacataccaaagtgaaaactggatcttctacaaataatggaagaatcaactctatcaaaacaacaattatacatatgatcaatggaggggttgtcacgagccaggctaagagctttacatatattatctcattctgtctatgccagagaatcaactatgacatatgtaacattaaatctcattttatagatgcaaaaactggggtgtaaagaagtcaaagaatcagccagaatgtacagaattagcaaaggtggaactgggatttgaattcagacagtctgactccagacgccatctccgaattatgcataattatatttcaattattaacattcataaattgaaatatgagggataatgtaccttttcatgaaagctttgctcgttgtgtggatgagtgtgtgtacatgtaactgcttatgtgtgctatcactgaggtagaagacatctctctctctctctctctctctctctctctgttttggtctacttttagtaagacttgtatttgattgagttcagaagtttgattatctttttaactaacctgtttgttttaattatattaaaaattagtcactttcaacatatttgcataggtaattgttagggtgatcttttggatgatcagatgtaatatactactactacacacagacacccagacacacacacacacacacacacacacacgcatgcagacacatccttgagctcaaagagctttctcaggactacatactttacatttacaacaagtcatttagaaaactatcaatcctattcaaatctcagcaaaacagagataccaggctctgcctttctctttaactgctctttttttgctgtagacaaagctgtttcttgcactgctacatatataaaaaagtgacaaatccttaactgtcaaacaagagaaatagtttgataaatataataattccataagatggcacattatacactactaaattgtaaggacagtaaagttactgttaagtaccaaaaagtcatgattaaatgttaagtgaaaaaatagaatatagctagatttgaatttgaatattcaatctgtataccagtatgtatagaaggaagagtatataccaaatagtaagagtatctatctgttttataatttgatataatacaaattattctaccttaaacatatgagaatttgtggtccatgatgttgtagattctatcttctcaccctgcatttccgaagacatatggtattggctcattagactatttgttgaatagtctttattctattatcatagaaaaaataaatgagtgcatatatccatatacaaaatagaggtctgttcttcctgtatatatttatactaaaaaaactgagacttttttttacagttgtatatatacaaacatatttgtttatttatatacacatatataaatcaattttatgtacatgtgggtatacatacatccatgcatataactctgaagtgctgactctctaaagaaagcccaggtattggtcagaattcatgctcggctcaggagtatagaattaagagatacaaacctcaaaaaagagggaaccgaatcttcaaatctgagccaccttacaagaatttttaaggtaactgttttaagtgtaaacattatggcaatgtaatagtataatttgtatggcacaagatggagtcctggtggccagaactgagtatgggaatagtcagtgctaatctttgtgcaaagcacaaaggaaaattggtatacaaggcctgagagagaggtcaaggaagcaaatactataaagtcccagaaggcagttggataggacaaggggatcggaagagcaggatcaagatcagagagcagggaagatggggctagctaatctagggaatggagggagaagggatacccagaagcaggattcagggggttagagcacttacaccatgctcatggccatgcccatggacaggagaagcatatgatgggtgcacatggtggagctggtctaaagaagagggggattcatatcacagtaaaattaagtgcaatttatccacagagcagaggaggttgtgaagagcaggcataggctatttttcatgtctgaatgctctcaagacctcttagtgttgtaggtagatgacgcacaataaatattccttgatttgaattggcataaaaggtcaaatcagaaagccagaagttctttaaggtttcaaactagattctaagaagtccaaaggcatctcagaggtcatctcagggagaaaaggggaagcaatgaggtagaactctgaacctccactctacctaaacaaggcagccctgctgtgctccgagtcatgtatggcgacatcagggaagatgtaaaataggattgtgataggaaacagcatttgaaagccattgctttacgaagggaagcgtagaacccttttccccttgttagccaattcaaatgaagacttttgggagctagtgaagagaaagacaggatttctagggagatgtttcagaagcagcctaactatacccgtgtcttcagaaagagcagtgtcgtctcagaagtaatcaccttcatcaaccagcaggtcagtgtgggtctcctgaagagcccgaacaaccacgggaagcgacatccactgttgtgcagtcaaaagaatctttgctctcattttctccactctctttccttcccaaatagggtatcataggaagatcctgcctttcttccagttccaacatttatgaagtgaaatttccatcagacagttgcttttgacaaacaaagattgactagaagcttctgtgagagagccttaggaagttctctggggaagccctgcctttgtttggttttctttgcctttggctctgtgatgtttgctgtaaaaaatgattactttcaggtgattaaaagtggggaagaatggtttcaagcttttcatgtagcaaataatatccctgtctgtaggattactttagttgaaaaaaaaacatggcttcagtgatgccttctcaatgtacaagattcagaggaatggaaagaaaatgaaataaggccggcctcggtggctcacacctgtaatcccgggaagccgaggcgggtggatcacgaggtcaggagttcaagaccagcctggccaagatggtgaaaccccatctctactaaaaatacaaaaattagccaggcatggtggcaggcgcctatactcccagctactcaggaggctaaggcagagaattgcttgaaccccggaggcggaggttgcagtgagccaagatcatgccactgcagtccagcctgggcgacagagcaagactccatctcaaaaacaaaacaaaacaaaacaaaggaaaagaaatctgcagttaatattttggcaagctttcttcacttgtatgcatttttaaaatgctaatgttaataacagttcgggacttctaacttctatatttaagcaacaaataaataaattgtcagatggtacttcatcatccttctctcccatcttcttagaaatataaattgctttaggtgggaatgctataattttagaccagaaaatacatgccagatgtctcttatatgaagccgtcccgcccaaggatatatatatgccttagtcattaggatgtgttctaaataatactgcaaagcccttggaaggatgggtctgaacactcacttatatttaactgctggcatgttgctttgtccctgtgtcttgtgctactatttccattgatgtaaaggaagcaccaattaaataacactccattattagagaaccaggcacaagtcagctgaggcaggagacccgccttcttttccagaaacaatgtaaagcctgggtgggtgagggtctctgggcttccgccgtgccttgcttttgacattctccagcacaccctataaacatgtctaaggctgtcctgtttagtctgattattcaaactatattgtccagggtagagcaaagggaaacctagctgaaccctggagatgacagcagggagagagagaggggcaaagaagggcaaaacgggaaaaacaggaaacaggctagtgagaagagtaaaaacgctcagggtgaggaagcagggtttctaagctctctaatctcccctgtgcagctggcttgctgtatggtttatacaaatccagtggtgatctctgtgcaacgtggtatcacctgtttaaagaggtctcatcttcattttcaaagaggaatacatgtttttttacttactcttctgcatggctgactccttttcatgctttaagtctcaatcttaatgccacctcctccttccagacgttcccagctaaagtggcacttcccagccccattactctctatgtttattgcctgcatagctcttatttgtaatgatttcgtaatagtttgatgatgatcatgatgaatattactttacctatttatggcctctcttttagtattaaattctgtaagccacatgagcatggggacacatctcctttgtcactgccccattgctggcatttagcacaagcatggtctataatagataccaaacaaatatgtattaatcatgtaaatgactaaatccatgaatgaatctatcagacagtgtagatagcagcacataaaggaaagggaatgtagtaaatttttcattttccttgaagatgtagctatgtattaggaatttgaaaaatacattatcaaacacaaagctaaattatgccagctaatgactactaaatataataaaatcggctgggcacggtggctcgcacctgtaatcccagcactttgggaggccgaggtgggtggatcacgaggtcaggagattgagaccatcctggcaaacatggtgaaacgctgtctctactaaaaatacaaaaaattagctgggcatggtagcaggcacctgtaatcccagctactcgggaggctgaggcaggagaatcgcttgaacccaggaggcagagcttgcagtgagcagagatcacaccactgcactccagcctgggcgacagagtgaacctctgtctcaaaaataaataaataaatataataaagtatgtagaaagtcagaaatcttggggattatattgcaaagaatttccactatattgataatggagaaaggcttttaatattatattttttgaatattaagaaattggcatctactcaccagtttggacatcgcttttaaaatacacactaaacgaaagccattttgtacttataagtgctagattaaattcctgcataggctgaaaaaggtctctttccatgcctttccaaatttacaattaacaaagagttaattattctcagagtcatttcttccaattcaccaattaggatgagggctatttgttacaatcataaaagaggaaatggtgcatgggcaagaagaaatttggaaaggaaatgtgattggaggaattatattgaaaggtgaaacaagggagaaaagataaagagaagaaaaattagaaattggaaacaaagttattccagcccctctctaataactactactctttggaacaagggaagcagtacctgacaagaaattttttttcttttattttttatttttattattatactttaagttttagggtacatgtgcacaatgtgcaggtttgttacatatgtatacatgtgccgtgctggtgtgctacacccattaactcgtcatttagcattagttatatctcccaatgctatccctcccccctccccccaccccacagcagtccccagagtgtgatgttccccttcctgtgtccatgtgttctcattgttcaattcccatctatgagtaagaacatgcagtgtttggttttttgtccttgggatagtttactgagaatgatgatttccaatttcatccatgtccctacaaaggacatgaactcatcattttttatggctgcatagtattccatggtgtatatgtgccacattttcttaatccagtctatcattgttggacatttgggttggttccaagtctttgctattgtgaatagtgccacaataaatatacgtgtgcatgtgtctttatagcagcatgatttatagtcctttgggtatatacccagtaatgggatgtctgggtcaaatgatatttctagttctagatccctgaggaatcaccacactgacttccacaatggttgaactagtttacagtcccaccaacagtgtaaaagtgtccctatttctccacagcctctccagcacctgttgtttcctgactttttaatgattgccattctaactggtgtgagatggtatctcattgtggttttgatttgcatttctctgatggccagtgatggtgagcattttttcatgtgtcttttggctgcaaaaatgtcttcttttgagaagtgtctgttcatatcctccgcccactttttgatggggttgtttgtttttttcttgtaaatttgtttgagttcattgtagattctggatattagccctttgtcagatgagtaggttgcgaaaattttctcccattttgtaggttgcctgttcactctgatggtagtttcttttgctgtgcagaagctctttagtttaattagatcccatttgtcaattttgtcttttgttgccattgcttttggtgttttagacatgaagtccttgcccatgcctatgtcctgaatggtaatgcctaggttttcttctagggttcttatggttttaggtctaacatttaagtctttaatccatcttgaattaatttttgtataaggtgtaaggaagggatccagtttcagctttctccatatggctagccagttttcccagcaccatttattaaatagggaatcctttccccattgcttgtttttctcaggtttgtcaaagatcagatagttgtagatatggggcgttatttctgagggctctgttctgttccattgatctatatctctgttttggtaccagtaccatgctgtttgggttactgtagccttgtagtatagtttgaagtcaggtaatgtgatgcctccagttttgttcttttggcttaggattgacttggcgatgcgggctcttttttggtgccatatgaactttaaagtagttttttccaattctgtgaagaaagtcattggtagcttgatggggatggcattgaatctataaattaccttgggcagtatggccattttcacgatattgattcttcctacccatgagcatggaatgttcttccatttgtttgtatcctcttttattttattgagcagtggtttgtagttctccttgaagaggtccttcacgtcccttgtaagttggattcctaagtattttattctctttgaagcaattgtgaatgggagttcactcatgatttggctctctgtctgttattggtgtataagaatgcttgtgatttttgtacattgattttgtatcctgagactttgctgaagttgcttatcagcttaaggagatactggcaaaaaccacatgattatctcaatagatgcagaaaaggccttgacaaaattcaacaacccttcatgccaaaaactctcaataaattaggtattgatgggacatatctcaaaataataagagctatctatgacaaacccacagccaatatcatactgaatgggcaaaaactggaagcattccctttgaaaactggcacaagacagggatgccctctcttaccactcctattcaacatcgtgttggaagttctggccagggcaattaggcaggagaaggaaataaagggtattcagttaggaaaagaggaagtcaaattgtccctgtttgcagacgacatgattgtatatctagaaaacctcattgtctgacaagaaattttatagtctgatgaaagggattctaaagagtcaggggccacaggtctcaggcttcgactggatgtgatcatgtctgaggcctttcgatcctcactttccttatctggaaaacaagaatagctgaatctccttctaagggcgtttgtgatatgaactgagatcttgcatatgactgcaccaagtctagctcaattcgcattagttccctccattatacccctccctcgagctttacccagactcagaagaaagccaggcaacatttctacttctctatatgcaaaaacaaaagcaaacaagtggaaaacctcacaaaaacagttaacttcaacatttgggcttacacaaacaattcaaaaatctctttttatttcatccgccatgattatagttatttttctaaagtgaatgattctacttcccaaatgcagtaaacccactgttaaagatagttaattttcctctagatgattgtggcccttgaaagtcatcaaggtcatatttttaattatttccccagaatttttcctgaaacagtgtccttttgtctaaatcaatccaagtaggttttagcattagtcataaagagggtgctgtcaacaaagaaatcaactgagtggaagtgatattataatgtaaataacttgacataggaatacataacactcataaatatttattgatttatttaataaattaaaaattaatgcttatgatatgtaaacaagatataacaaggcagtcaagaataactctctttagttcatatgattttttcccatacgtaactgaatagcaagaaaacaagtaacccagtttgaaaatggacaaaaaactgaaatagatatttctcaaaagaagacatacaaatggccaataggatattttttaaatgttactagtcatcaaggaaatgcaaatcaaaatgacaatgaactatcaccttacacttgttagaatggttactagcaaaaaaagacaagggataacaaggttggcaatgatgtagagaaaagggaatccttgtacattgttggagggaatgtaaattagtatagtcactatggaaaactgcatggaggagcttcaaaaaactgaaaataagcctaccatgtgatcctaatactgggtatatatccaaaggattggaaatcaatatgttgaagagatatctgcattcccatgttcgctgcagccttattcacaattgccaagtatgaaattggcttgagtgtccatcaacagatgaatggctatagaaaacatatacacagtggaatactattcagccttaaaaaagaaggcaatcctgtcatttgcaacaacatgatgaacctgtaggacattgtgctgagtaaaataagcctgtcacagaaagacaaatactgtataatctcatatgcagaatcttcaaaaagttgaacttataaaggtagagagtagagtgatgtttaccagagggtggggtggagaggggtggggtacagggaatgggagaatgttggtcaaagagtacaaagttttagttagacatgacaaataagttttcaatgctattgcacagtgtggtgaccataattaacaataatgtcttttatatctcaaaattgctgaaagaataggccttaaatgttttcagtatagaaaagtatatgagatgatgcctaatttaattagcttgatataatcattccacaatgtatacatatatgaaaacatcacattgtatcccataaatatatacaattattatttgttaattacaagtaaaagtttaaaaaatggcaagtaaatcatgtagcccctgagatagatggatatgtgagcctagcttgaaacaaatgtcatcatatatccaccattacacaagactttgagcagactgaatgctcacagaacatattgggaggagatatttggcagctgaagtggcaaatagtcattttccaagggaacaacaacagtagagaggtttccagttaaagttgcagagtttctgcagagtctctagcagtgctggatccaagggtatgcggtgtatccaagtagctcttgaggaaaccacaggcacatcctggcatggggagcacctcaggagcacatcctgagtttcagggcatttgaaatggatgtgcagtcacatcccacccaactgcaagggatacccagcctacatgcagaggtcaggaaagctgcccacattaagacattgcatgcaataggcccctccccactaggagtctatggagacagaaatgcattttgaggagcaatttcatgcagtcatgggttaagtgaaccaagtgagctatgaagccagattttccctcctgggccacatatttcagaggcacataactcaagcttgcaacacgtattcaaaagagaccagctacacttggtagagacagccataggaaagtgaaatgaccctagggtttagtaaagccagctgtttccacttctgaaaataataaaatgaaataataaaataaatttaaaatgatacaaagttcaaagtttaacaaatacatttgaagccatttgcaacaaatacatctgaagctaattgctggctctagaaagtgtggggtctttgttgtggagcagtgttaatgatttagcattacttatctctggcaaatggtatttttgagataacatgttatggaagaaagtgaactgaacttggaagtttgaagatctcgattgaagtatcatttctgcctcaactacttgcattaacttgtacaagtcattcaaccgctctgaacataatggaaaaatgggatgagaatacatgttgtatactctccaaagacagggagactgctgatataagagggcacttttagtaactgatggagcaaaatgttgttatatgagtgtcagcatagggccctgggcttacaacggtgccatgagccttagaacagaggaaggacagctatagcaatgaaaggactagtgcagattcagaaaaataagaagacagaaaccaaggtgtagtaacatgttttagtatggaggggaaggcagttatagaaacttgaattacataatttgtacatttctgggagatagaaggtaaagatagcagctaatggagacaggacaggactggtacttgattatggaagaaaggaggtaaatagaagagacaaaaagggagagaagagatgtcaactgcctactctggtagcctctgtatccaaaaggttgactcaaacattcgctcataactttgtctggcttaatcctgctcatcccagcagacttatttcaagtgtctccacgttttgggaagtcatcactcacttctctgggctttcatatgggagagcatttaattctgttgaaaaactatttaatactacatctacctttctctatggactctgagcttcttgagggcatgtatcatgtatgttctattctgaagcacccatacctagaacaaagcttagcacatagtaggaacttaataaatatttcggagttgaataactagccttatgtaatcctcacaacaaccctaagctggagactcaaacaaggctggaaataagtaggtgccaagaagaactgagattcagacacatatttgcaggtaaaacataggaacactgaacattcactgagaactgacaacttgtggggttgttgtaggatatgtgaccagagactcttgaatgccagtctctgtacctgtaccatgttggctaacaagaatcgcatggaatccttgctgaaaatacagaccctagaagttttctcaaatctggagagactgtactatggtttgaatatggtttgtcgccaccagaactcatgttgaggcttggtcctcaatgcagctgtgttgggaggtgggacctagagggaagtgtttgggtccagtgggcagatccctcatgaacagataaatattgtcttgtgggagtggatgacttctgtcttgcaggactggatgaattaccacaagaatgagttgttgtgaagcttctcctcatgttttgctgtgtttgcacgctgtctcttgacatttttcttctttgctatgttgtaaggcagcacataaccctctgcaagctgagcagatgccagtgccatgctcttggattttctagccactagagttgtgagccaaataacattttttttctttataaattacccagatcaggtattctgttagagcaacactaaagggactaagacactcttattctcaccaaatctttattttggtaatgatttctcacacctattcatttgctccagaaaaggtagttattctccatagtctatcttcatcttccacttcatgcttattcaatccattaccaattcctgtcaatatatcttcctaaatatctctttcaaccaccaacttttctatcctcactattactatccttttacaagcacatagaccactgccaggaacccttgacttgccgacctgactctatactagttcttcttcctactgcagccggagcaatctttttaatcaaagctatgactcaacatttactctcttgatgaaatctcctagaagaccttttgtagctcttagaacaaagactgaaataaaaactctatactatagtctaaaagttccttgttggtctcacctctccagcttcctccctctgtgctccaaccacatgggcttgccttcaatgcttcacatatcacccagcttcaaattcccttctggctgcagggccttggcacaaactgttttctctgcctgatgttttccacccttccacctacattcatcagtttgacttctacttatcttttggagctcagctcagacaaggttagatcctgccattgacatactcattagcaccctgaaatatttcttaatcacagcgtatgattatatatttatttgtgtgattaactgataaatgactgtctgacccctcctccctgctttaagactataagttgtattaattcagggcctatgttagctttactcagtactctgtacccaatgcccaccccagcatcctcacaagtaagggtgttcagtacatgggtgttgaatagatgcatgaataatacaataagtcaacaattggtctcaggaatctcaataattttaatgctatcaaagtgatttgatgcagatttgggaaaaattatctaaaaaattcatcccaagctaagatcctatgattcttagctatcacagaatctgtgattctgtgctactcctctgcgcttctcatgtacacttacatgggtatacccatgaaaaatgtttgttggtttgtttgtttgttttgagacagagtttaactcttgttgtccaggctggagtgcaatggtgcaatctcggctcactgcaaactccacctcctggcctcaagggactctcctgccccagcctccagagtagctgagattacaggcgcatgtcactacactcagctaatttttatatttttagtagagacagagtttcaccatgttggccaggttggtgtcaaactcctgatctcaggtgatctactgcctgagcctcccaaagtgctgggattacaggcgtgagccaccgtgcccagccgaaaaatgttttaaagcatctaggatccttggcaggcctttagcacactgcacagaagggacattctgtgcctgtcactggaatgaccagcaactctggttccctgctttgcccagactgtttctatgtccccttcagtttagttcagttcaacaattatctagtgagcactttctctgagcggggcatctgctttgtgctaagtgtaagccctgcctccaagaactcattgcataaggagagacacacacatgaaaaccaactaattgtgattcagtgtaaaatacgtagtaattgacaaatgcatatagtttcatgacagccctgtagaaggagtaggcaagtgttctagtatggcttcaaggaggaaatgtagcttaaaacaggttcggagggatgagtaagagtttaccatacttttaagggggttgggaggaatatattgaaatgaaaattacattttgcaaatgcagtatgaggagccgtggtacagtttaatgtgtttagagaacaacgagtaactgtatggcagaagcagtaaatatgacgaaggaggaagctggtgtgtttggagaaggctgagggatcatgaggcatattaccttcctttaaaagccatgccctattctccctctcctgccacttcaaattcaggttcaccatttatatgtctattagtcctggtgtctttctcatgctctttgattagtccttaatccacaagcgcaacattgcaatacttgcctagcatatttcacaggcaggggacctaatgtccctgtgagaacccatcttgctgagattgtcgctggcagatttacttccagtgtgattgttgcaagaatttgtctaacagaatgaatgatcaaccttgagcagaagagattatgaaaaacttaatagcattgtagcaatgtggctgttaatgaaatacagttggctgctcccgctgtttggcaccaaccaacctgacactgtcaacatcacaatacgatatttattcccaattattttacggcaacaactgaaatacaatgtgttattaatcatatttattataagtatcaatttgagaaatttctgacatgccagaagataaataggtttattatgaaaagcagttctgcttggtgcatgctggctgctgctgtgtaataaatagcctctgtggggaaagttttttaaaagaaataaagcaaaaaaatagcactgaaaacagaaaggaagcatcaaaactcttcaaatacctgctgtgtccattggtcaagcacattcaggacatcgcatgcctttagaactccagcaggttccaacagctagtaggacattctagactctgagagagagcaagggaggttttatgactggggacaaagaaaagagacactgaaggcgaaggacaatctctgaaaatgcagtaccctccagactgctcctcctctcacaaaaacaccttcccagcatgcactgctttagggactatgattataccattgattctgtccagaaaacctgtgtcctgaatatattacagggctcattccttcacttctttcaggtgcctactcaggtatttccttatcagaacagtctttcgaacgaccccattaaaaaaatagtcctgtcaaccctatgttaacaattttatttatttttattatttgttaacaatacataataggtgcatatattttgggggtacatataataatttgatacattcatattgtgcataaagattgaatcggagtaattgggatatccattgccttaagtgttttaccttttctttatgctgtggacattcaaattactttctaactttttgaaatatacaatagaagaatgttaactataatcaccctattgatctatcaaatgctagatcttatttcttctaactatatattgtacctattaatctgtaattccacaactatatttacttcttatacttttccccttctaggctataaaccaaatgagagctgagcatctgtttggttcactgcccaacacatgcatgcctactacatggcagtcaaaatatttgtggaataaatgaatgaatgaaaaaaaaaagaaatagatgaatgaatcatggatgaatgaatcaaatcagtcagcaatgtctttctaaacaaaatttggatgattttggatgattacgcctcttaaaaatatttcttcatttcctaccccaatttagtttctactcaggactttttcaatatcttccaaacctattgttcttttttatttgtttgctttttgaggcaaggtcttgctctgttgccagggctagagtgcagtggtgtgatcacagctcactaaagcctccaactcttgggttcaagtgattctccacctcagcctcccaaatagctgggatgaaagtgtacaccacaatgcccggagaattatttcatttcttctttgtagagattgagtcttactctgttgaccaggttgctttcgaactcctggcctcaagccatccttccacctcagccttcccaagtgctaggattacaggcgcgagccaacttgcccagccctggaatttttgagcctgttcaattctaactattgtcaccaaaagtaaccttaagaaaaaaaatgcattatctccttgcttcattgcaccattaaaatctttcctaaattttccatgttaaagatgaagctcaaaatcctcagcatagcatacaaaacacttcataatcagatgcctcttcaaatacctcctatcagaatggtctctttgactacccctttaaaaaaattccccccaaccctatttttaaattatttacttatttttattatatttttgatacataatagatggacacattcaaacagtgcccccaaaactggggcagcagaaacaggtccttgcttattttctcagcttcacctcctgcctccaccccatctgtactgctggtccagacattcctacagaggtgtcctcctaagttggtctcttcctctcctgcttcagaggctttgccctgctcttctctgcctcttgaggctctgtcctgctcttctctgcgtcttgtggttggaatgcctgtctttttcctactgaagatctggatgcctaaaccataatgtaaaattgctgctttttacttccatttacagcagagaaattcctcctctggcctctcctcttctctgtgtttctttcttcataatttttatttatttatatatttatttatttatttatttatttatttattttcattgagatggagtctcgttctgtcgcccaggctagagtgcagtggtgtgatctcagctcactgcaatctccaccttccaggttcaagcgaacctcttgcttcagcctccctcctgtagctgggactacaggtgcccgccaccacccctggctagttttcatatttttagtagagacagggtttcaccatgttggccaggctattctcaaactcctgatctcaagtgatctgcccaccttggcctcccaaagtgctgggattacaggcgtgagtcaccgcacccagcctctctctttataattttcctactgttcacctgcatcaaactcctgaattctgtcatgcaactggaacagtaagagggaaaaacatggagctcaaagaaagatgttgagaaacgtagagttgcatagaatttactgtataagaatggaatctgtcaagtcagacaagcgacagagacctatttacaaagagacccagtgaaaattactggagaaataataaagagaaatgctgtgactttgaaataaataatgttcaaaagtcacctgcaatatttaggatagtgtctgaaacagatacaaatatttctcagcagtaaaagaattttgtatttagtctagtcatggaatagtagtcagttgtcactgaggaagcactttggggtagaagaagcatttgaatgtgtttgaagtctgaggcagcaggtgaggtttgattttatatttttgaaaatggatctatcagatggtggagctaccctcataaaagatttgtaatacgcctgtttacctacaagattaaatcaagtgtcatttcttcagggaagattgcccttcaccatgtgaaatatacataaagtatatgtcacaatgtgtgacagttctttgctcacatatatatttctccacttaaaggagaattttttttgagatatgatcttgttctgttatccaggatggggtgcaatggggcaatcacggctcattgcagccttcacctcctgggttcaagtggtcctcccacatcagcctcctgagtagctgagactacaagtgtgcactatcaagcctggctaatgtttaatttttagtagagacaaggtcttgctacatttcccaggctggtcttgaattcctggcctcaagtgatcctcccaccttagcccagaaggagtcttatttcattcatcgtatattcttagtatctacctgtcatcaggcctatagtagatactcagtagatgtagattgaggtttgaagaataagagatagctcaccaagtagaacactggatggtattggaactaatgtattcctttattgtcagcagaatggaccatgcacatagaaataataaaatgggagaattgattgccatggtctaaattttgtgccccctacaattcatatgttgagaccctgacccccaaggtgccggtactaagaagtggggcctttgggcagtgataaggttgtgagggtggagccctcacaaatgggatttatgccctcataaaagaaactgcagagaactagttaaacccttctactatctgaggacatggcaagaagctgctgttctctgaacctggatagaggacctcactagacgctgaccagcgctttcatcttggatttcccaggctccaaaactgtgagaaataagtttctgttgtttataagctaccaggtttaaggtattttgtacagcaacccaaagagtctgagaccataatgaagccattggaatggtgggaaggcaacttcatgtgagtaactacagtaaagccaggtgctggtaacagtcatgttgcccatagagcagatcctactattacagtgcctagcacattacctgcatatgatgatatgtgatcaattagttaactgattagtttatgaatcagtctgccaaaaactagggcagaaattgatagcacattaaaataaatatgccttaaagtttgcaaggagaccctattaactgcgcactgttttctttttattttctttttttttcttttgagacagggtctcactctgtcacccaggctggagtgcaatggcacagtcttggctcattgcaacctccacttcccgggttcaagcgattcttgtgcctcagcctcccaagtagttgggaatacaggtgtgcaccaccacacctggctaatttttatatttttagtagatagggggtttcccatattagccagcctggtcctgaactcctggcctcaagtgatctacctgccttggcctctcaaagtgctgggattacaggcgtgagccactgcacctggctagccactcactgttttcatgttaggctaagtaagcttttttgaagaccattaacataaatatacaacctaaatgtattttacctgaataattttactcatgtccacagcttgttctttcataggctgccatgatgaggaagaacagagattagtagtagcactattcatttctgatatttttgcagtagtggttctaattctcactccagtttagaaaagatctgtaggaaatcacaggtctacatttcgtcctctaaactactctgttgggtagaatttattttgcaaagacttatgtaggatcacttttttactacaggttttgtcatatgggatttttacaacctttttttctgctgaaacaaatggcttttaatccttaaaagggcagggctatattttccttcaaacatttttaaaataacttaagagaattaatttttagtaatagcaagtgaagaacattttaatcctagagcttaagaaaggggaggcccaataaccagatgctggaaatctattgaggttttttttaaattccagtatccagacaattggcatgaaaataaaggagcctagaaaaaatgttgaaaatgaaaacaataaaagtgacaactaaacatattattttgtatttgcaaagcacttccacaaatggccacaaatgtcatctctttaaattttattcctgagttgagtaggaaataaaccatttggagattcaaggtttagcttaagatatgggtgtttcttgaacctgggaggtggaggtttcagtgagctgagatcatgccactgcactccagcctagatgacagagcgagagtttgtctcaaaaaaaaaaaaaaaaaaaaaaaaagatatggatgttgtcaatacaatcgggggaaaggaatactttgaactactttgttggaaggagtttgaaatcgttgaggactcagcagcatgaagtagagaaattcacaattggtagaaaggactattgtccttcaaccttcattaaggttaactattcaaccttcattaaaaacagaaagtgacaatttcacagcaaattctagaactttagatcaaaagtcaactcaatatgggggatttatataagaaagagttaaaaaaaagacgaaatgtaatatctatgttattgcaagtgaaaggaaaacaggaagataaatatcacaagaagacaaaaatgtatctaacattttgggacaagattgtgggatccacagaaaattggaacttggaacttcctgttccacagagataagaaatacacttgcttttatctcacttctcaaaaaaagtaagatgaatggggttttaggccccagagagaaattgtagctgcaatcaattgtactatctgagtaaaaattgtcctcagaggaaagtgagtagggagctgtctgaagggacaggttattaacaaaagagagggataatggattgcgtttgcaagtgcagttggggctaacatcaatgccatcttcatagctggttcaaaaaaatattctggattcttttagtgtcttggttcttacctgttgtggttgcagaaggtataaatgtacccttaaaagagattagggagagaagtgcctcccacagcaccacgaccagaaagggaagaggaaggacaggcaatagccaaggactcctggcagtgaactcatgtccacatcaagatctaatgagcttgcactcaactcatttctagctctgccttggaagctggagctcctgcactgactatcaatgtgagcccctgagtaggagcagcttggtagagttgaaagaccattgatctgggtcaacagactctggttcctgtctcagcagtgctgtaatcaatccaagtcaaatatcatctctgggacttaatttgctaaatttaaaatgaaaagaaaaacaaaaatagaacaattagactagatcaggattcggcaaaccaaagcctgcttatcaaatctggcataccacctgtttctgtctatacaattgtattgaaactcagccacactcattcatttgcatattgtccatgaaagaagcttttgcgctgcctcaggagatctgagtagtggccacagagatgttgcagtggaccatgttgcaacattgtccaaaatacctaaaatatttacttcttgttttggagagtttgctgactggcaccagagaaatctatggtctaaaatcatctaaaaatttaagcacatatgtgtgaccacacatttcgaaatgccgtcttcccaatctagaacacagcacatgaatcagtaggtaaacctatccatgtcaattctcaaatttgaaattcattcacttgaaaatccagcaatttttcatgcttcatatcatatctgggtttggaataaagaagtgtgaggggagaaaaattccctgagcattttaaatctaatttcacctttattatgagactactgagtcttttcttgagcaaaggagagagtgtgaaatagaataaggtgctcaaaacaatagattaaatttattgaaaggatgagtaattggagtaatgttacagaatattaagcagattatttagatagcatatacatttccagtttgattaagtcaattcacaggccatcaaaaagtacacagaaaaatagagggtttgatccgatagccttctgcgttagaatgtagtcatttgctctctttagctatttaatctcttctgcatgttcagagggagaaaatgagtgatgagagagagaagtaataagatcatactgcaaatccttacatcgataagataacagaaggcttttcacactggctaatatttcatgttgtatttacagctcttgtccatgtacagatttggggtcattaacagaggtgttgatcagcaaagtcttagagtgagtctagggaaatggttgccaaatatatctgggtattggaaccatcaacagagcctgtgccccagacttactgaatcatggtctctggtggtggatcccaggtagtcacagctttaactgagtgattaggagattcactgtgcagccagttcgggaaccaccagtgaaatccaaccccttcatttattagtgttggaaccgtaactttctgaagatgtaccactgtcccagccacttcacctgtattcccagctcatttctctcagagaaaactgccaagtccccacagtggccttgcatgggccatttgtgatgtcacctctctgacctcatctcctactttccttcacccggttgtgtctagctattgccatgctctttctccaacacaccaagcacactcctgcatcagaggctgtgaattttccatttcctgctttgttcctccccaatatttgcatgaaccactttcccacttaatctaattttctgttcagaagtcactttcacagaaaagtcttcctcagccacatgtattttcttcttggtgcttattatcacctgacattttatatatctatgtttgtttcttgtttgtttcctactccattcggtaagctctaattgagaacagaaaagctctgtttattcactgttgtatccccaacatctatatctagcacatcattgattctcaacaactatttgtaaatgaatgaataaatggctctgctagatttttgtcacctggattgccagaccagtgcaataatggaaagctaagtaatgtaaagagctttgcaatcagacagctctggcttgcattcttcatgtgtgattttgagcaagttactgattcttgctgagcatcagttttctatgtgtaaagtggaggcatggacactggaggatcatggtgagaatttcatagagcaggccaataagacctccttggggaaagaaggctaaagtgggcctcgggtttaggtttcccccactgggagttccaaggggctatggagttgataggattccccatttgggctgcagaggagccagaaacatgctttagtttcttaatcctgaaggagtgggggattgtgtaagcctcattggtgcccttttgaaccacatttcatcaagatattgtgaaatggggagcagcaggcagccttctctggccaacatgtatcagggcctcgtgcttagtgggatgtgcccagagtagacagggaatccctggcagccttgcatagtccctctcatgcctttgctttcatggggctggctggaaacaggccggtaagccccatggaactaccgggacaaattaccaagcaatctcccatggccatgtagaacagccatgtagaacaggatgtctcccaaggtaagatttaaggtttgtggtttgcagaaaagagaagggaggaaataaaaaagcactgacaatcattgaaagcccacgttctaggtaactggctactcactttcacagcccagtaacaattttgcttaatcctatacatctataaataggattattgtcttcattttccagataaggaaacaagacttggcaaatgtgtagtgtagtgtttgacagtattatgtagttgtttagcatgcacatgaacttgcaagaccttgctcttccctaataattctgtcctttactaattctgtgatcttacaagctgtgccttatgtattttgtgttctattttgtaaaacctaatgacaacaacataataataccttctcatagaacaattattgtgataaattaagctgttgagagtcaggcactcaacccaacaacatgcccataatgtgtactcaataaatgcttgctagtatttttaataatattgttaataaaataacccagccagaggtagaacccaagattccgactctagttgacctgattctaagccaactcttctacagcaacacatcggcccattgatttagacagcatggaactcatagcccagggaattcacactcttaaagaacttaaacagcacagcttaatatggtcccttccaaacatacgactcagtaattccagtaggagggctaaacaacctattctgagaggtctccaggaaaggaagcctggagtcttccctggaaacatgttcccttatcgcacctcccttctcttcaggatgctgaggacctctggctccatggacttcatcctcccatacaattggttcccctcacaattagtttctggcactgtcatcaaagtgatccctctccaaggacatggaacaggatgaaaaacaaattgtaattgtaaactcgaagtacgatcagggcaggcacagcaaaggaggaaggttacgttgtgggaatcaggggtcaacaataaaagccagcctgctgcctgtccccaccaggcaattttctgggctgttcatgtccccagttatgcccccaaacattcccatgacagcaatgcctaaggaaaataacctctgaagattgagcctaaaactagaatcatttttctctctcattctaattcatagcagggaagtggactggctccttaaatccagaaagtatcagacttatctgatcaaatcattagggcaactgtgttttccctcatctccagacagcatggatgaggagaaggagccaaaagacacagcatctctcttcaaatgaatactcaacttcaaagaagaaagtgaccactgttaaggaggtgaagtcatagcctcggcaaacctttgaagctgggggagaagatgtaaattaagcaccgacaagcagggtataaaaataaaatccttgaaggaaaagcaaaactgctttgcaatgggtgtgaaagtaaaggaagctggccaaggccagaggaggtaaacagggttgcatgatgtaaccacactaggaaaaggcaaactagttgagaaatatagagaaaatacatggaagttgtaaattgtctattttatctgagaacttataagaatcaaagtggaaacaaggtcaattttcttaatattcaggccattataaacccttgtggggaacaggaaacttgcttttatttgctgtttctgcaatagtgttgtttgggtacacgacaggaccatggaactctataatcttgtatagggatacatgccaagtgccattcctgattcctttgtagttttttttttttcttatgtctcctattagttgaataattcattttttgtttatttattcattcattcaataaactgcttttgtgcttacagtataccagacactctactagatgctaaataagcaaagatgaacatggccttgtccttacccttaaagaaccataactctatataaaaacacatttaatttgtaaattagaggacaggatagttagtttgtgatagagaaaaccaaatggtcccaaaggaagacaaagtataaagttttgaaaactatcaccccaaaattcacatctaccttgaagtgcaaaatggcaacttgtttggaaatacggtctttgcagatgtaattagttaaggtcatagcagattaggatgtgttctaaatgcaatgactgatattcttaaaaaggagagagcatgcactcagacacacacagggaaaaaatccatgtgatgatggaagcagagactgaagccaagaaaagacaaggattgacaggagccaccagaaactaaaaagaggcaaggaagcattttccctagaaaggagcatggctccactggcactgtaatttcaggttgctagcctctagaactataaaacaataaatttattggttttcttaaactacccaattggtgttactttgtcatagcagccctaggaagctaacatacaggtgaaggacatttaaagctatagtagtaagagaagagatgtcctaagatgtttctttggtgacatcatgtgatttttaatatggattttgctctagggaattatctctgtcactgccaatcaaggtaccttgctccactcatcaaggggtggcccatatccaagctggagctttttgattctctctttctgcagtttggatatttatgctgatcatagctcccagaaaaaaaaaaataaattggccgttttgcttccttgattccaggagctgtcccagctcttgtgcatcctacaactcagttctttggcttttccttctttgtttgcttaagtgaaccaaagatggcatttattgcttgcagcaaagaagtctaactgatataggacccatgattaatgttctggttcttcttttacagagaacatgatagtgttctctaatttcatctttttttctattttttttgttctgttgcaagaacaaatctgctatatttatggcaacttgtggcaataatggaagattctaagatacatttttataaacatgttttagccctggataaaataacaccttaattcatcatggtctcttcatctggaatcccctttcttttaaccaatttcacataccaaaaattattttttgaccacagaaatgccttaagggataaataaataatacagtcatcagagtttaactaaactgggctttaactgaggtgcctgcaatcaattgtatatggtctaaatttggacttagccttcctgagccatgggcttcccaggtcatatccaccaatgggtcattcttgaaatcagaaaagtattatatggcaggtactcagcccagtacccgacatatagagatgctaaaaatattgtttttctctctttctttcttcttccaatcctgaccctccaaaggtcatcctgactcttctcaaagcctgtccttttttctcaagtggacctgtagctacagaaagttgagaatgataattggataaatgaggacagatgtctctttagcccccttcctctttagcttgctggggtctcctgactggattactctcagctcaaggaacccctccctcaacctcaaaaagagaagacaagattcatttttatacaatgttgtttgtcaattcaatccaatctcaaagtacgttttgccttctgaaatctaaatgttcacgtttctttttccaaggtatctatattcatttaatggggaaaaaacaatacctggagtcattatatgtgcatctatgtctttctaaatatgcacaagcattttacttgaatatttccaggtcctgcaagaaattctgaaattgattttcatttgtgtggcttcaggattcatttcaatggcagcccaaacattcttccagcagaatggccattcagacctgcttaatgttgtgaatccattgatatttttacccttccaaaagcatacactattgattctgcctctctcttaattgcacagaagaaaaactgacttctcatgaacacaacttgatatctcatttgatatcttcattttcataccagtgtaactgagttatcaatgtttgcttggaccagactattaaaacagccacttggatagtttgggtttttaaaaagtctggcaaggtatttgcctcattgttattatttggaaatttctagaaatatgtcatctgtaatatcagtgtactggcccaccaactgggttagaagtttctgtttgatgttcttcccccaggactcccatcctattctatcttacctctagggtggcaatgatcacattgtcccagaaaaatgaccatataactttatttttcaaactggaactttcaagagtgaaagggaggatggttattaattaagctaggaaaagggaataaactcagaatgtcctaagtaaaaataggtcactctgattttcaccattagttcagtgctgtgtctcttcctctagacattaagcccctggccatatttagcttgttctctgctctctctctagcatctgacatagtacacagggaaggatctgcacttcagtcatggtcctgtgtcatggcaagaacagataaaacaatctccctcaaacttacaactcttttgttgtaatcactagaatatattatatgttggtatcactcaaagtagcaattggccaatcatctcttcttttctggctaattgcttatccttcaagacacctgatgtcaactgcattgaggtacattcttatatttgtgtagcattctgtcttgatatctttgtgcttgatcatgttctattataattgtttctttaatagacagctgagaactgctgtgaactccatttcttctctataccagtatttagctcggagcctgtcacagaataaggaaatagtacataacaactgaatgaatgtatgtgcagattcgtgaatgaaaaaatgaaatatccagattggacattagaatattctatctgtcaactgctgtttggtttgcctgatactgattatttgcctacttggtaatatttatatagctagaatcatggacccacagactactataaactaagagacaattccagacattagtaagacagaaaagttttctagtatatcataaaatattaaatctgatagtagcactaccaatggcatgatatatttaaaggtgaacatagagctaatgttcatataaaaatcatcctgtgatatttgttgctgcttaacatttttaattcaatttcatgggagaacaaaagagtgattaagagctagaaaatagaattcatgagaaaaggttagaggaattgaaattatttagcccagaggaaaaaagtatatgtagccattcagtgattcagtgaaacctcattatccaatatcagtttattcaaacgatggcataagttaaactgacagctatgtttccaatgaacaaatgacctaccatttcttaaaaaataaaaaaaaaagataatcagaaaccatttaacttaaatatcttttttttttctgtctgatctcgtctattttggattataaaggatttattttacatgaaatcttctgggtcacactttgcatggcagtagaggtagtagatcaggtcaaagtgggttgtgccccaatttttttttttctcttaagtttctattttctaaaatgctgttgtgttttcattcattcaacaagtatttattgaggaactatgcatgtcagcgtccatgctaagcacgagggacatagaagctatgacacacaagctatttgcattattataagatgtttcagttaagttcctcccttaccgaacttaagtgtgttgggaaacattaaaaagtcatacccctgacacagtgagatggtatctcactgtgattttgattttcatttctctaatgaccagagatgatgagctttttttcatatgtttgttggctgcataaatatcttcttttgagaagtgtctgttcatatcatttgcccactttttgatggggttgtttgttttttttcttgtaaatttgtttaagttctttgtagattctggatagtagccctttgtcagatggatagattgcaagaattttctcccattatgtaggttgcctgtatactctgatgatagtttcttttgctgtgcagaagctctttagtttaattaggtcattaaaacgtcaggaaaaaaccgatgttggaaaggatgtggagaaataggaatgcttttacactgttggtaggagtgtaaattagttcagccattgtggaagacagtgtggcaattcctcaaggatctagaaccagaaataccatttgacccagcaattccattactgggtatataccgaaaggattataaatcattctactataaagacacatgcacaggtatgtttcttgcagcactgttcacaatagcaaagactttgaaccagcccaaatgcccatcagtgatagatgggataaagaaaatgtggcaaatatacaccatggaatactatgcagccataaaaaaggatatgttcatgtcattcacagggacatggatgaagctggaaaccatcatcttcagcaaacttacacaggaacagaaaacaaaacaccacatgttctcactcataagtgggagctgaagaatgagaacacatggatacagggaggagaacatcacacactggggcctgtcggagggtggggggttagggaagggatagcattaggagaaatacctgatgtagatgacaggttgatgggtgcagcaaacgaccatggcatatgtataactatgtaacctgcacgttctgcgcatgtatcccagaacttaaagtataataataataatagtaaagatatcaccccccaaaaaagtcatacccgtaggttaaggcatctctaaagtacacgtattcttatgttgggggcaaggaagtagcaaattaagctattatctgtattgtttatggaattatttttcagatgggttcccattgaagagaaaatgggatatagatcaaatgagctttgaaggataagaaaaaagaaatgagctttgaaggatgaaaaaaggaattttttttaaaaagacaatcatgttgggaaaactggatatccatgtacagaagaataataatagactcttatctaaccacttttacaaaaatcgactcaaaatggattaacagcttaaatgtaacacctgaatctataaagctactagaagaaaatgtagggggaaagcttcattatattggttttaggtatgacttcaaaagcacaggcagcaaaagcaaaaataaagaaatggaattgcatcaaactaaaaagcttttgcatagcacaagaaacaattacagagtgaagagatcacccacagattaggagaaaatatttgcaaatcatattgcaagtcataactgttaaagagctaatatcccaattagacagggaactcaaaactattcaattacaaggaaacagagaacccaattttaaaaacgggcaaagaaccggaatagacatctctcaaaagatgaaatacaaatggccaacagctatatgaaaaaaatccttaaaatttttaatcatagaaatgcaaactaaaaccatactaagatatcaactattatattggctattatcaaactgatgaaagataagtgttggcgaggatgtggagaaaagtgaatccatacacactgttggtggcattgtaaattagtacaggcattttggaaaatagtatggaggttcctcaaaaaactaaaaacagaattatccatatgatccagcaatcccacaactggatatgtacccaagtaaatagaagtcagtataccaaaggagatacctgcactcccatgttcattgcagcattattcacaatagccaagatatgaaaaaaatctgtgtccaaaaatgaatgaatggatttttaaaatgcagtacatctacacaatggaatactattctgcctgaaaaaataaaacaggaaattctatcatttacaacagtcacacttgaaggatattacgttaagtgaaataagccaggcacacttacatgtggaagctaaaaaaacgggactcatagaagtagagagtagaactgtggttatcagaggcaggtgggggctaggagggtagtgtatggggagatgatggtcagcaggagatgttggtcaacaggtccaaagttacaatgttaggtttgtgcaacagtaattgcatttttgccattaaaagtaatgacaaaacgcatttatccacttgcttcaaatcataattgctaggaggaataagttctagagttctattgcaatgcgagatgactataattaataataatgtatatttcaaaatagctaagagatatgactttcgatgttctcaccctaaagaaatgattaatctttgagatggtgaatatgctaattaccttgatttatcttgctatcttgcagtgcttacatgcgtcaaaaatcacattgtactttataaatatatagttgtcaactaaaaattaatttttaaaaatattattaaaaataaaggttattaaaaataaatattttattatataaaatgttattttaagaatttagtattaaattcttaaaatttaaatttctaatttaggattaaaaaagttagagctataaagttcataatattaagctgagaaatataaaattcacagaagtcagttgacaagttaacacaataagttagtaattactgtgactatacttccggtctcagatatcttactatctagtactcttttcttcttccaaattagtatttgcatttatttactaatagtaactatttgtatatggttgtgaataacagaacccaactatgatggcttaagcacataatatttatccacctacatcaaatccacagctaagcagtccatagctgctataacagtgccacaaagtcatcagagacctagactcctgtcattatgctttaccctttttgttatgtagctgtaatcttttttttttttttttttttgagacggagtttcgctctgtcgcccaggctggagtgcagtggcgtgatctcggctcattgcaagctccgcctcccgggttcacgctattctcctgcctcagcctcctgagtagctgggactacaggcgcctgccaacacgcccggctaattttttgtatttttagtagagacggggtttcaccgcattagccagaatggtctcgatctcctgacctcgtgatctgcccgcctcggcctcacaaagtgctgggattacaggcgtgagccaccgcgcctggcctatgtagctatactgtttaaggctacaagaaggctgcttgacatatatttagttttgttgctaagtgaaaaaaaaaatattgggtaggcaacttgttatctttaccacatcgttgttaagagacaattttctatgggtctccagaatttctgcacatcttgtagacagaggcactgcctctctttgttccgaagtgattttccaaggttgtgtataagccttggaagctagagatcatgtgtcccttcaaagcagagagaagtttctttactgtccaatataataaaggtaatgtctgtctctctggggcgaagattaggcatgagcactgccagttataaaagattcaaatttgctaaactcagtatttctttcctgtaacacgatgcatcatgtgtgcaggcatcacatggccctattcatgtcaccctatgggaattgaggcccagggactggcttgagaaaatgaagttactggttactgttattgttgtaagtaaccagatgtcttttgtctctgactctgaaatatcatgccatgtgccgatacctatgacactgcagcaggctaccttgttagcttgcaagtaagtttcagacccttcacagttcttgacagtcatccataactcgctttgtatgctataatatctaaggtgtctaactccaaggtgtctagaacagagtaggtgactaatacatacttaaataaatagagagtcccaaaaggcattttaatgagtcagaccagttgacataaagtcccagatgataccactgaggagccttattaccttccacaaaatcacttaccctctctaacctcagcttcttaaattagtagtctgcattttctccttccccttgctcaactgttgtttatttcctaacttactgctaattggctatgggcctcatcccttcagagaaactgttcttccagggtctctagtgacccactaactggcacagcctgctgaccctttccactctgtatctcactccctgctgttctgttaacatttaactccttaaaactctttcttttcttgccttccatgaaacttttctctcctggtttctcttatatctccaggaaactatttatccgtctcttcttccattatttactcttaaacattgatatgccataaatgcccaccctccctccagccctcttctcactctgtagaataaagtttataccttttttttaaaagaaaaaattggttttgcttaccatgtttgtgcttataacttttgaatttctatctccagtccagatttttctcctaagcttcaaatctatatttttaacccccaattcgttacctctacctggatgtgttattggaatttcaaatgaaaacatgtttgaagttacacttattatttattttcgcacctcccaaactggtagagctggcatccctttctcagtgaatggtatcaccattcatgattttttttttttattttataaacctatcgactctaaggccaataacattcccatccagtactatggctgtctcatcaatacttctcaaaacccttgtctttcttcccactgcctccccattaatttaggccctcactatctattacgctggccccatgttcaaaccgtgtctccagaatctgtcttactggatcataaaagcccccagaataaactttcagaaccaaactcacataatgctgctgccctgattaaaatctttctttggcttttctcggtcagaagaatgggagaaagttcaaactctttagtatgatacacacaaccctccttaatctgacagttcctgcctcttcagcttcacttcctatttctctccatctcacagcctgtgccccagccataataaaccactcacattttccagcacgtgccctgttaatatagaccttgcaccgctaaatagactgattcttctacctgctatttgacatcacccccaaatccagtctagggaatctttcatccttcaaaagctatagcttaactttttctagccctgggaagtttacccttaactatcaaacccctcactcttaagactggtggattactgcctacctggtgcttctctctaccttgaaggatttttttttttatcacatttatcattgctgtaccatactaactcgttaacatacctgaaaccactaataaaagttgtcttatttatcgttatatgtccaacacagagcacaaatccagacgcagagtggaggctcggtaaaattatttaaagagtaagaaagctggagaatttgagtaataccagtaaaaaggcagttactgaagtggaatgaaaggaagaaagcacagaatttacctttttcatagtttgccttaagtaaactctggaatgttcttaggcaatgatcaccctcctgggccccaaaatgagaaatcaagttcaccaggaagtagccaattgggaatggcacatacaaggacagtgtccttcacctcccagtcggtccaaagataagccagtggggaaaagggcagctacagggcaatggtttgtcttgaactacaaacctaaagaacaaactatgaccattgggaaactttctagttaaggagcacacagtctggcccagactgagtttgccagattaggagagagagagcactgggcaggagtaaaggtcagaaggcttgggtgcaggtgcctctgctaacctcaccactcctgggtccttggacagtttctttcacttctctaaacctctgtgtccccatatgcaaaatggaaatgcaaaatacacattttaccgaattcatgagtttgttaagagaattaaaaaagagaatgtgtatggaatgttttcacagtgcccagaacagggtaagtgctcagtaaatgttaattattgtttgtaatgaaatacagaaaacactcaagtaggactcagctctgttccagctattcttcaagaggtgtgacgaccaaaatgtgtgtaaaattattaattatttggctcaaacacctttcctcttcaatgtgtagtggagttcctttatagatttattacaaaaaaaataagtttaaacaactaaatacaccctgtggaatgaaaatcaaaaatagttactctggtattaaatagctactgtagcattaattgctaaagaaattacatagagaacaacacacaggcataatgtaccatagcaataccgttaaattccaggccctccttcatgaaatgtctcttttctggcctcccttttaatcttcctactttcttcatgcacatcctaaaagtccactcctgtcttctatacccccaacactttcatctcagattgtttatactcatgtagttgcttcttttattactagtttttttctaactgcaatgaactctcggtttttttttttttttttttgtaatcattttcttagagtttgcactttaggtgcagtttttattaattttattataaatattcacttgcctaattgctattcccactggggtattccacagagaacttaaatttcacaagtctcaatttcaactcattttcttcttcttaatgcaaattcttctcctatgacttctaatggcaaacacaaacctcatacccaggatagtacacaccaaagccagattatttgaatttaactcccagatctaatagtcagttgctgtgtgacctggaataaattattaaccctctgtgcctccttcttctcatctgatattgatattacttaactcatagggtctttatgagggttaaatgaattatcacgtgtaaacactcagaatagctccaaaaacatggcaattgttacatatgcaagtagcaactcaccaagaaaaactaatctgaaagccatctctgaactcctacttccatttagtcactttttttttttttttggagagagtcttgctctgtcgcccgcactggagtgcagtggtgtgatcttggctcactgcaacctccatctcccaggttcaagtgattctcctgcctcagcctcccgagtaactggggttacaggtgtgcaccaccacgcctggctaatttttgtatttttagtagagacagggcttcaccatattggccaggctggtcttgaactcctgacctcaagtgatctgcctgcttcagccttccaaagtgctgggattacaggcatgagccaccatgcctagccacttcttttctaaatattttaaatagatccatatcaggatatctctactttcattaccattgtttaaacccaatcttctttaacctaaatagtgtaacaggctctgaaatggttcactcatttgttcatccatcatgtaacaggtaaatattcacttcttacttttaacctgacggtgggaagtattaatgtatgggatagtcatgctctcctccttctggtcttgcttcccctaatccagaataatcagacagtgccattgccccatgatccccaatgccttcatgtcaaagtcaaaacatttactgtgccatgatctgacccttatttaccactccatcctctctgctttccattccttgtttgaatctcagctgtaagcactcgtctccttgctttgtagagaaggagccatgttgctactttcctctgggactttgcacctgtcatttactctgatttcctcccaagtccaccctatccacacacttttgaggagctagttcctattggcggtttcagcaagacgtcttccctggttcccagacctatgttctgataacatgtagaactcagtcctatcatgacacaaaattgcattgagttgagttttctggtttattcatctgcccggcatactgtaaggggtatttgttaaggaaattctaaccaaaggaacaaataaactctgaaacttcagtggcttaatataggttttatatatatgtatatacaaaatgtatagattatatattttatatatgtacagtatgtaatattttagaaataatacactatacaaaaataggttatatacatattctatagtaatatattaacatatttatatattatatatgagatatacatctagaatatatgttatatatttatagattgtatattatacataaaatggtagaatatttttataaaatagaaaatatataatcatatataatatatatttatatattatatattatatttacacataatatataaatacatttataaataatatatttatatattattatatttatatattatatataaatattatatatttcctcgattcatttattataatatgtacatgtgcatgtccctttaagagaagagaggtatttctggaaaggagttgtccaagcagagatgacttttcctagcctccctgataatcatatggagtcagggactgtgtcttgcttattgtttgttttctctgcctaacatagtacacagctcagaggatgttctcaataaataagtatgagataaattgatactttacctctctggttgcagcttgtctttttgctaattacacagatatgggaaggttgtaggattcaaataaattttacaataagctgtttcctttttaaacttagagagcatctctcaagtctaggggcatgtcacttttccatcagcttccctgctatgaacactttgtgaatcatcctaaattacatcaaaagaaaagacatcatgttctcttctgcttggtgatacaagagggcttttccactggaaaaaatactaaattttctatttcctgtgtgttaccagcaaaaacttttttcacaagctgctgctttctgggttagagtgaataagtaactaaccaattagctcgttcatttccaattcaaggacatcaacaatcctctcatctattggtggcaaattcttgtcctatgtgatgtcaacactttaatctgtctatggcaagcattactaattattcatacttaccttttagccctgtctgtggcttcagaataatttccaacgcaaccatccaaattttgacccacagcgtgttacatttggcattgcggtgactcagttcctcatctttagtgtactccttcatcgtttttgcagatataaagaagttaaaggaaaggaaggtaaagtaactacaaagaacatgcaagatgttggtagcaaagcaaaacgcaaaattttgggattctgatcctcagccactattttttttttaaccacttggaaatagacatctaaagcagaaagaaatgttccagaagccttggtgtgtggggggtgagtggatgtggctgtatgccctaaagacaaattttaagtctcacaacttggctgcgggcaagctctggtgtttagcaaggtcttgtattttgggtttacaagatgctcatttgtttctcaatggttccagcttgtcctttcacctggaatgttgtcaggaacctggggcctagaaacagctgataaagataagctttgagccactgagtgtccttgggcaagttggcatgctgctccgggcctcagttgcctgctcgacaaaatatggtattgggtttttgaggtaaatttagattaacttgtgtgaagcactgaatccaatatatggtgtctttaggtccaacctcaggtctccctacatgttgtcagaaaaagacatttgagcattttaagagtgaaatcaaaagtgcactaccaaggtttctaacagcccagttctgtcctggcttttcttcctgcaactgttttcagcttgggtgagtcacttttctctctggacctccattttctcacctgtaaagtaaggagattggaaaatgatcttaaggccctttcatctttgaatatctatgattctgtgcctctctgtatctgagtccccagaattctttttcttggaatatctccctcagttgagagaaaattataagaagggctgcttcccaggtttattttgggtgcagtggccagtctcccttgaacttggcatttgtaactaatctctataagcaaagtgtgctccaattatgacttcaccctactggcccagcagagctattgggtgctgccagtagggataaaggagtgttccagccatgaggcaactattttgttacaattaatggacatggggttgagagacatgtccctcaggcattctcttgtgccaccttgaagaggtcatcctaggtaaaagttctctgaagagaaatattggcagatacatatggcaaaacacagcctccaactccagtcaaaccaccaccacaagcacagtgaaaagcagaaaagaactgttgggtgtagtagggtggaggtgaagaccttggtcctgcctttatgaagcatacatcacttcgcaccaagcatcacgcttggtgctggacacaaagagatgatgaagatgcaaaatgtggtccctgtttttaaggagatcacagttttctcaggcagtcttacagtaactatggcagtcaagatattaataataatatatatcttggacattcacctagagattaaaatgatgattctagcaagataagtcatcaggtaatttagattataggtgggaataatgaatctttcagaattactaagtggggccttccatagaagagtataattcaagacacattggtttcaccagtggtgacctcccctcaaagtcagatacaggggagcagacttaatattgttggaggaaaagagagtcaaaacctaccagaaggagcatcacaagggagacaaagaattgaattgtttctgagttggtaatgtgaaagttgctagaaataatccttgctcaggtgctctgggactagtttatgtgccagctgtgtgcacaaagtgaaaggcttaattgctagaactgtattacttttggctctagtctgctggaccttccatctcccaaactgtagctccctggagctttctggaagtgcttttgtattcctggacttacctatagcatacttttaaaggcaagggaagcttcttaactcctcttaaatcagctaagctatgctggggtagtaataaacacctatatctcagggacttaacacagatttctcacccacatcacagtccagtgagggcttctctccatcctaaaactttccccctggaactcaagtctctctatgttgccttgaaagggaaaagagagccgcagggtcaggatttaaggaccatgcctagaatggcttacataatttccacccacattgcattgtcccaaattcagtcatatgatcccaacttattgtcaccaaaatgctagggatttggtctaggccctgctgctcacagcacagaatgccaatcaaagagacaatgagtattgccatggaagaaggctttaattggatgctgcagctgaggagttaggagatcagtctcaaatttgtctttcaaattagctaaaattaggggtttacatagcagggaagaaatgtaaccatgtataagaaaacaggaattagggaggggtaaggaagagaagttggttgacaggaagtaggtggaaagttaggcaatcctcatgggtgaggggtctggcatctctttgtccagatgcagtgatctggtaagtttcacctccttgatactgtctgggaggtgtgatggttggtttcctgagaaagaaactgagataagacaaatgtaactttcttgagtttcaagactggggggatcaatttgtatgtttattcaatagaaataatagacattagttctgtagaaaacttggaccagtttcagtctcccctttctattttcagttcctcgatcatgggaaatttggtcattgatctttctggctgcttcatgctgaggaggggcattacaagcagctccatactaagggtgatgaatcaaatgttaatctaatactgcagtctccttctatgacacaatctttctctctctagtctcccacttccaccaaagacaaatcatagcaggaccaacctacctgcaaaattagcttcagtcccatatacttggcccgattacccacagaaagtacagcaagcatcatcatccacatagggtctccaaaattggctttcctggaaccattcacaaggccatttcagtcaaagccctgggaaaataaccagttcctccaactgtgtctcattgtaaaagaaaacagattattattgaacttatgtaagcaaccatattgccataaattaagaatattcacaaatagtttacaaattctacagaaatcaggcagagagagaaatgtgcttcaaattctattgacaagagtacactctactcaattgctaaaggttgtaaacagctcaaaagaaaaagtgttctccagactctgaaaaacaaaacaaaaagaatcagcaatgtttcaaagaaccaaaaaaaaaaaaaaaaaaaaaccataaaaattatttctgtcctccattagctcagtccatgcaatcaactcccactctgcttcatattgggttagtaatctttaagaacacatcagcttttcaattaatatcctggaagttttctctctagcccaatggcaaaatctccaaagttatcagaaacctgcattcaaggattcttttaatgaattccccaaaagaagcaagttccagactgtagctgatgataagcctgtttttaaaaacaattgaagcaaaataattatggatgagaaaagtctcaacagacacaattgacaagaaaatttggttatttctgtgacatacaaaaatttaacataatcgtaattattactgataacgtatattaagacatcagaattttaggaatctcatgcattaatgttaaagctaattttaacaaaaccttataaacaaatctaatttgaatcagtttgatcataaggtaagaagtcttttataaccttttacaatgttttttattaaagataaaatcattgctctaagaaaactgtgttattccatcacaatggcccagatactggtattgcatcagtgtgcttttgatattaacatttaatttatagaaaaccttgaactaatttgtcccttaaaattagcccttaaaatctcacatgcgcccacatcttccacaatagttcctgggcctacagggattgaatagtttcaatttctagccctgtgtctcgggcaagttgttcattttgattgtcaccttctcctgggtctgaaaacaaggctttgactactgtcaatgttcaagatttggcatgagtctgtgccttttttagacccaagagtcaaagtcctaacttaacagtacaaggactagttaataggacatttatattatagaaagtcctgtcattctccctcacatgtcacaaattaaagcactgtgaattggtgtctagtagttaatgcctgcagcactttaaatcactgtattaaagtggctagattattccttgcatatatctaatttctaacattgtagtgacagaactgtgacccaaagcatcaaaaatgtgataggtccaatgccaaacttatccaagtaagacaattaactttattctccatcatttaagaaaatggtaaatgcaaatatcggttttggaaattcaatatgaagataaataatctctttttgcttaaatactatacagtgaaacagggacaaagtaaaaacaagcacagaatatttttttctgctattttaaaagagcatcatcatacatttccaagactggtttctagatacggtactgacaactattaggtagatttcaactccagaatcttcaaaacagaataatactagaatatattttgttttcaagtacacacattaaggcctaatagtgataacagatttggaataaaaaagaatcactagaaagcctgacatttttactactacttaatccaagtgaatgtcacttagttttgatagtggtaaatacaactaacatagtctgagagaaatcccagtcaatataatttcttttaaggacaaagctagtctttcctgaacattaaaactttgtacccctatcacaatttttcctcattacctaaagaaaaagatctgaaaccgattcaaattattgattgaattgaatttccttagggaaaaaaactgtctaaacatttcttctcttacctgcttttccagataaataagtaatctactatttctgctcagaacttatttaaagaaacaaggttttttgttttttaggggttcttttttgacccatagcttaaagctcttgtagctctctagatcatcagagtcagcaaaaccaatcaaatttttaatggctggtgtcccctatccatttttgcaggcctgacaaagatagcttaagaactttagataaatagagcaaataatgaattgttggaaatgcataggaaacaaaatgactattcatagaagaaaatacaagccttccattaaaaactaaaactatcaatggttttttatatgtgtatataccagtaaaacccaaaggagaacaaatagcaaataattaaaaattaaaagcaaaaacaaactggaaaccaacccccaatttttcacctactcagtttactttgaaggttacagtataatccagagcctaaaacaaacatatgttggatattttgttcctattatacaaattaatgtctctaagtccagcaacatcactataccttctgtgcaattaagaaatttacttcaagcacgtgaccagtaagtactttagtgctagtactgtctatgcagaatagcaaatacagtgtgaaacaaagcaatgcaagcctgtatgtaaaatttggctccatgctaaatctggattcatgcttaagtatgttaaaaaaaaaaaaagaaaagaattgccaagctgccaatatatttctttacagtatttcttaatttaccttcatcaatactaagatctttagctatgagcaatgttaattagccaaatgtctccaattttctatcagattttaaagagtattttactacttatttacacaaaccattcaacatgcttggacttcgtttttgtcctagattttctttctttctttgttttttttttttttaaaatgaccaattattttattttaggacaaaagtttaccatggtccataatttgtatcaacctttacataacttatgaattagacaaaataatttgtttttctctgtaaaaacacatcttctctcacacattttatatacagaataatatattaattgccattctgattcttagtaactttaaattttagtgaaaacctaggaagtaagacattctgaactagctgtcagatattaacatttcagagatgagaacattccacaattttaaaaaacatgcttcccaacgtcataaccctttctttctctcctttctctttctttcttttccttccttccttccttcctttctttctttctttctttctttctttctttctttctttgtccctccctccctccccccccttctttctttcttttctttttttcttttctttttttttgacggagttttgctcttgtcactcaggctggaatgcaatggcatggtcttggctcactgcaacctccgcctcctgggttcaagtgattttcctgcctcagccttccaagaaactgggattacaggtgcctgccaccgtgcccagctaatttttgtatttttagcagagatggggtttcaccatgttggccaggctggtcttgaactccggatctcaggtgatctgcctgccttggcctcccaaagtgctgagattacaggcctgagccaccacatccggccccataatcctttcttaattggaagtgacccagatggccaaaaagcatctattattcaatcctaaataacttcaagatttcaaattacattaaaaagtgcagctacaagcatttatcccatttacatgtacatgattctttcattttttcaaacgatttatctagattacttctgaaaactgaaatattagacaaagctaatcatcatttcaagttatttccttgttaaccttttttatagcctgcgaagatcagatgttcacctaagtaagaacacttttaaagttaaatacatgggtattgtgtcaataattcagaaaattcagctattttcattaaactaacattgaattagtcttacttattgaaaaaagtcacacaaacaaagactatttagttttggctgggtatattgttttataaccttttatgctaaaccccgacaccccaaaatatctagcagagacaaatataaaacccagacaaaaaggtatgctggcaattccaaagacatttctatttttaccttaccaataattttaaagctagtttttaaaattaacaatttacttaatcaagtgaatttaaaaaattcttgaacttatttacttaatttacaagcattcttttgcttataagcaaagttggtagacacaacatataataaatgtacatacacataaacacatctaaatatgtatacacacacagacacaaagatccaatagcatttacctcaaaactttagctatgaaatagcaatagaaactcaccagtttacaaacaggttcacatggctaaactatttttgccccaatacataatcaaatgaaggctgtgaaccaaaatttggggtagagcagttctcatggcagtttgctttttaaaggccataccttcccagatgccaaagagcactaggtccagatagcaccacagaaaaacatcatctataacctactaatcaggcccaaccctgcttagaacagcagcgtaggagtctgactacatggaatttcatcttgccttctcattcaacagcaaactccagatcccaaagaatactggggccaggccaagtgcagtggctaacacctgcaatctcagcactttgagaggctgatgtgggaggaccacttgagtccaagagttagagaccagcctgggcaacatgatgggaacttatctctccaaaaattaaaaaaaaaaaaagctaggcatgatggcatgtacctttactcctagctacttgggaggctgagctgggaggatcccttgagcccagcagttccaggctacagtgagccatgatgacactattgcactccagcctgggcaacagcgtaagatcctgtcttaaaaaaaaaatggaatattgaagtcaaacagcattacagaagaatatcagttatatcagtttatcaaactctaatttcccatgactatatcaacacacacaaccacaaaaatataaaccaactgctgtaacaacaagctctaagagtatccaaactgaggcagtcagggtgcttccctctctcagttgggcttgttcaacctataaatggaaattctttaaaaaatttcccagccaggtgtggtagctcatgcctgtaatgccagcactttgggaggccgaggcagggggatcacgaggtcaggagatcgagaccatcctggctaacacggtgaaaccccgtttctactaaaaatacaaaaaaattagccgggcatggtggcaggctcctgtagtcccagctactcaggaggctgaggcaggagaatggagtgaacccgggaggcggagcttgcagtgagccgagatcacgccattgcactgtagcctgggcaacagagccagactctgtctcaaaaaaaaaaaaaaaaaaattcccaaattgagagaagcagataccgtctaggcccacaaaggacacttttacctatccagatgcagatgtctaatttctaaggctgtttttcctaggtaatcaggaacatggttggggccagcagtggtggggctggacagagagagaaactgagactcacctctggccaaaaaagggtctggcacctgcttaggagggcttccaaaactttttcagcctgtggaaacaaacccacaagcaatgtgttactggtcagggaactaaaatctgttacctaaatgccaggggtttattctaggttctgctgcttgcagcgcagaaagccggtcactgagacagtgaagatagccagagaaggctttaatcaggtgctacagccaaggagatgacagataagtttcaaatccatctccccaagcaaccaaaattaggggtttatatagtaggaaagaaatgtacccatgtataggaaaatagaaactagggaggggcaagaaagagaagttggtcaacaggaagcaggtggttggttacgcaatcatgatgggtgagggggtcttatgtttcattgtcaagatgcagtgatctgctaagtttcagctccttgatactatctggaaggcctgatggttgttttcctgagaaaggaactcagataagacaaacataactttcttgagttttaagactggagcatcaatttctatgtttatcccaaagaaaccatacacgttagttctatgagacaactgggacaatttcataacctgcattagaggttgggaaatgtcttcccatatttccaagataagaaaatggtgcgggtgccaaaaggcatttgtcccagccatactcccctgtaatgtacacttttctcaaacattttccaaattcactgctacaatgctctgaaccctattttctgcagatgcaactttaacactgtatattcccgatctgatatgaaacaaacaacagcaccacattttccctggatattgttttgccaaggctttgatcgccactgcaatgtgccagtaaggcaagaggaaaatgagagatctttgagttcaatgatcttgtctaattaagctggagctcttccttggaaccccaagccatcatgtttgtggtcagcattggagctgtgaacatccttgcaactggtgtttggcacaacctactttgatcagcttctgttcatccaccagcattcctatgccatagagagtcaatgaggtaagactaagccagatggaccacctacaaatcacctggagacctctgaatccatagcaaagaaattaagacaaagttgaggaaatctgaactgctggttctccagctactgtagtcaaatgaagaggacacagaagccctgaatttttgaattcttaggatgaaaagggacacattggttgtatgactaactttatagggaaagaccttcaatacttataatgtgaactcaataaatagtaatgtagcaaagagaagtttccatggggaaaataacatgtaaagtcaaaacttaaaaaaaaaaaaaagtaagatttttccaagttgcatttcagaagagggaggagaaaaagcaaaggaacatgaaacgatgaaaaacaaactataacatattcctcacccttcaacaataatctggaggtcaaaagctaaattctttatcaccaaagaatcttttgaccttcacattggcttattgggtgtaattgtatttccagagtcactctctgattcctgatactcccttataaagtggccatcaatgagctgaagaaagaaagagtggagcatctggatcactgaacaacgggctggtttgacctcagaaagattgtaaaggtggccttgtgttaaatgagtcactaagacaagcccacacttagttgcaaagagccagaaggaaagcttgtctctgttggtgtgaaatggtgcagtcttctcatccattcatgaaaggaggaaaagactttgaccattggtgcagagcaaagctaaagaggaagaccaagataatgacatattttctccacatgcctttcaaaatggtattttatttactcttctttcaagtaacgtgaaataagggcaccacttttcacaaaatgcaaaatactttatggtttaatcctctcagccattctcaaaatgggtaccaatctctatcttacctataaggaaaccagggctcagaacaagtgaagggtttgttcaaaatctcccagttagtctgaagcagagcaaaaatcacacacaagatgatctgagttcaaaacacaagctgtggtcactaaatggtcagaatgagctcctctgtgctctgagagcctggcaaagactgggaatgaaatggacttccttgccttaaatggaaggtgttgaggaagaaagagttaaggtctcacagagtttaactaaaggcaagttttctcttccctcaggaaggaatcgtggatcattctccagctttttctctagaccatgttctaataacctttctctccacttggctcctgatcttatttcaatttctgagtgtaggggcttttcattctgagcacattatagtattccagcttgcccatcacccatctgtcccaggagtgtatcttgagggcttaaatgctcagtgtggtggaggaaagtttagcactagtttcctttggtaagggaataatttgcttatcaaatattaaacagaaatgttttagcaggttactagttcctctgcagaatggaacactgcatagtacttcattaccagctaatttcttctgcaaatgaatgactactttctgaatttaattaaactatgtaaacattattgtgaggggtccactccgcaacagagctgtgctctgctaggagatacaaaaatgagtaactcatagtctctgcctttgagacctctcaattcatttgagtaaagtcagtaagtgagtagcattccatggatgggggttctcataaaggtgttttcgttcaccttagatgtcattgaggaatatcagcaagtcctaaattatctgatttttaaataatagagtcttttacacatgtagctatttttcatgcattgcatgtaattttctttggtatctatatggatatgctttgtgttagctttgatactggtcacagttctttcctgaggacagaatagcatataactattaataataatgccagcatttgttgggtatttattatgcatcagatgttagagctcttctagtagagaatctgtggccagtgaatgtcatgtactactgtggagctttattctccaagcaacacagatgataaatatagctattactccaattttgcagataaagaaactgagactcagaaagcttattaacatgcccaaagtcacacaagaagaactgtggatccgtttgactttttctaagcttatttttaaactttattaagactaatccagagatgttagttttgcatccctttaagtgtcatcttgcatctgtaacaaaatccttgaacattcagcaagttctctatcctgtaggtggcataaactcaaccaattccccaggtctgtgtgagccctggcaatttttcagcttagagttccctgataattcttctttccacaaagtttttctttgcccagcctcttggaatttggagcagtttatcttctccggtactttgctccacaaatttgagctatcgctgcttctgccccaatggtgtcttcatcctcaactcagattgccaagctgttttgatctctgttgtttgccccacagttcatagattgtctctaggcaaaaagccagaataattgtggggcttgtctcatttgcttcccttctttgggggtctcattcatgctctgtctgctgtcctgtattggaaaactgttgtcaaatatttaattccattttctagtcatttgtgataagaaagtatgctgctagcagcagacattctcccaagatgtaaaaatgttcgtggtgttttaagtgaaaaaaaaaatcacactttaatgcgacatatacagtttatgcttattatggaaaaatatgttaatattctattgaatggatctaaaaatacagacataaaatgtttgagatgcttgatatcccaattatcatgatttgatcactacacattatatacacgtatcaaaatatcacatgtactccataatatgtacaactattatttatcgattaaaaaatgtcaatagtagtttctaggtgggtaagattgttgccatttttttctttttttttttttttctgagaggaaacctacattgcttagataacatgaaaaggaaagcttcaggaaaaattaaatgacaaaatatacagtccttaaaagcagaattacaactaaaatatggcatctattttcatcattagagctgagtgatgtcaatcagaatcagagctatcctactagaaaacttaatggtactatttaagcattcaaagatcaatcactgctattttacttaaccccaatttctctctatctcagactaaaaaaaaaaatgtatccaaggtgtttctttattgttcccaataatttccccaaatggtagcaatgcctccactttacaaagggtttctgcctaaagtttttcttaacacctttgtccctctgagctgtgttggtaatttgtttaaaaattgctattttatttttctctttctctggtctgttttatcctgagaggaagaaggaagttgacgtttaccactatggatccagcactgtgttctcattcatatacttgattttatttgattttcaaaataatcctgcaaagtattttgaattcactttaggttgaaagtggggagacagtctcaaaagacaaagcacttgcccaagattataaaactagtaagcaacaaatctagaattgagctctggtatctagatgtattttccaatttcttgaaagactattatttaggaattaggtagaatttcccctccctttatgtcctctcctcaatttccatcaaagttttataatatgcaagttagttcacaaaaaacatgtggctctctcctcttccaaccatgtgcctgggcacaactctgcatagtatatataccaaaatagtctctgagcatatatatgcagatttgtgaggtcattttcatttcagttatcatcttctctctacttccatagcactcagttaattcatttatatattctttcctttaactgatatgcctgggacccaggttatgtagtaataagtaagactcgatttctcctttcagggtgctcagagtctaatgtgaacacacatccactcagtgtagtaagtatagtgttagaagtggccatggagtcctacagatgcataaagaaagggctctttatttaatttgcagaggagaggagatcagaaatggcttcttggagaatatcataactgagtcaaatatcaaaagctatgtaaaagtgaggcaggtgggtaacataggaaagaggattcaggtgctgggaatattacacaaaaaatacttgtaagcatggaagaacacagtgtaagtgaaaactcatgaacatttaaagctagttgaagaacaagtaagatggcggaatggtgagaaggaagatggaaacttagacacaattcagatcttaagatggaaagtttacatcttaaaccaaagattgaatagtcattgaagattttcaggaaacaaatgatgtaatcagatctcctcttagtgaaatcatgtaggataccaatataaagaatgctcacatattttactaaaagtattccaaaagataaagagggaatactccttaaattattctataaggccagtatcatcctaataccaaaaccaggaaaggatataacaaaaatagaaaaatacagaccaatatctctgatgaacatagatgcaaaaatcctcaacaaaatgctagctaactgagtccaacagcatatcaaaaagctaacacaccatgatcgagtgggtttcataccaggaatgcagggatggttgaacatttgcaagtcaataaatgtgatacatcataaacagaattaaaaacaaaattcatcttaatagatgcataaaaaggcatttgacaaaatttaacatccctttataattaaaagcctcagcaaaatcagcttagaagggacatgccttaaggtaataaaagccatctatgacaaacccacagccaacattataccgaacaggaaaaaggtgaaaacattcccctgagaactggaacaaaacaaggatacccactttcaccacttctttttaacatagtactagaagtcctagctagagcaatcagacaagagaaagaaataaagggcatccaaatcagtaaagaggaagtcaaactgctgctattcactgatgatatgatcatatacatagcaaaccctaaagactcatccacaaagctcctagatttgttaaatgaattcagcaaatttccgggatacaaaatcagtgtacacatatcagtagcactgctatatgccaacaaccaagctgagaataaaatcgagtactcaacgcatttcataacagctgcaaaaaaataaaataaaatacttaggaatatactttaccaaggaggcaaaagagttctgcaaggaaaactacaaaacgttgctgaaagaaatcatccatgacacaaacagatggaaacacatcccatgttcatggatgggtagaatcaaaattgtgaaaatgaccatgctgccaaaaacagtctataaattcagtacaattcccatcaaaataccatcatcattcttcacagaactataacaaaaaatactaaaattcatatggaatcaacacagagcccatgtagccaaagcctgactaagcgaaaagaacaaatctgatggcatcacattacccgacttcaaactatactacaaggctatcattaccagaacagcatggtactggtataaaaataagcaggtagaccaatggaacagaatagagaaccctgaaataaagccaaatacttacagccaactgatctttgacaaagcaaacaaaaacataaagtgaggaaaggacaccctattcaacaaatggtgctgggataattggcaagccacatgtagaagaatgaagctggatcctcatctctcaccttatacacaaatcaactaaagatgaatcaaatacttaaatctaagacctgaaactataaaaattctagaaaataacattggaaaaactcttctagacattggcttaggcaaagagtacatgaccaagaacccaaaagcaaatgcaacaaaaacaaaaaataaatagaggggacctgattaaactgaaaaccttctgcacagcagaataaataaacagcagagtaaaaagacaacccgcagagtaaaaagacaacccacggagtgggagaaaatattcacaaactatgcatccgacaagggactaacatccagaatctacaaggaactcataggaatcagcaagaaaaaaaaacaaataatcccatcaagaagtgggcaaaggacgtgaatagacaattttcaaaagcagatatacaaatggccaatgagcatatgaaaaaaatacttaacatccctaattatcagggaaatacaaattaaaaccacgatgagataccaccttcctcctgcaagaataaccataattaaaaaattgaaaaataacagatgatggcatggatgtgaggcaaaaggaacacttttacatggctgaagggaatttgaactagtacaaccactatgggaaacagtatggagattccaaatagaactactatttgatccagcaatcccatatatatggcattcctatatataccatggaatactacacagccataaaaaggaatgaaataacggcattcacagcaacctgaatggagttggagaccattattctaagtgaaataactcaagaatggaaaaccaagcatcgtatattctcacttataagtgggagctaagctgtgaggatgcaaaggcgtaagaatgatataatggactttgaagacttagggggaagggtggaagtgaggtgagggataaaagactacacattgggtacagtgtacactgctcaggtgatgggtgcaccaaaatctcagaatcaccactaaagaacttttccatgtaaccaaacaccacctggtcccccaaaactattgaaatgaaaataaaaagtctaaacaacaacaacaaatcctctttttttttttttttttttgagatggaatctcactctgtcgcccaggctggagtgtcgttgtgcaatctcagctcactgcaactttcgcctcccgggttcaagcgattctcctgcctcagcctcctgagtagctgggattacaggtgcatgccaccacacccggctaatttttgtatttttagtagaggcgaggttttaccatgttgatcaggctggtctcgaactcctgatcttgtgatccacctgccttggcctcccaaagtgctgggataacaggcgtgagccaccgcgcccggcccttcacgtatttttgagggcacaattcaatccacagtagaaggcatcaagaaggaggaacttgtaaacagtgtaatattccattaaaagggaaaatatataaggactgtgaaatgtctgttgtgtttggcaacagtggggccattaggactttaagaaaactgatttgaatggagtaggttactcctgggacactgagaacactatgacacagtctgtacttggcagagctcaatctaatgaagaaaacaagcaaagagttagagaaagtcttcacactttgccttcaagggtcacagaaagcttcctggaagagacgacaatggaaataggttttaaagcaaaaataagtcattcaaaagggagggggaagcatatcaacctagaggaacagggtggtcaaagacaaaaaaggtggagaatccaggcatggtggctcacacctgtaatcccaacactttgggaggccaaggcaggcagattgcttgaattcaagagtttgagaccagcctagccaaaatggtaaaaccttgtctctacaaaaaatacaaaaactagccaggggtgatggcagacacctgtgaacccaggtactctggaggctgaggtaagagaatgacttgagcctggcaggaataggttgtaatgagccaaaattgcaccactgcactccaacctgggcaaaagagcaagaccctgtctaaaaaaaaaaaaaaaaaaaaaaaaaaaaaaaagggagggtggcaggaggtgggacagataaatcacagtttgtgaagagccataaaataattcagcatggctaaagagtagagagagcagttagtagagagcagaaggtaaggtagaaaaagattaatccagagaaggcatgagcaaccaggtttcaaatgcaggacttatgaattctgccttcccactactaagcttcttagcatttttttgtcctggcccaatttagaaaaccattttgtgggggtcccattaggttcagctttcagttgctggaagagcatggactgacatatgccacaaagcaggtcagaaaatgactttctgtcaacattcatccctactccacgctccccacctctacaacattaacaagaaaatgagaacgcctgcccagatgtcctgttggatgtcactgggtaaattatcttttattaagaatctgtaattgttcttcactgagccgtgacctaaatttagcggtgctgaagagtgagccccagccaacaggatttccctgagaacacgatgaagttcctgtatcaattcgattcattaactagaaagagggaacaagcagccagctttttttttctgcccccattcttcagtgaatcatttgttagtttgaccagaatttttgtgagatccagtctacaattctgtaagaaaaaaagacagcaaacctcattcaaatacttcttgcgacattaattccgaggcagaaaccaaattacattaagcagatctgattgtcttgctattaaagaccttgggtttactcactgagtattttcagcctgaggagaagaaatgctctcaatttgggtagggtgtttggtaactcgggataaaatgaataagagccaacttggctcacaagtggatttaaaaacaggaagaaagagagagaaaaaaataagaaaaaggcaaatacaatacaaacctagtacaagcttccagtgaaaatttgcgtgtttgtaataaagcttataagaaggaagagaaccaatataaattcttgctatgtctaagaacgcctttaattatgacagcccagttgaggtccagagagggacacacagtttctaaagaactgaatcaaaatttaaagctacatcttctgacttaaactccaacgttcctttaccctaacagtaatttttgaattttgacagtgtgaactgctgactagtgatcaagaatgtcttggaatctcataggctgatacctgcacaggtagaaagcaaacagacctcaactcgagtatcattcctcattttttgacagcaatccccaaaaaagaatcatttcatggctccatctcctgcttccctggctggaaccacctgatggctaaggtcttattgtttaggcatttcacgcatccttatgtgagaagtacaaaagcacctggaatagagaagacagtctacaacataccctcctgaagctcagtctttagtcaggaggctaagagacatacacattctgatattaatgtatagtgacatcatgctttcactgacatcatctcaatggagtctcacagcaaatttgtaaggtagtctgaacagatgacattatccctattgtataagtgaagaaactgaggtttaatgggttgagtcactggcccaatgtcacaaagatagtgagtggcaaaacctagcatgaagcccagagtatgtggctctgcgttagtatttctcacagcccactgtaatgactgtcaggttgcttttaagattatgaaagtcctatattgaattgtcattcgaattgagaccttgaagtctgaagacggaattacttgggaagaagcatcacagtatcttagaagagtgtccctccatgaagcagatttggggtctcattccgtttctgtacttacagtaatggaccatgttaggcaagtcatttaacacatttggaccccagcttccaaatctatacaatggaaggtataattggagagagtataaagcctttagtgcccactttacttgagagattttcagagcagtcaatgagactttagaaataaaagtgaacttaaaacataaagtgctttataaaccccagcattgcctgaagccctgagattgcttgatggcccattgcgtatattcacaggcactgccccaactggcccttactacaactctagaaatgacaggcattcattcttccaatccacagatgaggcaactacgaagtgttatttttaacccctcattttttaaggagaaaaactgagcttgagcacattaaaaaatgtggcccagagtcaatatggtatatgttgaccttggaattcgagaaaagtcttctgtcacaagagcagaagccacaaactcaaatacttttagggttatgttaccaattgtggaacacatgtgcatgaaatgagctgagtaagatgccaaatgacctggtattggagaggcaatagggagtggtggggcctgtagcaaactagagagagcatggctcagttaaaagagagtggcagcaactcaactccagccaattgttgccatacaatattaagcccagggatttcagaacttctagctagaaaaatagaggctagatatgtatattcctgttcaaaattgcctcaattagaagatattagcaagtaattcaaatgcaatacacttttgtattatcactatactggtccacctaataaggggacagtttgcttcctgctctcacaaagtgtttcagactaagttatgaccacttaagtatgcaaagacaaaacagtgtatcagtaatgcagtgattgtgagcatgtacttcagaaacaaatgatctgggttcaaatcctggtgttgacattaagtagtttaataacctcgggcaagtcacttgacttctctatacctcagtttccctatctgtaaaatggaagtaataagagtacttactcctttcagtggttgtgactatcaaatgaattgacataggtaaaacaattagaacagttcctgacacacggtaagagtcatgtaaatatcaatgcttatgaaagctctcatcccaggataagcatctcctagaaaacatcttcgtccatgtaccagattaatcatatttattctgcagttgatatttatgccacatgttctttctgggtagagaagcctgaagttattctgtttatcctgaccttggaaaagacaaagcagctcatgtccccagggatctaaaaatttcactgggaatgatcacccagtgtctccaaaacctcagccagcatttctctattcacagctgcactgaagagcttccttcctggcttgtgtctccaaaaggggatacgatggcaaggtctgtaagaggaaggaaaggggacctttttaattagctttctcttttgaatgacgccatcacagatctgattcatttccatgaattgaaaaaaaaaaaaaagcagggtaggtggtaagcactctgtaaggaatgaatgaaactgtcaggagagcacagattagaggaaagctgaagctggagaaaacagccatgtgaacttggccctccaccatgacccacgtttaggccaggagatgatgtcaaaatctaaatttaaaatggaggtggcaaaaggtttgcttccatgattggcaaggagaggccaaaagagagatggaaatgttggtctgattctcagtgttatagaaagtaccaaatgggctatctggaaacttttatgaaagggtctcctgtttgcagatctagttctgtgatattccacaggaagattttctgctttcaggtcaccttatggtgtgtgtgtgtgtgtgtgtgtgtgtgtgtgtatgtgtgtgtgcacataatacatttacatgaaagttcacaagcctgaggcagcctactaattgcatggcatggtctttcctgcagacatttactcgatgataagccaatgtgcctctttggagactgaagaacaggactcagatctatggaatctggaggtagcaccatttctccgctagttttcatgttgtaggctcagtattaatgtccttattacattaaatcatctttcctcacatcagtccttggaagtagatattaattctacacaatagatggagaaacaggcccatagaagtctactaacttgccatagctacatagctactgagtgggattttggttaggtctgacttcttcaaaagcctatgctctttttactgcccccatgcgatcttcaaaagaattacttgataaacaagaggtttttgcacacaaggctattaaccattctccaaaccatcacttccctccatgccattgagtttctttacttctgctgggaaacttctactgtcattttaagacctaattcaaaaatcctgtcctcagtgaaggtttcactgacctaccattccctcagccagataccatctttgtcatttctgggatgtcacagcctatagtatagggctcagctgtgtcagtgattataccagataatgggcaggaatggctttctgaaatttgatgaacctcgtcatgtctaggccaagtcatgctcatcatcgacgtccagtccagtgcctgactcatggtgtcaacaaacctatcttgtatgtgtttgtagaaggaagaaaggaaggaaggaaggaaaaaccaaaggaagggagggagggagagaggcagcaggcatacagacatgatttcattttcataggcaaaagagacttaagtaagaatcattactctttttactgaagtaaaaagtcttttagattttgattcaacaaattgattcctggtctaggctccactactatataatagctcatacagagcatgtatgtatgtatgtgtggacctcagtttccctcaactgaccagagtacattgcttgtctccaaatgttcattaaatatcctgcaaagccttgaactcatcaattctgctaacattttattgtatcctggctaaagttaactcaactctggcagcaaggaaaccaactcagatgggagcagatggctttcatatacgttatttgctctgttgtcagtttgaattcttgctgtttgtatttgtttagttctaaagccttccccaaccccacctgaaaaaaaaaatgtttctatctgggtcaacaggtgtcactgttgagcaatacaactaagcccccctacaccccaacattttggtgctgaaaaccctggctgcttacaaggcccaccctctgctcagtcctgatgttatcaagtgagtgaaatctatagtcactgtgtcagttgcctgaacagacctccaaggagcaccagtatagatttttcttaatgatctaatttctgaatgcaactgtagaccttactacccagaaaaggaggcaactaggaagaagaaactataactgtttccatttgcaagaggtagcattagtggaggagtcttgttgctccatttagaacgtctaaactttagtgcttgcactatcccaaccagctgcctctgttataatgggctcaagccagaggagcccccacagcaagttggcacaggagtgagataggttgcagatcaccaaacagaccagattattagtttagatcatagatcttccaggacacccagagttattcaggaagaatttaaggggaatgtattcacagaaagtaggtggggatagagcaaaagaaatgcgtcaattgctacctgtttattactctcaggctgatgtggccggggagatgtggaattgtgtagaatggaatgcgatggaatatgaaatggtgtggaatacactataggaatgcaaacagaatgaaatcaaatgaaatggaccagaacagaccaggacataaaacagattattgtgtcaaaattacgaaatgaaatacagaatgcaacagaattagatggactttttcattaaatgctttgagacatatagagatgtgtttaattggcttgaaagtcattagcaaattcaggaaattgtcattatagttccaggccagatgatttagctacatagggacctaaaagtctggtgcttttcttgagttattctactttaaaattagcacaagtggtcacctgtcatggcccacaactggcactctgttgtcacaactaacatttattgcctctttgctggaccctctgtatgtattatttcattcaattattctgtcattcaaatggctgaggtcctattttgatctccattttatagatggggaaatcgaggcaccagaaggttaagacaattgcccaagaccacacggctggaaagtagtggaatcagaattcaaacatcaggcagttgggcttgagctcctacatgctaaaccaccacacacactgcctcttatcatgccaggggctcatatcctatgacacttaaatatagaaatattaagatctgcgtattctgttttagccacaaaatattacctgccaaaaggctggaaaacttgggagagtcactgctctgatacagaaacgataacacagcagcacttaactcttctgccatactcaacacaaccaacaccacactggtcccttctatttttaaacaaggtttcattggaggcttccctgatcctattaaacattcctaatcctgatactcatttgctcagcaaacatttcctaagggtctgcaatgaatgcaggcaatccaatcattcatttactcatttaacatttgaacacctattctttctccttaggtttcctttttctctctctctctctctctttttttttttttttttttttttttttttttgagacggagtatctctctgtcacccagactggagtgcaatggcacgatctcagctcattgcaccctcctcctcctgggttcaagtgattctcctgcctcagcctcccaagtagctgggactacagccatgcaccaccatgcccggctaatttttgtatttttagtagagacagggtttgccatattggccaggctagtcttgaacttctgacctcaggtgatccgcctgcctctgcctcccaaagtgctgggattacaggcgtgagccactgtgcctggccctcccttaggtttctaagaaagtggattcagttattgtaaaaagatactcagcaataattttttaaaagacaatgcaagaaaaatatagaattaataattaagtaactaggatctcccctaactgagatcctagaatgcccattttttaaaacgccccactgaggctactgatagctgcctttgttaagtgtttactacttgagagaggctgtacagtctgctcactgagagagactgcctgagctcaaaccctggctctaacaccaaatagccttgtctccttgcgtgagctactaaagcactctgtacctcagtttcctcatctattagatggagttaatagtatagcttgaaagataaaacaagttaatgtacctgaagcactttacagcttaatacaaattaagaatttcataatgtcagctattattattttccaggccttgcatcatgtacttagtagatattatctcttttttttaacactgagtaacaaggagtttttaaaaaataaacttacttttagggaatatttagattcacagtcaaattgatcagaagttacagtattccaaaataccccctgcctccattcacgtatagcctcccccattctcaatatcccctaccagaggggtgcgttggttacagtcaatgaatctatattgacacatcattatcacccaaattccatggtttacgttaggtttcactcttgttgtacattctgtgggtctggacaaatggataatgatatgtatccttattatagtagcatacagaatagtttcactgccatgaaaatcctctgtgctcctcatatttatccctctctctccccaaccactagcaatccctaatcttttttactgtctctatagttttgctttttaaaaattgttacatagttggaatcatacggtatgtagccttttcctgttcagattggctactttcacttagtaagatgcatttaaggttcctccatgctttttcatgaggctttatagctcacttcttttcagtgctgtatagtattccattgtccaccataccacagtttatttatccattcacctactgaaggacattttggttgctttcaagttttggcaattatggttaaaactgctataaacatccatgtgcaggtttttgtgtgcacataccttttcaactcctttgggcaaataccaaggagcacgattggtggattgtatggcaagtgtatgtttagtttcataagacacggccaaactgccctctaaactggctgtaccattttgaatacccaccagcaacaaatgagagtttctcttgctccacatccttgccggcattggtgttgtcagtattctgcattttggccattctaataggtgtgtactggtatcttattgttgctttaatttgtatttatctgaagacatatgatatggtgcatcatttcacatgcttatttgctatcttatatcttctttggtgcagtgtctattaagattgcaggtccgtttataagtaggattgctggttgtattattgttgagttctttgcatattgtgaataatagttctttgtcaggtgtgtcttttgcaaatattttcttccagtctggcttttctgcaaattccttgacattgcctttcatggggcagacatgattaatgttaatgaagtccagtttgttaattatttatttcacagtttgtacctttggtgttgcatataaaaaattatcactatacccaaggtcatctaagttttctttatgttatcttctaggtgttttatacttttatattttaatttaggtttacgttcattttaagttaatttttgtaaagggtataaggtctatgtctagattgagttattgcatgtgaattttcagttgttccagcaccatttgttgaaaagattatctttgctccattgtagtgcctttgctcatttgttgattatcagttgactgtatttatgtaggtctgtttctaggccatctattctgttccatctatctattttcctattcttttgctaatatcatgcagtctttgtagtaagttttgaagttcagtagtaatagtcctgcaactccattcttcttcattatggctattctgtgtattttgccactccatataaactttagcattagtttgtggatatccacagaataattttttgaaattttgattgggattgcattgcatctatagatcaagttgagaagaactgacatcttgacaatattgagtcttcttatccatgagcattgaatatctctccatttatttagttcttctttgatttctttcattagagttttgtagtttttctcatatgtatcttgtacatattttgttaagtttatacataaggatttcattttgggggtactaatgtaaatagtttcgtttttaatttcaaatccctcttgttcattgcttgtatatatgaaagtaattgacctttgtatataaatctcatatcctgaaatcttgctataatcatttattagtttcaggatttttttgttgttgattattttgaattttttgcatagaaaatcatgtcatctgcaaacaaacacagtttttgttcttattaatataactttttttttttttttgcttattgcactagctaggacttccaatatgatgttgaaaagcattggtgagagcatacatctttgacttgttcttactcttactgggaaggcttctagttttctaccattaagtatgattttagttgtaggtttttagagatattccttatcaatttgaggaagttaccttctatttctaatttactgggcattttcattgtgaatgggtgctggattttgttaattttttttttctacatctactgatatgataatgtggttttttttcttgagtctgctaatgtgatggatcacatgaattgattttcagatgttcagcgtggcttgtatacctgagataaattccaattagtcatggcatgtaataattttcatacattgttgaattcaatttgctaatactttgttgaggtttttgcatctaattcatcagatactgaactctgatgtgtctgtacctctggactgtgaacttcatgcctgcttctcaggtttcttccacttcccctttatgtgggacaagatagctgaagtgggctggagttgggttttctcctcctccatttggaaggctggagcttgctggagttgagtatttcttttcctcaggtcagttaggttctgataaaaccctagtgggttaggctctggttagacagcttcccctgagggcagaccctgtttaaaaaaaaaagaatgcattgctctatttcaaaatgcttcctttttttctcctcttgccaaagcgtgaggaaatttttctcagatattcaatgtaagaatgtattagagcttccagaggtaaaacccataaaagtatggtactccctacttctggatcctctgggagatttatctctgacttgttgacactgagcctccagaaataaatcaatgtatagttcaggttttcctaccctggcactggttccaatggatgtttcagcccataggtttctgctccagcaagttgtgattctctttatctgcctatctgtccctccaattctgggggcagtagtttcccttgtgatcttccttctcttatgtatctaagaagaagtgttgatttttttttttttttttttttttaccatttcttcagatatttacttgtttttacgatggagtggggaccttcaagctgcttctacgtcaaactagaaacaagaaatccctggcatttttaatcatgataaccatcctatgaagtagatgttatcataatttctaccagtttacaggtatgaaaaatcaggtaccaagaaattaagtaatcagcccaaagcctcaaagttagtaggtaatagaactactattaggtagttctattacctactattaggtagttagtaggtaatagaactactacaaatccaagccagtccaactcagaagccagggctcttaaacattgtgcaataatatctccttctcaagctgtttggaggtctaatagagtatagggaagaacatccagaagttgggcagaaatgaagggtttcaagtggtcctgaaataaggagggtcatgaaaacaggagaggagtacatgggtagaaagtggtgaacttcaggcagaaaaatataaaaaccactaggccatcaaagaaatgtgccagctcttcctggaaatagctcatagcttcctgagggccccacccagaaaaccacatttaacttcctcctctacttaatctatacctgctgttgcctcctgtctttctcctaccacagctcaattcagccttttctgatttaccaactaccgccatgcctatatgacaactaggtactaaggaagatcatagaaattagtgcttctagaatggccctgcaatattggcctatctaatgtgatgacaccctggtccaagccactgtcttctcattcctgatctctacagtcatttcctagctagttcccctcatttacactactcctcccaaatctgttatccaacctatagacaaagtgagcttccaaatcataaatctatttatctcactgtgttgtataatgtaatgcttgcttttaatcattcttagatcacatccaaatccttaacaagaggcatcctgtgcaaggtctttgtggggagaggggacgtggttagcaggagaatagaaaacaaaagggacagtggaggatatgaaattggaaagttacagggtccagcatctttcaacattagcactcatccagatttgtaattttagcctccattgagaaattctttgattcatgtcagtaagggacaacctcattcattctgaggttcatatgaaagctttggagtcatctttgagttctctcttcctcttacactcagaatttgatctttctgtatatgtgactgcttaaccttcagaatatcttaaccaacattgctgtcagcagcctggtccaaaccacctacttcttacatggaaaatcatcacagaggcctttctaatgatattgctgcttcccgctggcctcatacagtctggtctccatatgctagacaaagcaaatcttttaacacctaagtcagaccacgtgactcctctgtccagaactttctagtatattatcatctcactcagagtaaaattgaaaatcttcaccagggcacacagggctctactcaaagctgcccaccgctctctgctcccataccttgtctgatgtcacttccctttttctctccactccagtgcactgctctctttcttgcttctcaaacactttaaacataatcttaccttcaggtttatatccttgctgttccttcttagaatatcctgttcccagatatccacacaactttctttccagtttccttcaagtctcagttcaaacgtcactttatcaaagaaaacatccctgatcatcctgcctaaaatcatccccctcattgctccttttcccatttttctgctttaattttccccttgtcatatcctaccacctggcacatcattattttgtgtctgttgcatacctccccaacctaccccagtacgatgtaagctgtagaagtcagggactgtatctcctcattctctactgtatccttcattttaagaatcatccctgttatggccaggtgtggtggctctggcctgtaatcccagcactttgggaggccaaagcgggtggatcacgaggtcaggagattgagaccatcctggccaacatggtaaaaccccgtctctactaaaaatacaaatattagctgggtgtggtggtgtgtgcctgtaatcccagctactcaggaggctgaggcaggagaatcacttgaaccagggagctggaggttgcagtgagccaagatcacaccactgcactccagcctggcgacagagcgagactctgtctcaaaaaaaaaaaaaaaaaaaaatccctattacatagagggtgcttaataaatatttgttgtcaataagtgaacatctgtcaactttaagaagctacagcttcataagactagtgttgttctccattagtccccaatgcatggcagagtctggctcatgaaagacacttaaaatattaatagaagagtgaatgaacaaacaattagggtagcttattgactgtgagatgaggatcctaaaacatgtagcgaaagggtctggaaatgtgaggcagggtgatctgccacctatgaaggtcatttgagaagaacaagtcaataccccattttcagaggcccaaggttagattctgggctggaggatagacacagggttgagggaacatcctggaagtcagaagtgtggcaaagttgggcctgtaggagtgagcacttgatgctttatcccagggcattagagcctatgagctctctctggcctctgttgaggattaacattggaaacagtaggaggaagtctccattgaagtgtcaagggcttccatgcagctggagaagctgagcagtgcagaggctgggaatggcagtgtctatgcatgaggcatttcaaaggtagatttttgttttcccagggaagtttttacttgggtggtcagggggactgttagtccatggagagtttcctggcttgaactgaatgtggatccaattcttctaaagaggcactgtgccttccaacatgttttatttcagtcagtgcaggcacaactgtagtgccacattttgctgacccacctgaaatgcaaataggaagagcctgctttgcttcagaggttgcctcccctcctactctgcaagaagccaatcaataataattttactgaagacactaggttccaagggactgaatctgaagagatgtcttgatataatgaggaaaagtaaatggagggtggaggagatgccattcaaatttaaaagaacataaacaatgagttatctgtgctacatatctgagaggcagcgtgatgggaaggaaagaaagcgagctgagcactccagaccaagccttactccagaacctacagaatgtggggctttgaaatggcacttaagatttctgagcctttttgatccaaaaaatattgtttcctatatgcttcttaaaactcaatcaagaggttaataatatttgcatagtcttttttgaaatactcacatgaatttgttaatgtaatcttctcattcattctacagagtagaaattagtgtcattctcattttatagaggaggaaagtgaagatttaaaagttgcaggagcctaccccagccctggtggtattgtggcaacccagccactcagctgtcctcctctcagagttttctgctgtggaaaccatgctccagggagcattaactatatagaaaataaactaacaccataaataaccagagaaaccccaaatatctctaaatgtggaactctctagtaagaaactgggattgcaggaatgtctgaatcctaccccgtttctcaacaacccctctatgagatatctgggaaaattcatgcttgaagatgaaggagaaaagataaacaaaggtctggagttttctgagctagattgatgccccaaagtcttagtaaactgaacataaatggcccaactaatagactagaggggctctccaattctcagttttcttatcaaaccacagaagagttgcaaaagtgtagaaggacacacacacatgcacgcacacacacacacacacacagagaaaacacatacacacacagagacacagagagagagagagagagagacttctagagggtcttttgtcataaagaatggaaggagagagcagagatgcccacaggtagataacgtttcaacaactgttgctcccatttaatagtcaaattgagcactccacagggcaaggtgagggtgaggcgagcaaggcccttcaggtgaaaattttacagaggcatggattctcagatttgtgacacctgcagggtcagcacctgcgagtgggtgcttctggaaatgttgcaccctgtgagcctcacttacattaccctagtcccaggtctgcagtcagtatcctaaaatcaaaacaatttatcagtaaattctgctcttatggaggatctaggtgagaagaggtgtgggaacctgtatctccccacaaccctaagcatggaccttcctattgccttgcatctgccattcctctagactctcagtccttctcaaactatactgcacctggggatcttgttaaattgtattctgattcagtaggtcttggatagggcctaagattctaaattctaacaagcttccaggtaatgttgatttgtaatggtccacttaccactctgagcagcaatgcctagaaatgatggttcttcaaatccaagtgataacccatagtaactaactcattagcttagttctgccgtaaagtcagaacaaagcaaggagaaacagaacctctgcagtgaatggaggaatttctgagggtcacttgaaagcagaaactcaagagcctgaaagaataataaatacataagcttctggatatttgcagaaatgtaataaagttgtaagattcaggggcttataataaggttggcttaaaccaagaaaattatgcttgtttcatactgcttccattccaaacggcttctttccagatagatagacctgtcctcccaaaaaatctagtcatctcatagaaagaatcaaatggcaaattgaagcttttaggtactgtcctggatcattttgtgttgtgagaaaagaatacctgaagctgaataatttataaagaaacgaggtttctttggttcacagttctacaaactataagaagcctggtaccaacatctgcttctgatgacaccctcaggctgcttccactcacagtacaaggcaaggaaaggctggtgtgaactgaccacatggtgagagaggaagcaaaagggaggggggcaggtgccaggctctttttaaccaccagttcacttgaaaactaatgagtgagaactcactcacttctcctcccactccagggaaggcattaatctattcatgaggaatctgcccccatgacctgaacacctcccattaggcccccatcttcaaaattaggatccaatttcaacatgaggtttagggggacaaacatccaaactataacagacacctttgcacatgcatcaactctgcataattcctgatatcttacgggtgcaaataaagtgactcaacattgatttagctaccattttcaaaagtgtccataacattaagcacaaaaatttataccattacagaaataatttatattgcatgtatatcttcttattcaaaattccttattttcacatgatgttgtgcttggcaacctagaaggacatgcaaaacacacacacacaccacacacacacatatacacatgtacaaacacatgcacatacacacagcaatactcacatacacacacacacccatacacacacacatataccacacacatacacacacacaccccacacacaaaagcatatctacagccacaggaaatccttgacaaattcataagacatttaaagtttttgaaaacaattttatattgacaaataggacaaaagaggattgagtagctgctacgtaagaaatatcatgtgaaacatggtaaatcatgttagatcaaaagtatcatttacttctatatccccaattcccaggaaaatgtttcatatacagcatgtagttcatttctattttaatgtatataaataaattgttgaaaaaaaaaacagagaaatggaaatgccatggtaatgattccatcttaaagcagtattttagccaggattaggggaggaaagaccaggaacaatctctaccagtgggacctggaaagagcagatcagggaacaagttttcaagtgaagcttgaacatttaaggcaaaactttagtcttggtgaaataaaatctgggacaggaagtgagagaagagtccaattattttggccaggccagtttgaagggcatcaaggaaaaccttcagagcagtcaacattccaccattcagtgttgacaccagatacagcaggaactagccatgcgcaggaaaccattcttgatttggccattgctggctagggttccatgcagacagcttaaccttgccaaatagacctggagctgctaatattctcccttgtgctatctaggtttcctatatattttgcctccttgatccactagaacatgggctccatgagggcaagaatgcctcttttattataccagcatcaagaaaagtgcctggcaatggaatattatgcagccataaaaaagaatgaactcctgtaattttcagtaacatgggtaagcttgggggacattatgttaagtgaaataagccaggcatagaaagatgaatattgcacattctcactcatatatgggagctaaaaaagctgatctcatggaagtagaaagtggaatggtgcttaccaaaggctgataggggaggcgataaagaggcttgttagttacaaaaatactgttagaaaaaataagttttatggttcaatagcacactagggtgattatagttaataataatttattgtatatttcaaaatacctggaagagaagacttggaatgttttccatacaaagaaatgataaatatttgagatgatggatatcctagttacccctatttgattattatatattatatgcatgcatcaaaatatcacacgaacttcataaatatgcagttattatgtatcaacaaaaagaagagtgaaacaaaatacgtactcaataaatatttattgcatgaataaataaatgaagtagaaaaattaatgaacgcatgaatgaactgaatggacagaagctttgtgggaggcttagagtacttcactttgaatcaggaatgatgatgcagagtatcaatatatgaagtccggcttcagaagaaattaaaaataattgagaaaacattgcagaaacataagaaaggttaaataaagatatgagaattaactagctaagtaataatttcaggaaatgataaacattttttgcatttgaagtcatgtcatttgattgggaaatgaatgtagaaaaagaaaggacagagacatgtggagtggccaccacaacatttttagagatgaggtttgataatacttttttaaaaatttcatggatcatcaagatcttttccaaagagtcaaaatcatgaagattaaaaccacaagtgtttattgtctgataatgctatcaaccttgatttaaaatttgcatggaaatgccatcaaaaaggctatcttaaagacatatgtctgggccagcctagctgaagatattcctgagatttatagattctttaaagtcaaggcaaactattccaagatacaaagaagcttaagatagaaggagaaatgatatctcagcagcactctctctctgagcccaggtctccttacttctggctctataggcatcagaagttatctagaaagttgctcagctttgctctgtgtaaacaccttgggctaagtgaccctcccacatctttgttttacatttataaaagagagggtgtgattagtttttgtaggcagcaattggcagaaagtgggtcagttggtaagaattctaatcagtcacctcagaggcagtgaaaatgtctcatgctcaacccaaagatgggaactttctttgataacacaaaatttaatttgttgtggccccttacaatgtctccaggcatgtgtgatatcaacttggaagagggggtgaattactgggacttttcctttaaaaaggcacagggaagcacaaagacattatcaatttttctttatgggtaacggtatgtttttaaaataatttcttagttgcttcttactaaaacctttatgttgatctgttaaaacttaagacgatatagaagtcatattcatctgatagaggagaattattgcacataactttcaggtcatacatagctaatgactacatcatcctgatgtttccctcttctatggacaagagaaagtttctttcttctgattaggagaaattggtcatgaggactcaataaacacaataataaaacaaagctatgttattgtcctctcggttcttcagtgtgagagaaataaaagataacttattaggagctaatgttgatagaaatcatttcattaccaagatatggaaaagcaaatatattaataattccttaattagaattacgcattgctagaaagtttgagaatcctgtgattgaattttaacatcaagttggtctgaaattacacaatagtactcaatctcataaagataataatacaatagtgctcaatagtacaatagtattcaatctcataatttcagaccaacaaccatcaggttggtctaaaattacacaacagtactcaactcataaagatactaacagcaaaacttggctacagaagaatagaaataaccatgtatggttttgctgtgactaataattaataagggatagtgaagaagatacatacttttatctttaatttctctaaaaccattcatacatgtagacatgtagagtttcacatacatatgcagctattcctgcacacctgtatatataatctttataattattaaaactataattagctatagacgttcagttttagtattaaagtttacattttgaattttaagagatagcaagtaaaaaggcatatcaaccttttcaagctgccatgaaaaacgaatgaatgtatgaatgaacaactattattcaaagatagcgaccacaagtgaggccctcattgccacctggtggcagcataccctaattgaagaattagtttttaagtgaaattgagaagcctatacacatcaagtgacgaaagccacatcacgtgagatacatgacacacatgagatagtagagggtcacaacccctggtaatttgaatgcaatacttctatttttattttctacctcaagtaaaggggagtaacacaactccctggtcaccacggagcatactttggttccaggctggattccccacaggcgatatttaagagtgctcatttaatgagccacaaagctattttacccataaggtcacctgaagcctattcagttgccatattgactaaaaatgttttttaaaagttttattatgtcattctataggcagagtgtagtgaaaataacgttggttatccatctagatcagcagcgtgttctaggaatacctatcctttacttctcaaaaattctctgtagttcaatgaatttgtgcacaaaattatttacaaaagattattttattaaattaatcccaacacctaggccacaattcagaccaattatactagaatctttgggaatgaaaataggcattgatatttttgttaacattccaatttccagccagtgttgaaatcattgaactggagtaaaggctgaagcataggccaaggaaagataattttcctatttaaaattaagcaaatttacagcaaagatcaatataaaatccaagcatatataaaatatacgaaacaaaaaaatgccatcagcgtctatccttcagtaatgaaaaattactctttccgttattgaagagcagtggaaagtaaactagctttagctgacagcttactgtggaggagctttctgtttacatttcatgtaagaacaatgtatttaatcttcccccacatcttcacccatacggtaagcagactgtattatccccgtgccccttaccgtttcggaaactgaagcaaaaattgattaattagcacaagatcatgcaagttttaaatagcatagcatggatttaaacttgactgtgtgactccatatcttcagtgacggcttgctgaattcaaattgtttgagaaacagaatagcagccatcagacatccaaggatctcccttgattcatgaactggattcaagaactggaataaagagatactttacttctttacaagccttacaaaccactaaggccaagggccaaagtcttaacagtagcactgtaccctgattctaagcttgcagttgtaattgattcaacagtaggaattttcactagtactttacaggtttagagagagaaactcggttcaatgatgcatctgacttgccctgtgtgttttctccttgtttacccgctggcctactaaaagaaatctacttcaaatgcaaaaaaggtagaaggtcagctgattagaagttaaataagtcaaaggcaaattttcaatggaaaatcttggtagaaagaatgaatttttcagccataatacagactaccccagtagtttcaaactgaggtcagtcatggtagctggttcacagtgtcctctactttggacttcccctagacacctgagctgtttcagttttgcctcctgggtatcttcgtgatttaatcagtcaaatagtaaaataggatttactcagcttctactcagcctctacttttttttttttttttttttttttgagacagactctcactctgtcacccaggctggagtgcagtggcgcgatcttggcccactgcaaactccacctcccgggttcaagccgttcttctgccttagcctcccgagtagctgggagtataggcgccccccaccatacctggctaatttttttttgtatttttgatagagacggggtttcaccatgttagccaggatggtctcgatctcctgacctcgtgatccaccagtctcggcctcccaaagtgctgggattacaggcatgagccaccgtgcctggccagcttctacttatgtgtgcttaatgtaggtcccttccaccataagtttgcgcctggtgaaaaaaaaaaaaaacaatatatgcacatgtgcaagtctattcatgacacttctgagctcaaaatctctacagtgactttctcttgcttttaaagaaaaaaattgaactcacagccgagcatgctagctcatgcctataatccaaacactttgggaggctgaggcaggaggattgcttgagcccagaagtctgagaccagcctgagcaacatggtaagaccctgtttctacaaaaaataaaaaaaaaaaaatagctgggtatagtcatccacacctgtagtcccagctagtcaggaggctgattgcttgagctcaggaggtcgaggctgaagtgagctttaattgtgccactgcatgactgcagcctaggcaataaagaaagactttgttccaaacaacaataaaaagatgagatttttgacagattctaagacactgcttttagacttgggccttgcctagccctctgaagtcttctatctcatcatctttctttcagttctctaaaagtttattcttccctcctcaggacctttgcctatatctttccctcttcctagaattcagtcccagcttccatacttctctcagggtatcaataactgactgccatgtaacatgccaaccccaaactcaatatattataaccacagctgtcttattagctcatggttctatggccagcaatttgggctaggatcagcaggatggttcttctgttattgcctggaatcacttttacagctgcagatatttggcatctgtagtggggctgaataatctaagatggcctcacacagtcgctgcaggctgtcaactggttggactcaggggactcagctgcaacagtttttcgcttttctaccagcctctcatccactaataaactagactagactagacttcttcagctggcagtctcagaacaatattccaagggagcaagagcagaaacttccactttatctgttggacactgcaagtcaaaggccagtccagatttaatgcatggggaaagcaattctacctcttggtggataagctggtcatcttttatataccacacctggctaactaacactgacacttcagatgtcagttcccacatctcttctataggagaacattactctgaatcatcagatatgataaaatcctattatatgctctcaaatcaccctgttcattttccttatagcattggtttcattttacgagcaaatttttgtgtggttatttgattaaatctggtttccctcctgaactgtgaactccatgagggcagggacaaagtctgtatcttcagtgtctaccataaagtagggcccagcatcaggattccataagtgcttgttgactgaacacatgaatgtgaaactaaactgggaggaaagtggtttagaaagttactctaccacttcctagttgtgggaccttcattaagttacataaccactttgttattcagctttcacataagcaagctgagtgtattcacacatagtaggtgccaataaatgcctttgaaagcaatatgaggttagtcacttaatagtgaatgaaaattgtatattttatcttaatatatttttggtgcatgagaaatcacagaaaaacagggaatcgttaactcctatgttgattaacattggcacatttataaatactgttctaactactcttgtatcattgtattagtccattttcacactgctgataaagacatacctgagacggggcaatttacaaaagaaagatgtttaattggacttacagtttcacatggctgaggaagccccacaatcatggcagaaggcaaggaggagtaagtcatgccttacatggatggcagcaggcaaagagagagaatttgtgcaggggaactcctctttttaaaaccgtcagatctcatgagacttattcactatcacaagaacagcatggcaaagacttgccccatgatcagttgcctccccccaggttcctcccacaacatgtgggaattcaagatgagatttgggcagggacacagccaaaccatatcagtcatgtatgtataaacaggggcagagcaaagtaatgtatagattcaatgctactcccatcaagctaacattgactttttttgcagcattagaaaaaaactactttaaatttcatctggaaccaaaaaagagcccatatagccaagacaatcctaagcaaaaagaacaaagctggaggcatcatactacctgacttcaaactatactacaaggctacagtaaccaaaacagcatggtactggtaccaaaacagatatatagaccaatgaaacagagacctcagaaataacaccacacatctacaaccatctgacctttgacaaacctgacaaaaacaagcaatggggaaaggactttctatttaataaatggtgctaggaaaactggctagccatatgcagtaaacagaaactgaaccccttccttataccttatacaaaaattaactcaagatggattaaagccttgaatgtaaaaccccaaaccataaaaaccctagaagaaaacccaggcaataccattcaggacacaggcatgggcagagacttcatgactaaagcatcaaaagcaatggcaacaaaagccaaaattgacaaatgggatctaattaactaaagagcttctgttcagcaaaagaaattatcaccatagtgaacaagcaacctatagaatgggagaaaatttttgcagtctacccatctgacaaaggtctaatatctagaatttacaaggaactgaaaacaaatttacaagaaaaaaatcaagcaaccccatcaataaatgggcaaaggatatgaacagatacttctcaaaagaagacatttatttggccaacaaacatatgaaaaaaactcatcatcactggtcattagaaaaatgcaaatcaaaaccatgatgagataccatctcacaccagttagaatggcaattattaagaagtcaggaaacaacagatgctggtgatgctgtggagaaataggaacgcttttacactgtttgtgggagtgtaaattagttcaaccattgtggaagacagtgtgatgattcctcaagcatctagaaccagaaataccatttgacccagcaatcccattactgggtatatacccaaaggattataaatcattctactataaagacacatgcacacgtatgcttattgcagcactaattacaatagaaaagacttggaaccaacccaaatgcccatcaatgataaagcaaacatggcacatggcatataccatggaatactatgcagccacaaaaaataatgggttcatgtcctttacagggacatggatgaagctgcaagccataattctcagccaactaacacaggaacagaaaaccaaacactgtgtgttctcactcataagtgggagctgaacagtgagaacacaaggacacacagagaggaacatcacaccctggggcctgttgaggggtggggcgcgttgaggggtggggcccaaggggagggagagcattacgacaaatacctaatgcatgtgggacttaaaacctagatgacgggttgataggtgcagcaaaccaccatggcacatgtaacaaacccgcagttctgcacatgtatcccagaacttaaagtaaaataataataatttaaaaaaacagggcagaggtaaaatggtaaaaaaataaaataaaataaaagacaggagcctgaggtcagccaccaacagtctttgtaaccctcaggtggcacatgtctttttttctcatagatggagaaaatttccagggttaatctactatcttgccaaaaatacccatgatttgtcagttaatcccctgatattctttgtgctggaaaatctgtcagaatgaccaaaaaggcttacattctacagtctatgagaaacaaaaccactggggtagactgaaatgaaatacagtcattagtagtaagtttgaggttgactgctctttaaaaaaagaaacagttttttttttcttctgtttttccagtagtgtcactcttcaggggcccctctttactttgtactctttgacagtcagaaatatacctacccatttccaatttcctactattgtacttgaaatatggatttcacatatttggggtaatcacttcatcagtaaagttggccttcgtaagttaaaaacactcaaattttagaaactcaatgttctgtgggttacaaatgactgcccaccatgctgtggggcatgacacccttttgtaatttctgaaatacgaagtactattttttctttaatgcattctctctttttagtttctccatcctgtgatatgtctgtccaaaaggacttcccaaaaaccactgtatggcagaaaaggttttcaaaatgcatgagagaattatagcaaagagaaataactcacactaaagtttttaaaatatctccggactatggctaggaactattactatggctaacaagtgtaatttcagcattttgggaggccaaggcaggcagatcccttaagtctaggagtttgagaccagcttgggcaatgtggtgaaacccccctctgcaaaaaatacaaaataattagcggggtgtggtggtgcacacctgtggtcccagctactcatggaggctaaggagggaggatcacttgagcccgggaggcagaggttgcagtgagctaagattatgccactgcaccccagcctgggagacagattctgtctcaaaaaaaaaaaaaaaatctctggactataaactctcatgaatctagcattatttggatcagaaatatattcataggatagactgtgatgacaaataaatcaaatttgggatgcctcaacacaagaaatatttttatgtatcattatgtaacagtccagggaggctgaaaatagagtgtatgttgcaggtaagaaattttgctctgcagtcattcaggaattgaagctgatagtgattctgccatcttgaacatgtggcatcgctgtctgtctggagggtgccatcacagtcagctagaaggggaaaggacacagagaaacacatatggagtggccacatcacttccattcacattccactgcccaaagctcatggccacaattaattgcaagagaagctaggaaatgctatctctatatatacacgaaggaagaagtggaaggtggactttggtaaaccgtatctcatgtaagaaaaattaggctgggcatggtggctcatgcctgtattcccagcactttgggaggctgaagacggtggatcaactgaggtcaggagttcaagaccagcctgaccaacatggtgaaaccccgtctctcctaaaaatacaaaattagccaggcatggtggtgcatgcctgtagtcccagctactggggaggctgaggcagaagaattgcttgaacccgaaagacggaggttgcagtgagccaagattgcgccattccactccagcctgggcaataagagtgaaactctgtctcaaaaaaaagaaaagaaaaaagaaagaaagaaaaattaaaactttcaataagagaatattattcttcagtattattttccatcacttcccaaagtgatgcttaacttcctgctagaccagctttcatgctgatctcaaaacacagtgttcttccagtctgtctcatgctctcccatatctgcaatctttgctctgcacagtggtaaggaccatttttctaattctatattcttgaatcactcccagttattccctggatagagtaatatgaggcatggtgtctctctgaatttctttctttatctctaaaatgggaatactactaatatcaacctcattgttgatacgtattaaatgtagttgacttcatatatgtaaagcacttagtatagtgaacgtgtctgaattattgttctataaccttaccttccatgattctatctaatacacatcccaactcagtgatacacagtgtcaatgacagaaacataatcagcaagaataacaatcacttatgcagtgcttcctatgtgccagaaactgtgagataataaatgtttgtttttgttgttttaagacactaaattttagggtgatttgttacatagtagcagataaagtggtaagaggttatgtctactctgtttaactgttctgggcctagtttcctacagtctctaatgtttcatctgtaaaatgacgacaattccccttttatccatttgttacaattacattaaagtattaccttagactaagacacatgttacaagggatatgaaagtgtttcactcaatgcccagcacatggaagatatttagtaaatatttccataatacttctgctgcaacaaatcacacagctctctcctcactaccagcttggatttctagcaatggagagagtttctttaatgaattcctacacataattataagatcctacataggttgctatccaagaaaattaaggaaaaaatcatttctacactaattctcagcatgcctgagcagcttacaaaggaagctctttccacgtgtcagtgtcacactccaggattttaatgtcccatttctgagaaaccattccaaactgcggtaaatgcagtccaaatgtataaggacttggtacattggtaacaaagcacatgcaagaaaaatatgcaaactcaggaaaaatgcaaatttgaaacagtaagtgatttcacttggtcatgaaataccccagggagtgcaccagggcagtgatttattaagagaacttttagaagtaagtgtacaaccccaagcgctctgtgggtttctataagaccccacttttacaattgggagagactaaattctcttgggcctttaattatctgttcttaaaaacctaaataataaacattgcaagcactcagccagttcataattattttcatgacagtgaccctcttggggttttgctgattggtccttacttagaaggtgtaaatagagtaggcaagtaagaaaaacaaagcataaaagaggcagtgcatctctctgcttgaggaaaactcactttggacagcaccttgaatgctatcagggaagctagagtgttctcctgttctttgctgtccttgccagtgtcttctcctgaactcacatcagaagcatgccttcaaggggaaaatgcaacaatagtaatattaataataatgagtgaagtgtattaagcacttttgtgccagtactgttctcagacaggcaaacagactatttttcacaatatttcacaaatgaggaacagaaaagttaataacttgaccaaagtcttacagtaagcaggtggtaccagcagggttctaacccaggcactccaattctaaggtcaactttgttagtgttatctaaaaaagaaaagcaataataaattatccacaagaaaattttacaactcaagtttttcatactctttaaaaaggcattttttcacatgtactctcatgttctatgattagacctaatcattgtcacttcacggctagagaaactaagaccagaagagcttccagatcttgactagcaccactcaatgagtgggatgaccagaaccctgtactgatcatgcaaacttcaccacataacagcttgtgatattgagtgagttgtttcacctatacgacccctctaaaccaatttattaatctagaaaatgggaataatagcaatttctatgtaataagttgttggagcacaagataaagttatatgtataaaacatttagcacagttcctggtgcataacaggtctgtagtaaatatttgttgtaattagcagcaaaatcatctccctcattactgcagttgattttcctttattattggaaagaaatttctcaactgagtttcagttgaatacagtattagattattccttaactgagtttcagcattttaaatgtatactccctactcaaaactacctactaaatcacgcctgtaattccagcactctggcaggccaaggcgggtggatcatgaggtcaggagatcaagaccatcctggctaacacgatgaaaccccatctctactaaaaaatgcaaaaaaattagccaggcgtggtggctggcacctgtagtcccagctacttgggaggctgaggcaggagaatggtgtgaacccgggaggcagagcttgcagtgggccgagatcgtgccactgcaccacagcctgggcgacagagtgagactccgtctcaaaaacaaacaaaaaaacacaaaaatctacctactaaaaagaagttcttcaatgcttagactttgagcaaagaaaaagtctgctctaacaggaagctggtgatatagaaaggtaaagtttcacttcacaggcactttgatttcccttcgaggtggatactgaatgatttgtgtgtgcgcacatttttctatgcattattcaaaattaaaattccttagaggaaaccactgaaagccaatcatttacaaaactttaaaaatgacatcttgaagagttctttggtgctcattcatcaaacttagcaatgatttaactgtaattctttattcagattcatctcccacaaaataaaaatgccataaagctttacagtactgtatcctaatgaatagagaaactaaagaaaaagtaagatgagcaagtgagaggaaaacccgaaaatgagcctgtcctggcatgtttctaaaaagaaagaaacaaacaaacaagcagcccctcctctcagctcttgggaaagaaatattgaatcttgacaatatctgcacttcatagttgattcatagcatgacctatctcaaacaatttaagattcaaatgaagtttgcaattaatctttcgatatcactttgcaaaacattctcataaccttatccagcccttttacaaatcaatcctgtgaggtgaacatcactgtgttcccattttacagagaaaggcactgagccacagagaggttatatactcatgatcaataagctggtaagactaagaaccaggaatgatactgtcttccttctccaaatatcctgttctttattatgagtacctaaacagtattaaaaattaattacagctcaacaatagtaagtaaatgtcctcatgtgaaatccaccgtttaaaacttaaggttatctatttatcaaataaattaaatcctactcacttaacaatattcattgagctcattctgtaaacaaccattaggccaggggcagatatgaaatatgaggctcaatctgtgatcacagagatgaaatatacaatttagagagagaaagataagcatgatgacaaataaataatgtatgaaaattagccattatcttaggccaactttttctaagctgtaagctgtctgcctacttctgccaggtgttagtaattgttttaaaaagtgggggaagaagagtacttcatggtgggaagatattcattgaggacataagcatcttcctcttagaaattaacaatgcacagtggcctattgcaagttttgaaagccctgcaaacaataaaagcctgattagtttttattgaatcagtatctcctaaacactttttcatgaaacaaggttactcacaaatcttgtcgaggaactaatgtcctaggaaagtggttttcaagcttgagcatgtacataagtatcattggaaaggttgcaaaaatacaaatgtgtgggctccactccagaaattctgattgaagtggtctcatctgtcatctgagaacttgcatttttgtcagattcctagctgatctgatgtttcaggactgagaacttaatttgagtagtatctctacagaacagtttttaaaatgttctcctggagtaggatgattatacttaacaaaaatgtaatacactcaggtgatggacacccttagtatcctgattggatcactacacattatatacatgtaacacattttctcaagtaccccataaatttgcacaaataaataaataaataaaattatacttttctcaaataaaaaaataaaataaatgttcctcttgaatggtagaatctttgtttttttgtgataatcataaatacatataaatattctcatcattacatgcatgtagttaccttcctttacatgatgcaccagaaagaatacccactctaagaaggaaagaatgaagagaagaaggcattgtttaaaagacctattattagaataagtcaaattctatgtctaccattattaagctgtttgactttgagcagggattggaaggcattttaaattgaggtggagatatgcacaaagccacgtgggaaatgtcatgtgtccctgcataaagagaacaagctattttgcttggttggagatgaggagacagaggctgtacataagaatgtgttcaatttaaagcaacaaaatatatcgaccaaactactttgagcaatcaaggggatatattggctcacatcactgaaatatatactggcacagcagatttccagttaggtctgatctgctagctctgtcccctccagaatacaggctccaggcaggcaggaaggaagaggacatcagttctcttggtgtctagcacgctgcctgtattaaggtaggtcctcaataaattcatgttgtaggaaatgaatgcatgttctcaaagatgcggttactttcagtatcactgctttcctcatggtttccacttcaatattagtctaacttgccttagggacccaagatggctgctattcacttcaattagctaaacacttctcttttcatggctgtgagagactagctacctcttccataaatgaattttctcttctttctgggcacaatagtctctatttcccagcctcttttacaattaggtgtatccatgcaactcagttctagccaatggcgtgtgagtagtagtgatatccaccacttgcagacctacacataaaggctcccagacacatcttctgtgctctttactggaacacttgcttgattccaataaatacagcaaccttagcagctacatattgcagttggcagagctttcatgtttcagcttcttcatattttttagttttgttgtcactgttggttttttttttaattgattcaggagatgacctaataaaaaattgaagaaaaataaagcattttgttctggatttctcattaggaacatgaggtttactctattgcaactggcttagttcatatgatcatcccctgaggtgagggaaaaagatgcgtgaattgattaagccaaggtcacatggtcgaaatgtagaattgggttttgaggtcagtttccctaaatcacccagatatccaagtggaaatcaggctccattgacaaaagggaacagttcttagaaatgcaactacaaatgtccaatcccagttggcaagttcgaagcaaggaagggctttccattaaagaatgtggatgctacctggtgggcaactggaggccactggcatatattttttttggggggggtttcataaactattggtttttttaattattattatactttaagttttagggtacatgtgcacaatgtgcaggttagttacatatgtatacgtgtgccatgctggtgtgctgcacccattaactcatcatttagcattaggtatatctcctaatgctatccctcccccctccccccaccccacaacagtccccagagtgtgatgttccccttcctgtgtccatgtgttttcattgttcagttcccacctatgagtgagaacatgcggtgtttggtttttgtccttgcgatagtttactgagaatgatgatttccaatttcatccatgtccctacaaaggacatgaactcatcattttttatggctgcatagtattccatggtgtatatgtgccacattctcttaatccagtctatcattgttggacatttggcttggttccaagtctttgctattgtgaatagtgccacaataaacatacgtatgcatgtgtctttatagcagcatgatttatagtcctttgggtatatacccagtaatgggatggctgggtcaaatggtatttctagttctagatccctgaggaatcgccacactgacttccacaatggttgaactagtttacagtcccactaacagtgtaaaagtgttcctatttctccacatcctctcgagcacctgttgtttcctgactttttaatgattgccattctaactggtgtgagatggtatctcattgtggttttgatttgcatttctctgatggccagtgatgatgagcattttttcatgtgttttttggctgcataaatgtcttcttttgagaagtgtctgttcatgtcctttgcccactttttgatggggttgtttgtttttttcttgtaaatttgtttgagttcattgtagattctggatattagccctttgtcagatgagtaggttgtgaaaattttctcccattttgtaggttgcctgttcactctgatggtagtttcttttgctgtgcagaagctcttcagtttaattagatcccctttgtcaattttgtcttttgttgccattgcttttggtgttttagacatgaagtccttgcccatgcctatgtcctgaatggtaatgcctaggttttcttctagggtttttatggttttaggtctaacatttaagtctttaatccatcttgaattaatttttgtataaggtgtaaggaagggatccagtttcagctttctccatatggctagccagttttcccagcaccatttattaaatagggaatcctttccccattgcttgtttttctcaggtttgtcaaagatcagagagttgtagatatgtggcgttatttctgagggctctgttctgttccattgatctatatctctgttttggtaccagtaccatgctgtttgggttactgtagccttgtagtatagtttgaagtcaggtagtgtgatgcctccagctttgttcttttggcttaggattgacttggtgatgcgggctcttttttggtgccatatgaactttaaagcagttttttccaattctgtgaagaaagtcattggtagcttgatggggatggcattgaatctataaattaccttgggcagtatggccattttcacgatattgattcttcctacccatgagcatggaatgttcttccatttgtttgtatcctcttttatttcattgagcagtggtttgtagttctccttgaagagttccttcatgtcccttgtaagttggattcctaggtattttattctctttgaagcaattgtgaatgggagttcactcatgatttggctctctgtttgtctgttgttggtgtataagaatgcttctgatttttgtacattgatttttatatcctgagactttgctgaagttgcttatcagcttaaggagattttgggctgagacaatggggttttctagatatacatgtcatctgcaaacagggacaatttgatttcctcttttcctaattgaataccctttatttccttctcctgcctaattgccctggccagaacttccaacaccatgttgaataggagtggtgagagagggcatccctgtcttgtgccagttttcaaagggaatgcttccagtttttgcccattcagtatgatattggctgtgggtttttcatagataactcttattattttgagatacgtcccatcaatacttaatttattgagagtttttggcatgaagagttgttgaattttgtcaaaggccttttctgcatctattgagataatcatgtggtttttgtctttggttctgtttatatgctggattacatttattgatttgcttatattgaaccagccttgcatcccagggatgaagcccacttgatcatggtggataagctttttgatgtgctgctggatttggtttgaccactggcatattttaagcatgggagtaacactgtcaggttttttaaattacaaaatgctttagcatagagaaaattataaagaacaatataagtaacagatatgcactcactatcctgcttaatcaaatgtcacactttgccaagcttgattcaaattttttaaagcaaagaaacattacagatatggctgcaacatcctatgtgccccaccgctgatacatacctctcttcccaagggtaaccactttctgactttgatacttatcattcccaggcatgattaaatgctattgctgaatttgcatatatacataaataatatatacagttgtttgcatgttctaaaactttgcattaaataatatcaaataattaaaaattttcacaaattgcatttttaactcagtcttttataagattgccaataatgatatctcttcagatcattcattttgactattatattatttttcattgtatgactatgccatggctcacttatccattctgttattgataaacatttgtgttgtttccacaattttgctattaaaataatggcattgtgaacattcttgtgtgtatatcactgtgtacacatgctagagtttctctaatgtattatggtgtatattgctgggccaaaggctatgtaagtcttcaacttccctagatgtcataccaactcatacatatatgaccagtgtgagcattctcagtgctctacattgtccagattctacatgaagcactggtggcctattggtcaggttgactgatattagaaggttattgccaaagtctatgtgagagagactgagggtctgaaatacctagatgtaagggatataaagtgagagaggaaagaagttaacatatttaggagcaaaatccacatgactttgtgattgattatggagaaaataaggagaagaagggaacaggaagactctcaagtctccagattgaacacaagaggaagcttatgtgccgtgagactgatgacaaattccttttgaacatagtgcctttgagggcttggtagtaaaaaagaaagcactatccatcaggcatttggatatttaggtctggaagactgaaaagagatcaaaacagaaaatacaaattatagaatcatcgagatgggtaaaatcagaagagttggatcaagaaaagtacctagaatcagtagagaagtgagttaagaaaatatctctgggaaacattaatatttaaaggtatataaaaggaagagaagactgtggagaagacagagactgaagaaggagacaaaatgtgtcatactgtagtagccagaggaatagagcttcaaagaatgagtggtcaaccacattaaacacagctagaaaaccaagaaggtaaagaaatgaaaattaaacattaacatacaatgaagttattgagtccatgttaaaatggtttcaatggaatagcatcaatggaaataattgcaattagtaaaagaattttagaaaaagaaaaaattaatacagctaactttctcaaattaaattttttgaaaataaaacagtgagatggaattcgagtgcaagatgtttgttgaaaatcaacacacatgaaaggaaagagagtgaacctaaaaaaattggctccagagtctattaatgtaaagactatgttatattgtctctctatctttagggaaacatatacccaattcatcttgtgtcaccagaatcagattcatcaaacccattctggaccactctgatcactagtttcaccctcacagtcatagtaaagaaactaaagcaaaagactacaagagcaaaggacagaaagggaaatgttattttctcccctcacctttgccctctttgattttctccattgttgctaaaaggaacacttagaaaactatgaaagaaacttctgcctgtaaatgcagctccatgattatgaattctgaatccttgtaacagaagaaccaataggactgatccatgacttctattagtagagactgggaaggtaggtgactttagctcaccaagcctgatcacagcaaaatagaaaatgatcacagtgtcccctttttatcctggggtaacaatgaacattcagtgggagccaactactgtattaaagtcctgggtgcagctcctggcacatgacatggcccacaaggtagtagttctgagtacccttgcctatcagtggtgctggggcgagaagggagggcagcctgctcactagggagagcaggaatgaggctaggaagtacagggacctggcaaagatgtctcctgtttgagagagacttcagttaatgttcagtcaacttcctgtggtgctaagaagtgaaagttgaacttgactatcaaggaacagaggcaggttgttagctgggcccctgggaggaagtcaacaagctccaccacatctgacaacacctactgcttgcagcccttcccccaggtcaggcagctgcacacctcatgcttccaactgagggggaatgaatgggtaccaagagtaggtgagtctacttctttcccaggggtgagtagcgggtgaagaaatcagcatgtagtggacatttacatgtgccggatacctcatatatgcagtgtggtatcattatcctcactgtgcagatgaagacactgaggctcagggacttgttcaagacacacatctggtcaatagggagccaggattcaaaatcacgtcagtctagtactcaagtcctctgttctttccacgactacattagatgtatccctagatagtctaggtgtaacagcatgagtctcccatgaaaggaagtgggggctcttggaacatacctctttaggaagccttccatcattgtgctgccttcctcctctgtgcagcctcagcactcactgttgagcccttctctaggagtttgcaatctacggggagtgatgggcacataaggaaataatttcaatgtagtatggcaaatgctgagctagataaatgcgcgaatgactatgaagaacagaggattggggtcacctaactcaacatgagactcatggaagtctcctgaggagaaacctctgagtcctagagagtgagaattggccagaaaaattaagaaggggcagggaattccagagagaagtaacaggtaaacaaaagcaaagaggcataagatagtctggagtctggtcaaattacaatcagttggaagtagtagagaataaaatacaaagtggagagaggggagaagtaaagctgaatagataaacagggtcagcttacagagggtcctatgcaggctaaattccagatgctgctataaaaatacaggaaagaaaactcatgaaatattttaagatttttgtggaatattttaagagcttttgtgaacatctcatgaagcactcctgtgtttggaggcagcactggcagcaaatcaaacataataaaaggtctgtacatcaaacattgacacatttattcaacaagcacatattgagcacctactatgtggcaggaactctcttcatcagcaagtattttggcactaaataaaacacagaacacaccgccctctttgaaatgacaataaagaaaataagtgaattatatattatctcagcagatattgcatggtatatggaaagcatatcagggaagggggtgtaaagtgtcatgagaggaattacaatattaataggatgttaagacagctcctactgaagccatgtttaaacagacacttggaggagaggagggagttggctaagttgatatttggggtaaggcattccaggaagggggatcagccagttcaaagccctggggggtgggggctgtgcttggcatatttgaggagtggtaaggaggccagtgtggctggaacagaatgatcaaagaaaaaggtggtagtaaatgaggtcagataaacagtaagagacaagggatttttaggtcatctagaatttagattttttcctgagagggcagaggagccacgagaaagctctgagatgaggatgagatgatctaattcaggttttaactggatagttcagagcaagagtgggggcagggaaccagtgaggagactgtggcaataatcacgaaaagtggtgcagcggcttggaccagggagttagcagtggaagcagagagaagtgacaacactctgcatatgggaaagggtgggcaggagagaacagtgcccaagatgatccagtattttggcctgagaagctggggaaaaagaaacaacaacaacaacatcagtggaaggggtttcagggagtccaggtgttctggttgcagctttgttttgccttaaaaatatttgagtacgtaactagtaatgggattgctgggttgaatggtaattccgtttttagtcctttgagaaattgccacagtgctttccttagcaaactaaggcaggaacagaaaaccaaatgccacatgttctcacttgtaagtgggagctaaatgataagaactcatgaacacatagaggggaacaagagatactgaggcctacctgagggtggaggttgggaggagggagaggatcaggaaaaataactaatgagcactaggcttaatacctgggtgatgaaagtatctgtataacaaagtcctgtgacgtgagtttccctaggtaacaaacttgcacatgtgcccctgaacttaaaataaaactatatacatatatatacatattagaaagaattatacttttgagttttaatagcacattttctgtaagattttgcaatttaaacttcactatattttatataaacaattaagagttgagttgaccttgatattacatattacagatattttattaacatctattaatttttaattatttgattttttcaaaatttcaaataatatacctatttttcagatttcaggcaggccattgaaaagctcctagttctaattactgttcctgtaatgctttatgaatataacagtccggcctttcctcttagagtttgcagtctaaggtagagaaatataataaaagaaaatgcatgaatttttaactaatatggtgtgggttctaaagctcagataaattatttcgtttagttctcacaacaaccctctgatgcaggcactattatttcccccattttaataatgaggaaactgaagcacagagagcttggttgacttgcccaatattaccacactctgtgtggctaagctgggatttgaaccaagaaaactctcttcccataggtcgttgaaaaattatgaaaggttaagccacctctctgcttgtgttgcctatttccaccatgtgagtccaatgtgtggtgacagagaagggtagatgtttggcatctgtgaattctgtggattgtgtgtcatgattctttatttctgtcctctgtatcctgaattgccactaccctgagcaggtgataagagtaaaattccattacattggtcttgaggggatgggcaaacactttggactctcttgatattctagttattaaatattgctcagcgtaagttagacaatgaatgagacttgttgatgttttcatttcaatttgtcttataatgatctgtgctcaacatgtaaaaccaatagatgtaacacctttggaatatttctgagtaaacatggggcaccaactcaaagagcaagaggtaaaaatgcctagtgtggatcaaaatctactctatgacagggaatctcatgggctctgaaggattctggtcacatagggagtaaatagcagactctcaattcagagtcagatgtgagttcacacgcaatgttttgggacttcatcctgtcttttccctgctctgggagtcataagaattaagttctaatcctaattctgttgttatctacctgagtgacactaattagatatataacttctctgaggctcgacatttacatctacaaataaagaaggctagaatactaaagcctcttctatttcttccaattattgattgtatcggctcttactctataaatggtttcttctattttagggaaattaattattttgttcttatggtgttgctggacctgttgcttttcattgctgtaattacttctctttgttgaagacctttgccagacgaaatgtgatgggtgtataaggctctggcattttgcccaggtctgtagcacatagaattccactaatgggtctgctgggcatctgagaccacagagccatttgtcataacatgacaattccagttgggcagggataaatgttagctttaacgattttggaccagagtttgtctagagagagagcagagtacaaagccaaaagcatcatctttagagctaagcaggcatgagttcaaatcccaacccagccacttactagatatgtagccacagccaccgccaagtctcaatttaaatgtcactttctcaaacaggcctcctagggtctcccacgttggcttagtccagaatactggtttatccttacggtataaaatttattccatcattatgcaccagtatttaataaatgctgaggaatgtggaacaaatatttgttaaataaaaagtgacttaatccttctctgtctcagtcctcacttcagtgaagtgggcaaaagggtagaacaagtttcctgtgcaaaaagaatcaggtcaaagtgccctagaaatagcaaacactgtcacaaccctagatagcatgattacaatctgaaataaactagttcaaaaagcaaatctcagactcaagtggggctttttctagtttagaacttggagttagaagaagaaagaagggggctaaagtgtgctgcgtgtctagatgtgccaggcactgtacgtaatagaatgtcacacatttaatatttgtctaaaagtgtgaaagtgtgaatttccataagagggacacaggttcttggtaaaaccaaggtttgctctaacttttcacacactttggcagacggttttgcctttttctcctaagttggaacttttgaggccattactgccaggagggaaaagttagtgatgcttatctatgttcagaactagaaaatggccccttctggtccccagtttggccccattgttattcacatgctgcctataaaaagacaaaacctccagaaggtggaaaagatgaatatgcagaatgctacacatagatactcatgtaggtgagatggcgaacacagcagatttaggtctaccaataagatactaccccatttgggatgacacaccttccttagaagtgacagtggcagaacatagacaaagggactaattaaaagtatgtgggttctgcagattgcatctggagtaagagtccagtgatctaaattgtaggccaaggcctcttgcttgctaacatcctctgtctgcctcagttttcttacctgcaaaatggatcactgaacatcacatttctctttattaatttattcattcactgaagaagcaagctgtcaaaaagcaactgctacatatgtcaagaaagatgccagatgctaaaataaaatacaaaaatttgattactacaaattgctaccatcgaggagtcatagtctaatgaaagagaaaaacatgagagtgaataatgaagtcagcaaaaagttcaaaagaaaaataaataaaaggcatagatattaaaaatgaagaagtaaaactatcttattcagaaaggatatgattatgtacggagaaaatcccaaagaatctacaacatcagactcatcagtgaatctagcaagatcactggatacagtttatatataaatgttatcaataattgtatttctgtgcctgacaacaaaaaattgaagacaacttttaaaacaacaatgtttataatgacaccgaaaaatatcaaattagaagttcatgtaaattgtagtttccaagagctcccgctggaaattggaagccattgttgaaataaattaaagaagatttaagcaaatggagagacttaccatggttatggttcgaaagactctacattgctaagatgcaatttactccaaaattgtctacagattcaatacaatttcagttaaagtttctgaaactttcatttgttgttgttgtttttggaatagacaagctgattctgaagtttatatacaaatgcaaaggacgtaaaacagctaaagaaaatttgcagaagaaagaaactaaaagaattacactgtcagatttcgagacctactacaaagctacgattattaacacagtgcatattggtacaagaataggcaaatagactaaagaaacagaagacagagtccagaaactgaactacacatacacgatcatctgatttattacaaaggtgccaaggcaattgagtaggaagagaacgatgttctacgtaaatggcaatattgagtatctgtatggtaaaaaataaatcttggctatatgtcatataatatggacaaattaattacaaatgtagtatacaccaaatgtgaaaggtaaaacaaaataacatgttaaaaaaagtatagtatcttaccttgggatagcagatatttcttaaacaggacacaagaagtgaaaaggcaagccacagcctggaataataattttatcataatatatgtatatgtttctatctgagaaagtactcatacccagaatacattaagaactcttaccaattaataacaaaaatgtgttattaatatatacatattatgtatacattatatgtatcatatgtatatggaccatgcacatgatatgtatgtatcatatgtatatggaccatgcacatgatatgtatgtatcatatgtatatggaccatgcacatgatatgtatgtatcatatgtatatggaccatgcacatgatatgtatgtatcatgtgtatatggaccatgcacatgatatgtatgtatcatgtgtatatggaccatgcacatgatatgtatgtatcatgtgtatatggaccatgcacatgatatgtatgtatcatgtgtatatggaccatgcacatgatatgtatgtatcatgtgtatatggaccatgcacatgatatgtatgtatcatgtgtatatggaccatgcacatgatatgtatgtatcatgtgtatatggaccatgcacatgatatgtatgtatcatgtgtatatggaccatgcacatgatatgtatgtatcatgtgtatatggaccatgcacatgatatgtatgtatcatgtgtatatggaccatgcacatgatatgtatgtatcatgtgtatatggaccatgcacatgatatgtatgtatcatgtgtatatggaccatgcacatcatatgtatgtatcatgtgtatatgtaccatgcacatcatatgtatgtatcatgtgtatatgtaccatgcacatcatatgtatgtatcatgtgtatatgtaccatgcacatcatatgtatgtatcatgtgtatatgtaccatgcacatcatatgtatgtatcatgtgtatatgtaccatgcacatcatatgtatgtatcatgtgtatatgtataatatacatatcatatgtatgtatcatgtgtatctgtatcatatacatatcatatgtatgtatcatgtgtatatgtatcatatacacatgataaaagcacacacacacacacacaaactttgatgaggcacttcacacggattgctcattaagaaaatgcaaattgaactactctgagttaccaatacatactcatcagcatggctaaaattttaaaaagactaatacaatcaaatattgttaaatattgggagtaattggaacttttatatattgttatttattgtgtgtgaattgcctcaacccctttcaaaaacagttggttgtgtcaattaaagctgaacatctgcctgcctatactatatgaccagtaatcccgtgactaagtatatatttaagagaaacaaaatagactaaaaacatgtgtaaaactcttcataaccaaactattcataaccatgttgattcataacaagaacatgaaaacaattcaaatgttcattaacatgaaggataaaatatggtccatttatacaatggaacactgctacttaacaaaaacaaactgctgatatacacaacatggactaaaccaacaagtacgttgggtgaaagaaatcagacacaaaagagcatatacagtataattacatttatattaagttcaaggacaggtaaaacaactctgctgatagctgtaaggagagtgggctcatcagcaggtattggtgggaagagacacaggaaatcttttaagatgattaaaatgttctctatcttgacttaggtagtggttacacaggtgtacacaggtatacatgtacataaaaaaatcacataagatttgagttattgacataccttactacatgtattttatacctcaataaaaaaatgaaaaaatattctttaaaaaattattatatgtcacatttccttggtttctctctcctctctctttcccctctcctgtttctcccctctttctgtgtttctctcttttggcagataagtcaaacctcagagaaacaaagaaatccacgtgcacatatttgaattgaatttgtctccattaaccaccacaatggagacagtaaagtcaagctgggtcttgaattgcctgctttggatatctgtaacaaagtcttgatggataattgtcctgaatcccactttactttgtggcacataccttcctggtttctggcttgagtattaagcagggaatgcagcagcagaggagaacagatttccaattgcaatagtcttgactcatcaagttcactagaatctggaaattaaggcttccgttctgctaattgttagcagagtgggctccaggatgatagcatagccctctgggtatctgaaccctcattgaaacatgaaggggttgaactgcatgttgttctaatgaaaatgcagccttcgttcatgcaactaatatttcctgagtgcctgccacaaaccaggtgtgttacataagggactggaactcaggagttcatttttactttattcaatattaattataattttactttgtgtcaaagaaaaaaaaacacaatatcacttatttaatccagggatgacctgtaaaccctagcagtggcgggcgggggccgggggggcggtgcagggggatggtaagcaggggcacaatggcaatggcgacagtaaccagaaacgccctgcttccctcaaaagagaaaaaaacccagacctatttccatgacggggttcttacgtgtccatttgggaatctgaatgttttgggtcttttcatttccctcctcccacaaagagaaaaagctaattccatatgtgtgtgcgcacacgcgcatgtacatttgtatgtgtgtaagggtgtttacatgtatagtgaaagtgccatagctatgtatttaattttgtgtacatgtatgtttgtgtatgcgtgtgtttcttagtgtttgcgcataaggatgtggacatgtgtggtctgtgtttgtattatgtatgtatatgtgtgtgggagggagggtgtatataaagtctgttctagattttaccttactctaagagctgattaataacatgaaaaatgtgagtcagaaagctgaagggttaactgtttaatgaacataaagttcattcagaaaaccgtggtttgtaactggtgagaggaagtattgagcaatttcttgtaaagttacaatagccagatctgcaaaggaaacccctcccagcctggaattccagagtatttcctagagcttgaaaggtagccaaaaaatgagcaggcatttaaaagggaagggaatggggggaaacctggagtgaagaacatgaatccatctgtctttcccatccactaccccatccgcctctttcataaatagttttaagaggaactaatagacctctacttaatatcttctctcgtaccttctcacttttgtcttcctcatgccttctcttctagtgtggctcagtgcttagtgcaggagaaaccagtaaccctgaattgcagctcttcctttctcactacatgaattcaatttcctcatctgtcaaatgagtataccaattcatatctcgaaagctgttgctgtgagaatcagataagcataacctcacagcttatgtctattagaacagcacttggcacatggtaaacactccaaagtatttgttaaatgaatgaatagattaaaaggtggcatgttttgtactaaactgttcaatgatagtgtaaaaccatttggtcataatgcggaaagggaagtaaggcggaattcctttaatctgtgttttacgcaggttccaaaggagcgtggtggagagaaggatgcagatagtctgggtgagagctagaggctggagtcagcaggaaggactgaggccgttggtgcttggggagtgagggctcctttctgctctgtcctaggctaagttccccacccattccttcttgagatctacctcaaacacaaatccctcaattgaccacagggggcgccccttctatgaatttggcgctgatagctgtgatctgcccagcacagtggggaaaacacaaaatttacagatcaggcatgtccgggctcagattcctactccagcacctggtggccaagggaccccaactgttaaataggcatggtgatgcctgctttccaagcctgttgggaaagagagaggggagcggggaggaatgggagagagagagagactgagcaagcatgccaagacttaatatacttatatttatattaaaagaaataaatatcagatgattacaatttggttgaactaagatacacagtagaatatggaactaatatccaatatcacaaagtattctagcgagccttcctacagaaagaattgtgggtggctggggagtaggcattagctactatgtgagtgcagagaatactcagccttcttccagatggtgagctaaagttcaaagatcaagtcacgtacacaccttctttctcatcccaggtcctagtctgcttgaattcaaatggccatccacaccttgcctgaaatacttgcaataattaagatacggctttctgcctgcttggggtttggtccacaattcccttaagaggcctcatttcaattaggactcacacatcccttcaacagtaattttgtgtcaggcttggttagcaactcaaggctcaagcataaatgggacagaattcttttccttttgaaactcaccaatatagtgattgtagcaactagctacattgtttttgttttttttttccccctcaattctaagcactatgcaaaggctttaaagcagtggtcccaagcctttttggcaccagggaccagttttgtggaagacaattttgtgaaaagacaaaatgtggaagaccgtggactgggatggtttggggatgattcaagcacattacatttgttgtgcactgtgtttctattattattacattgtattatataatgaaataattatacaactcaccataatgtagaatcagtggaagccctgagcttgtttcctgcaactagacactcccatctaggggtgatgggagacggtgacaggtcattaggcattagattctcataaggagcgcacaacctagatccctcgcatgtgcagttcatgacagggtttgtgctgctatgagaatttaatgccactgctgatctgacaggaggtggagctcaggcagtaaggtgagcaatggggagcagctgtaaataacgctgatctcactcacccactgctcacctcctgctgtgtggcccagttcctaacaggccacaaaatggtacctgtctgtgtccccagggttggggaccactgccttaaaggccttcatctcattcagttttcatcaaaattctgtgtggtaggtactctcattagacccattttatgggtaaggaactgaggtaaaattggttatataacttgcctaaaataagtcaagtctctgatgagagggccaggattcaagttcaagcagtctgactccaaaatctcaaagcacttctgtggtaggaaagagaaatgaatggaatggcatagagtcatctaaatgactgcagtaggaagggagcatttcccgtgtgcagtgttattttttccgggctttgaaagataaataggagcatgcagttaaaaaagagaggagaaggcattctaggcagaaaggccagtgcttacacagaatctcagaattgtaacagttcctattacaccctggcagagtgatgccaaggctgttattgtcaagcaccctcctgcctcccagtggggttgagaaggggtgaagggacactggcagaagtgaagctgggaagtttgcacttgctagttgggacttgcatagccatcttctcaatgccaaagaggacctcagtctctgtgtgcgctttgttttttgttgttgttgttgttgttgatttgtggcccaggctagagtgcggtggtgtgatctctgctcactgcaacctccatctcccaggttcaagggattctcctgcctccagactcccaagtagcttggattacaggcgcccgccaccacacctggataatttttatacttttagtaggggtggagtttcaccgtgttggccaggctggtctgtgtgtgctttggatttgagacactctgatgatttagagttgaaaatgggagtagattgggtgattctctagttatcatgtttagtcaaatcagatccgtgcattcaaaatcataaggcaagttttcctgtgtggctcagtaacatccttaaagaaatagttctgatgtccatccggtgttttttcagaaagagcgtcagggttgacagtagctgtgatgctccagatggagctgcggataacagcatataagtttcagggcagtggttgaggggctgtgggagggtggggagggaagatggatgacttttctcaaccatctgtatttgattggaatattgtgtgacttgtgaaatagaattaaagatatgatcttcttatggtcttctcacagttttcaagggattttaggagaaaacgcttagccatacagagctgtggacaagaaaatcacctatcagaacatatttatctagaaaaggaaaatttaaacagtcaaatagaagagttattagctttctttttccttctctctaagaaggttagttagaatcagctttcttactcactacatcctgtacttagaaaggaataacctgcacatgacacgttcaaaaaatcacctttgcattctgaacctagctgggaaattatgacaacaatgaagagatatgtgggcgtcctcacattttgtgtcttaaaatgtccagctctcaaggtgaaatattttcccccatgaaatccccattgaaaacagaaaccagaactatgatctaaaagaaaaatatctatttgaatatttctacttgtgaactgacatttttagctattttagtacctttttttggtgactgaagcatagcaaatagagttttgtttccttcccacagatatcagatttcttcaaacagtacatagaatggtgcacattacaaggcatttaccacacaaaaaaacaaaggcactggaggaaataagggttgggggagagggaggaaatggtaggtaccatctcacatggggatatagttctcacagatcaccaggtagggtcatgtgatctgcgtgagtttcctaagggagagaggggctctccttttgttcgtgttggctgcatcactgcatttcattaattctgaatggcaagtgagcaagaccctcgctgctgaaatctgatcagatgttattgatgaatcatggaattccagagttaggagctggaaagaaggtcaagaggacatctgagtcagtgtctgactagtagcaggtgatgggttatgatgtcagttttggaaccggacaactaaggcccaaaggtgttcaggcatcctcttctggtccaaaggtcagctccagggaccaggctgcaggtctctgacagcagaggataattctctttctgtatcacacatgccgcctcaactaaccagcatgaacataaaatctgcattgtagccaagtctatagctgtggaaaacacagagttccttcccacacccacttttgaagagtttactataaatgtgtggcagatcatcacccctggggcttagctttgggatttcctaaatctcagagcaacgtaagcacaacggccccactttgcatacctgaactcaaaactgaacaaaatcatactgggcgttttgttttcgtttgcagccagatatttttaaatagccttttcttatgcaatataaaaataatacatacccattaagaaaataaaagataaatataacaacgctttttcaaaaatatcattctgcatttacaaaattggcacagagcacagtcagcaaactttttctctaaagagctagatggcagatattttggactttgaggacctagggtatccattgcacatattcaattctgctgctgtaatgcaaaaacaaccataaacaatacataaagaatgagtgtggccatgttccaattatttacaaaaacaggtggcaggacagatttggcctgtgggccatagtttgccagcacctggcatatagaattgagaatttttttcctatgtttatcacatcagatatccaactgtgtatactgttcttttcacttcatattgtattataaatactttcttggattattgaataatctttatgtagtattttgcacaaaatggttgtttattatctcattttatgaatgaagcaatatttgcatgaccattgacatttagatgctttccagttttcttactattttgcgtattgtgataaacatcagtataccttagatttttgtcttcatttcgggtaatttccatagggtatattttgggatgttgaattaaaaaaaaaaaaatactcttaggaaaaaactgctaattctttatctcaaaaggcttcacccatttactcccagagctgtggatgaaattgctcatttctccctaaccagaccaacacagaatattagactttgtaaagcattgcttatttgataagaacaaggatgtctcaggcaagtgaggaattgagcaaatatgatgctcaggtcactaagcctcctcatcctttactcagtaggccagatgaccctcctcactcaactcccccaaaccccacccatggccccagacagagggcagagaatgaaacctattatctttctgaacgttccttccctcttcctgtccacctcacatctggatggaatacaaatcccctgacttcctgtttctctccctacaataggtcccaaatgtcaatttcaaattaaccctttttttgctttttgcttctcccacttcaaccccaaactctctttttttgagacagggtttcactctgttgtccaagctggagtgcagtggtgtcattacagctcactgcaaccttgatctctcaggctcaagcaatcctcttgcctcagcctcccaagtatccgggactaaaggcttgtaccaccaagtcctgctaattgtttatatttttgtagagatggggtctcaccaagttacccaggcttgtctggaactcctgggctcaagcaatcctccctcttcagcctcccaaagtgctgagattacaggtgtgagccaccacacccagcacaaactctttattgttgtattttctcaaaatgagtttcatagagctttgcctatttaagagtctccatttggccattctttgttaatttctttcactaaggcaggcagttcacaggagtatgtgaaaagaccctatgagcaatagggaatagtgaggtgtgtggtacagagagtcaaatgcaaacactttcaacaatgttccaggaaaaaaagataagtctattgattagattaggcctataaggtctttcatttgtgatcctggttctagataattcacttctaccttttatcgttcactagccaggcacacaaaccttcacaacctgccctgcccaaagttacactgcttccttcctccacaccccacagcccaccccccgactgcatgggtaacccataaccagctaaactgaactattccaacacacagttcaccctgtctagtcttttgttcatgatgatcccttcttcctcaaatactcattccttttctatagtttttatcagtaaaggctcaaaatcactactctgatactacctgtctttcaaatgtccacccactggggcatatcagtcttctaacaaatatttattgggcaactagtatatgccactacctgtgctaggcactgggaatataactggagcaagacagaccctgccattctcatgcaacttacaatgtagcttctgcatattgatctttctattacttggaagccaggggctccccactcccagactgggagccccctgaggacaagggtgatgtttcatttatcactaagctctatgccaggcacagagtaggtgctaagaggatgtttatggaatgactaaatgctgtgttgctaacaggaagcagggacatccttgaggacaagatagtgtctgattcacttctgtatcccccacaagccgctagcacagaacctggcaccataaatcctaagtcaataagcatgggaggaaatgagtgactggctttagtttacctctttactcctttccctataatatcgccaaagaaaaaaaatcctgcaaaaaagcaaccagcagatggtgggaaaactggtttctaaacctgaatatcactatatatgagaaatactcttttatttttgggaaaatatgagttttgcatcttattaagattgatgtgttttagttataattaataatcatcgtcactgctgatggctggttcacatattcaccacttgttggctgagggagcttgggtgagggagtgatctcctctgagcctcagttttcttttgtataagatggagatatgaaagcatatctatctagagtgttgaaggacaagttaatcaatgagataagtatgttttagtgcccagtactaacacgtacccctgctatgttttactaggggtacgttttactcctagtacagagtaggtatttaagaagttgtagatttttttccttctcattattattccaataatctagtgtgacagcaaaaattaagctttcattttaataaaagtgtctcctattttttctccaatcaaaaccacagattcttattttaggggaatcatgtctattggttgaccccagagaattctgaattatctcagtgtgcagtgtgatgtcatattaaggaactatagggcagtggttgagagggttaaggttaacaagtcagtgttgagtgtgcctggattgaattcattcatttattcaacacatatttatggaggaccgatcatgtgctagacaatatattaggtgtgggatacagtgaaatcaaatccttgccctcatgaagttgacattctactgacagaagacattcaagcaatacatgtatacaatttatactgaatttgtattatatgaactgagaatgagggtgatggaggaaaattgaaaagggaaagaggcaagggtacgctgtgggggagattgaatctctgtttttaaactcataagatgcatggccataggcaggatgacctccacaatttgtaaaacgcagtgcaaaatgaaaatgtagcacccaccgttcaaaattttgagtccatgactgcagaaaattgaaccaagcacaggtccttttaagtacacgcaggacctgtgcaaacccacagagcagacacccgtgaagctgatcctgaacttgagcaagttgtttgatttttctcagcctcagtttttaattgggaaaggacttggaaatattgaaacatgtgataagagaaagtgaatctaaagctttttcctctaggtacagtgttagacagtacaaagggcatttttacctccaacacatctttcatgaagagttttttatctaggtttcatggagccctacggtaaataaatttgcccaagttctaacaagattctggaatctcatatgtgggtatgttcatgttggggtgtgtgtgtgtgtgtgtatgtggggtgtatgggtgtctgtgtttttcctctgaaaagcaccatagtctctgccacatttttaaaaaggtgcataaccctttaaacaggaaccatttactttaaatggaatcagaaatctcactataaaaaagcaataatattaatttctactgtgtgtgtctcttgccttttattccatgttcacaattcatcttattttcatttaagacaaccaactgggctagttagagccgagatttgagcccagtttttctcactgactctaaaacctatccatgctcctaaacctcctcaccattggagggcattgctgtttaccctttcagtttcagctgtactatcaaaagcagcaaatcaagggcagggaccacagcttgaccttaaactattcaactgcacttaattacccattgtagtggaagcacataaatacaggatgtcccctcactctgccattctgctttgcatcattatcaaaaagacaaaggtaattcatgtctaattactcactcaccgcaaggtcagaatatttatttttatcatacttgtgatttttaggattagtgatatcagtatttattcatggctaacctaaatcaaacatcctgttgatatctgtaaagagccatatagttattgtcgcaggtatgctgagtcacaaagcaaatacaaagtttatgagttgacagggaaaaggctgcagagaggtagagataagtgtgcctgggtaatcacaagtgtcttgtgaaatatacacattgtttatttatattgtccatttatcaagctcaatgggggcttgggaaactgaaaataatcaaaataggaaaaattattggtattattttctaaatttgctgctggtgctgactttttggttcaatttattaaatacttactttagaaattattctctgtttttagtggaatagagctttgaccagcttgagaaagacaaaaggagaagtagaagagaaggggaaataaatgaggctcatgtgactgggattaatttactcagagatctggagtagcaataacttgtgtctttccaaaacccccgcagtcaattaatgagatcaatttaaagtggcagtattgaaagggaaaacccaaacacttagatatagcagtatgcaactgacctattcctttttccattcagattcagtcagtcaaatatatcttattgactttgactactgtcatcataactgtgttagctaattgtctgaagttttcattcattctctgtctttgcagatgtcactgctattcaatctgtatttccttgctctgtctcgctgtctatctgcactaacaggatatacacgtgtgtgtacacatttttttttcttagtctatcccattgtttctcttgatgtccttggacagatcagcagtctgaaaatcaggcttctaatagagagtcttactagaagtaactagctgtgaaacttgggcaagtatttgacctctcccttcccccatctatgaaaggaagatgtgaaaacaaatggttctgtgggtcctctcccacttattcactcgatatttctataattttctatctagtttccatggagcacaaggtcattagtaatgtgccccatgactctcagattaatcagacaagccaacactgggggagatgtgaacaaagtcttagagtctagttgatagtaagaatatgaaatgaatatgactcactgatgtgatatagtcttcaaaaaactaaatttggtgtttgaatgcgtagaaatatattaggttttacaacataaaatttccattttggtagatggaaaatgttgaataaaggcaatttcataaggttcatagtctgtagagtgaaatggaagtggaaaaacctcactttgctctgttctgctctacttagctcatacttgaagtaatcattcagttcttgatgccatacagacaaagaaggtagtggacaaaaagagacacacatattcagtagatagcaaccaagctgggaggggaactttaaggcatgtctggttaatggggaaaaaaatagaggctctttaacttggaggtgttagcagtcttttagtctttaaaagacaggtgcaaaagactaaatttttctgtgtgtatatatatatatatgtacatatatttaatgcaatatatgactgagtagttcatataagtgacagtagtaatagtgactaagaagttcagaaaagattcagatccgtgtaaggaggaactttttgaatggagctgtccaaaatttaaatgtgccatgtcagctggttgcagtgtgccattgccagggttgtttaagttcaactcaagcagtgcgaggtggtaggtctaggacactggctatctacctggggtgagtttgtctcccagggggcatttgataatgcttgaaaatatgtttgactgtcacaattttgggggttggtgggagggtgctattggcatctaatgaatagaagtctgagatgtttctaaacgtccaacaatgcacagaacagtgccctcgctataaagaattacccaagccaaaatgtgccaaggttgagaaatcctagtctaaacagtttgatacagatgtttaattcctaacatccctgtagctggggagaaaaaagtgaaattgatctatcggaccaacggttatgtaggcaattgtttataatgacattttaaaaagaatgttaatgacatgcagacatgcaaattttaaaacatataacattaaacataaaacattaaaaaaactctattttataaatatatcaaaatattgagtggttaattttgatcagtgaggttattcatgctttggtttttcttttttctctgttttccaagtagctataatataccagtcctgcttttaaattcagaagaagaaaaaaagaatctaagttgaatttttaaaacctgatatgtccctgaggactgaatggcacatggtaataagaataaccctaatagtaacttcaatttagctagcagcatacgaggagacaggcccactcattcactcccagtcagaatgtaaattgttataacccctttggaagacaatttggcaatatgactgcagaacctcaaaaatattcatatgctatgacccagtcattccaattttgggaagctagcctaaggaaataatcgaaaataggcacaaagatgttcatttaagcatgatttataataatgaaaaattggatttataatggctacaaattgaaaacagtcttaattactagaaataggtgaatgtttaactaaattataataaatccatatgatgtaacacatagccattgaaaacaatatttacagttactgatgatgggggaagaaatttaagatgcacaaataactgtaaagagtaagggtccaaaataaataaaaaggataacccccaaaatgtaagtatacaaagaaaccatgatgtttgaaagtatatgtgttaaagtgttaacagaaagtaaagatctttaggacatgagatatgagtgttttaaaaaaatttttttctttacaattagaaaaggtcataaaaatatacacaatgaaaaacataaattttataaccagacaaaaactttaataatatttgtcaaatgccaaatcggagtccaaagccattgtccattttaagaaaatcatctgacttaacatcactactgcttttcaagagagcatcatgcccatttcacagaagagaaaatttggcctcatactcctcagtctccatgttttagcttagatattgtttcctccaggcggccctccttgaccttccaattctggttaaattgctctttttctgagttctcattactttactgattttatatatgtgtgtgtgtatatatatatatacacacacacacacacacacatatatatacacacacatatatatatatgttgtgcctagcaagtgtatgacacaaaatacccataaattgaatgaatgaatgaattaataaagaaatgaataacttacccaacctggtaagtggcagggctggccaggtcagtgcaacttcaaagtcgatgttgtcagtgaatgctccagatggattgcagagaagaccaaagttcatgtctcggcacctttcccaatgtacagggcttattgttgggacagagtagtgcctggcctagaagttaaacattcatccagctagctattaaggcttgaatgccttcaaagaacagcatggatttttctgtgaatcgtgagcgttttcgcaatgcttaacacggcagctggtaatgatgattgctcctgtttccctttgaatttcgtgttcgtttacttaacagggcattgctaatctagaagaagggagtgggtgaagaatcccatttgtaaagaggatagcaggttaatgaaaagaagcagaggtatgcgtaggtgatagtgtttctacaaggctcggttcaattggtatgatttaaaggcaagccttggctggctggtcataataagggccacataatggaggggatttacgtggcaattaccatggtccttgctagtgggatacaatgttttagggctccctggatacttaagattaatgtctgaatcagtagtgttattgttgcaagatcttagtgtgatgggagccatgtgaggcacgaatttttatcccttatcagaatgtaaaatatctcatagtctgcaagaacaccagtgactatggcctgaagttgccctaagacagtttaaacatcctgttgattgttttgttttttttttccttttccttggcaaccagaatgcatgaatgagtctagcgttacttttgttcatccaggtaatatgattgaaatgggaattatacatgttcaatcatttagagaagaaggactaaaaatcatagacctatagcaaattaaatgattatagagaatctaccatgtaaatgactgcaattaaggacttcttcatgtaccccgggccagattcacagcatctgggacaaactctccatggtttttccctcggtgtatttattaagaatgatgatcctgaacttcaaggagacttggggaatttttggattcctgccaggtatgtacctggccaagattaatttggtgaatcagaagttcccaggaaccatatcatgagtactaagagaacaaattgatttatctagtagtatgtttctccaacttagatatctgtgcaaaaaaagtgcagcggacatggtgcacattccaagaagttctcctccaaggaagtggtcaaaatatgtaatgcttatttattatccattttgagacccaaattatccagtcagtgggatcaataccttactcctcttccccagaagcctcacaaataaagtcttaacaccatctcaacaaaaataagatagggacctagacatggagaatatggctgtctcatggattctaagcaatcaggtagagtattgagaaatgttattgaaacaggaagttcctgctaaaggtgttggtgggattgggatgccagtgcagagtgacacagtatttggacaagaacacataacacgaaagtgtctgaatcctgttcttgtctataatggcatcttgccattaaatccttgagaacaaagaaaaataatatatattagctgaattgtttgctaaaacccaaatgtagacctcagtagaacagacaggactacatggaagattcctttttcctggacagggtattgccaactagcctcaaattaaagcagggcagagccataaaactattataatccaggggaacctggatttggggccttttcattttgaaagcaatatccaaatctacccagaaagtctaattaaatccttacggatctacttctaattggctgctatccaattagcattctgaaacctgaatgctcagatcagccctccttcccatcttggtggaggggcagggggagtacattagaggaacaaaagaacaaaaaagaggctttaagcttctgctagaagccagtatcacaaatctagaatgacaagccaaagccaagatatagttggccaggggcagccagtatccttcattttcttattcattcattaattcactcatttatcaggtggacatttgcagggcaccagtgatgctgtcaggcaccatgtttggtgatgagttaccagatggtcctagcagatgaaaagactgggaacccactgggaaggatacaaaaattattacacagctatcagagcaagagggaggttagtaaaagctggtggaccttaaagtttctctacttttgcaagtgtaaaaactggggtaaagatagagtttgggataacggacacagccatagccaaagaatgagtctagtgtctatagagaagttgtgatatttggaattttccatgtgcaaacacacacgcacatgcacgcgcacacgcacacacaccacacactcctcacctttgccattttcatagggaaacatgaagaaacaagtatatggattttggaattgggcagtgttttatttcagccccatgttcgcttgctagctatgtgatatgtgactttgggcaacttgtttatcttttctgggaaaacatatacctctaggggtgcagtaagggataactgggaacagtggagtgtgtgcctggtacaaagcctgcggtgtagatgccatttaataaatgatggttttctctatcctgcatcttgagagtagatccaatctattgtttattctttacagtaggcatggtagagtaaaaggaacaaaggaatcgagggaggaagggaagaaaaaatgagaaaaaccataaggccaggcgcggtagctcacgccagtaatcctaatactttgggaagctgaggcgggtgggcggaccacgaagtcaggagttcgagaccagcctgaccaatatggcaaaaccccatctctactaaaaatcccaaaaaaaaaaaaaaaaaaaaaaaaaagttagccgggtatggtggcacgtgcctgtaatcccagcttctggggaggctgaagcaggagaattgcttgaaaccgggaggtggaggttgcagtgagccgggatcacaccactgcactccagcctgggtgacagagtgagactccctctcaaaaaaaaaaaaaaaaaaaaaaaaaaaaaaaagaaaaaggaaaaagaaaaaaaagcaaccatgagacgagcaagaagctaagtttacaaataaatgtgatccacacttctcaacatcaggacaggtccttcatgcttagattccaggtctcttcttgcgaatgggaacagtcatcacttatccaatgatgcatttaagagcaccaagttttaaaaagagacaaatgtcgaaaagaaatgccatttatcatcaaacaccattattaaacactagcttgttggcatatctgtaagtctggttgtcattttgctaggtggagagggcagaattttggaaagtatctaggccacacccatgtttcagaatagtaagtacaaaagccacaatgtattgatcacttagactcatcatatgtttgtccttttattttaaataccccaaggatggaggtctttctagcctaattttccagctaagaaaatcaaggataaaaaattttcttgtgttgttactttatccttagtacccccctgggaagtaggtataattagcctcatcttagagatgagaaaactgaggctcagagaggactgtcctgtaaccagaaagaggatgtgttaggatctgaacccatctgacgaaaggctatgctcttaattagtaacatttccctgccttgcaaggacacatgtaggtcacaggatacccagggaaggtaaatgctctgtccttttctcaccagtactacaacttagtaacagcctctggcccaaaatgagactggacattgactttaatggatggaagtacacattcctaacatggattcattcagaagcacccagatttcacaagaggaaatgatgaggcatttttctgaggtgttgaaattgtgccctttgtcagtcacaaaccaaccaaaaaaaaaaaaaaaggctttgaaaattcctcaaaggtaaaaggtagcctttcttctctcatagttctgatatagtcccaaaaggaaacaaaagcttgcataattctagccccagtgattcttctttccttcttattaactacaaatcttcaccacattttttcttactaattagtcacatgcttaagctcctgagtcacggagttgtctactggttatagcttgttctagctcttccaccctcaaatggaacttgcaaggaattaggccctctgaagatcgcacattcaagtcatgaaaacaagccaacaatgaaatcaatcactgccgagaagggtggacaagcacaagcattaagacccactactgttgagtcagggccttcagatatgctgccaatgggaagaagagagaaaaattatgtttattcatttataaatatgtgcattcttgcctccaaaggtcccaatttcacactggtccagttgggttctctttcctttgctgcattcaggagcacagttgtatttcatctactgcttgagaatgcagtggagcttgtcgccagcagtgatggagccaaacataaagccaattacctttccctaggtggctaatggaggctccaagaagccagagtttgcccacagccatatggtccgagagaatagaccatgcatttctggaggctttacctgactttcgccaaaagcatgcacagaacgtggaacttggcctcctgaaaaggcgtgtcttcagcttaggttattcctttctcgatgctcaccatgatgtcaggctcctagtaggagagccattaataactgtcatgtaaaccacaggaaaaaaagctatgagtgggattctttagctatacttattgaaacaaaccctttagtatgaatgtatgaccttctactgattggccctaaacacttttccaaagcttccctccactttactcatcagcaatgcagctgccagaattctcaccattcccaagcagccatattatcccaggcttctctagtttacattctccacccttcctttgtcaccaagtatcatctaaaagtcatacctgattatgtcaccttcgtgcacatgcacatacaaggacacacacatacccctcattagtccggatctccctgtttgcatatagaatgaagtctaggcctgttaacatagcatgtaagaccctcctcagttggcctccaaaaccgcccatccagcctcatttctactctccctccttcatctttttccttactgatgttaccacaaaattctcttatactcctcctccatttccaaaggagaccaggcctggactcagtacctttgtgtactgctgctttgctacctgctgttatcctctcctttatctctatgaagcaaactctttctcatccttcaagagctagttcaaatatcctcctctgggaagccctttctgaagcccacagatggagttagttataccctttactgtgagcacaccaaagaaaaacagctttactcgtgtgcatatctcactgtgttgtaatagcttacctgcctatctcaccattagactgtgtacttctagaaggcagaaatctttttctaatgatttcttatttcccagaacctagaacaacacatattagaaagggttgcttagtggatatttttagaataaatgagtaccttcggtgacttggcatttgatgggcaatcttggccatcctaaagcattccatgccatcagatataccctgcattgccatgagctttatcattggcttttagaacatcatcctcccactttgaataaatggtctagcagacaatacagtcctaaggaacagaaaacctaagtgttagctccaggattcaccagcatcttatacttgctcaggacaatagaggatgcaattaggagctgaaatgattatctaatttcccatgcatggtagatcctaagtaatgtgctcagcaaatcatatttatcctttgaagttgagaactaactgtacagcagaaacaggaccaggtactctctagatcttgtttctgtttggagaatcctggtcaaagaatgccaaggctaaaaagactgccaatatcaatcactctattttagagatgacaacattgaggcttgaagaggaaaagaagcaggaacatgaataaaggcaaccaattaacaaatatgccacagataatggtagaaaaccctccacggcatagaagaaagagggtgtttgttgaaggttctggattttctctatttgcccaataaacaagtgcaactctgagccactccactgtgcagtagatcctagacccttctgtgaggcagagcagatctaaaaagctgccttgggccttggcacctctcactgtgcttatagaacattgacatttttgttaggggtgactaagagagaagatttgcattggttagaaattagtcagatggcatttccttaggctttgctttcatttctcagtgaaaggttgtgtaggaagcatttgattttcctgttatattactttattaataatctacagttattggctagtttccagaagcctaaagcaagagaacttgataatgaaggataccctaaaaaccagagacctttgggcagacactgacttggggcattaggagaactcattacaagtcctggatcttgattttcccctttgtaaaatgaaggactttaaccaggtactctctgggtcctgtttctgcttggagaatttttaagacctcagagtctatctgtgaactgttttttactgagcacagttctctcatgcatcctgtttgtgctcatttctcaggacacagtgataacaagatgggcttcattcctgccatcatggagttttagcctagtggagaaaacagataataccattggaaaacccacactgaagaaagattgttaccaatccttatgaatgcagtgaaaaaaacaatgaggctctgagggttacaactacacagtataatgaattacgcagagggggtgttcaacttagactgagggccggggtgtcttaggaggaggtttgtaatctgaaacttaaaggacaacaatatctagtcatggcctagatcatggctcatggcctgtaatcccagcactttgggaggccaaggtgagaagatcactttagcacagaaattctagacaaacctgggcaagatggtgacaccctgtctctaaaaaaaaataattaaaattagctgggcatggtggtgcatgcctgtggtcccaccaacgtgagaggctgaggaaggaggattggttgaacccaggaggtcaaggctgcagtgaactttgatcatgccattgcactccagcctgggagacagagcaagaccctgtcaaaaaaaaaaaaaaaagttaagacttaagcatttcatggagaaggaaaagagtgtgcaggagactgaggttgagaaaagtttgggctgtctgagaaaccaaaaggagaaaaggagagaagtgtcagtagagttcagtgagtgagggtgcagatgggggattataaaatatgagatgtgaaagaggggcaggtgcagaaagatcaaaattgaggtttcagtattatgtggggaggtaacctaatttggtttatatcttaactccattattccaatggccatttagggaataacccaaattagggccagcacagaggcagggagaaaatttaggaggcttccacagtagacccagtcagagataatggtgatcagatggagatggaaagaggtagatgtgtttggttggtattttggaaaagactctgatagaattccttgatggactcatacttgggtaatcattgaagagcaagtcactgtgttaggggctgggtgagatgagtatacaaaagtaaagagaacctgaccctctggccaagaccttcagaagctcagagttcacgtaattttcataaaattcaagtgagtaagggttacagcagcaatgagatgttcttttgctttcacaacagatgaggcctccatgaatggggagtaagaagaaaaggtttcacaaaggagtaggcctgtgagctgggccatgaagggtgggctctgatctatcaagcagagcagggggaaagccctcaaagcagaaagagcaaagctgcatggtgtgaagactgcatgtgattcaggaaccgtgagcaatggtagactcgtgccaaagcacagtgtgtaaggaagacaaggctggaaacgtatgctgaggtctgactgtgagagtttgaagccccactgagaggtctgcacgaattaagaatttcagagaaacatgattagttctacaattggaaaaataattctggtgctaagaactagtaaggtataagataagcctaatcacggagtgatttgaagttgaaaagagtttataagttattctttaagaaatctctgttattgaggtgtgaggcagagccagtacataatgtctacgttctgaaccaactgaacggggaaacaaaaggctaacattaatatcagacatttgtagagcatttaccttgtgccaggcaacattctggatgctttatgtacattagctcattgaatcatttcaattcaatcattcaacgcaggggtttgaatcttagctgtttgaggtcattgtccatgcactcacctataacattgttctgtctctttctgcaaatgtaagataaaaatattaccttcattctagaaaacacccctttgtagaataggtttataccttcaggcatgtggactttccaatccaaactccaggagtagacagatacccaccaggactaggcaatgcaggaaaatctcaggcttcagctaggactgtttcatacaatttcctgcatggccaggaacaagggtgaaggcatgcactctgtgagcagcccatttgtggacagtgggtcatgggactgaaggaaccatgttacacatgcctgagttttctttccaagctcagaaaccatatcgaacacccctcccttggggagaagtgagtgagcaggtggagagacgatagtaatgttagtatggtggaacttcttccccatagatggaaacactgagggctaagaagaagggcctctcctccaacatgtgttatctagcaaggctggttctatttaagaatgatatatagtctagtgtaatagaatacaatatgcctagctctaaaattatgttggaaaaaaatcaacattacgatgtgctatattcagtcaatgagtaaatatttctgtgcctgccacatgctcagcattataattagagccaccgtgaaaaatacttatccgtgatcctttatgctgtcaaagcctaaattccccacttaaccaagaatcctggataattcccaaaaaacaaatttattatttgtttctatggttgtgtgtttgtcaaaaattgaagcattaatagaaataagaacaatttagactataaaagccataggcttataaaaatgctagcatcagcacattccaaaactgcctgccccatcccttgatggtatgtgtgattgctgtcacaaaactagcagttagaatcttttgtaactgaggatataaaccaaatttagaaatatgtctttactaaagggtggaaacttagaaactgaagtggatttaccacaatgaactagaactaaatgtaccaacacaggctcaaaacactctaagataatttttcaaatttatttaaaattaagaaaagaaaactgggtaacattgaatcacaaacagttgaaaacactggggttacatagtattaacatataattacatgatcatttgtgataaacagaaaatttaaaaaaagaaaaaggagaaaaaaataaaaaataaagaaaaacaaaaaacaaaaaaatagaaaatgaaatgagaaaaaaattgatcaatggcaaatcactggagataaatcattgtgtacagatttccctattgaaaaaaataacaataattaaacaccagctaagccttctttcttcttttgatttttgtgaaaaatcgcaataagatgtatctctagatcgtgtgcttgccagaatctttgctgtttcttaggtgaaagatcattgataagaatctggcatggagaacagtcaaggaagcattgcagctcaatacaaaacggtggccagggaagatccactgaattaggagtcagcagtcattattctactacctgctaatcttctatgagcttcgtcaagtcatttaagcttggtacccgtcagtttcctcatctgaaaactgagaaaagttgtttcaaattgtctaagtccattccagcttgatcatactagcatcttatgtgcagcttcttaaagtccagctcacacctctgtcaactccctgtataatatgacttccaaaaaaacacctgtggtttggttatacatatatatggacatatatatgttatacatatatattggttatacctatatatggacatatataggtccactcttctcatatccacagctgctatcaatataataaatgggcagtatctgtagtatcacttattaataaaatgaagtttttctgacatatacacaacccagactattaggtcattatctcaataatcccttagtgtagggaaaagggcagaaaacactttcattttctgtcttgagcattagcaagccacagtccatataatttaattaaaataacaaatgaataatctataattgacctgtgtctgtttctccaagccaaagggtaagtcagatatacatgattttaaaatctcttgttattttcaatataaattgttcggctaagtatccaacaaattggaagaattaaaatgttaatatccagtgcaataatctaaaacctactggtcatctacaatataaaatgttagattttaaggaaacttcagagcttattttacacaattctttcacctttatggttgaaattttaattttgcgatttccttttatgaagatctggaagttacaaagacagaaaggtaaccttatatctcaacagttgagaatcaaaggaagttaaataatgtaccaagataaatcagcttctggcataaaaaatcctgtcacttggacttgaaaactggtggtcctgggatagagcctaaaaataggtcttttatcctaatatatatatatatatctatatattatagatggagagagagagagagagagagagagagagatggagtctcactctgttgcccaggctggagtgcagtggcacgatctcggttcactgcaacctccacctcccggttcaagcaattctcccagcttagcctcctgagtagctgggattacaggtgtgtgccacaacatccagctaatttttgtatttttagtagagatggggtttcaccatattggtcaggctggtcttgaattcctgacctcgtgatctgcctgccttggcctcccaaagtgctaggattacaggcatgagccaccacccccggccaatcctaattaatattgattacaaattattaaaagtcactcaaactgtaattataacattcttataccagccgttctcaacaacatagtgtctgccaaaaagtaattaacaaatactccctgtgttcttgttgatgaaggaagtaggatgagaaaaggagacatttaaaggtagtctacaggaggtatagattcatttttctatgatatagggtgtttatttttaatgtggactacacattggaagtaatatttcttgattgtaaaaaaggctgggaataattgcttactgctggaaagcagaggatatagatctaatagagaaacaagtagccctacaagaaacagcaaacacagactcaatgtgtatgagagagacaagggctgcaattaagatgaccaaccattctgatttctccaagactgtccaggccttctcccacatctccagaaaccacccccattgtaggtaaaccaggttggttggtcacctaagctgcagcatcttgctgccattctgtaacaagcaaagacaagaaggttttaattggtaacccaagcatagagagctagacacacctagccagtatggacaatgcaagtcaagagaagtgctggacctgctgaaaataacaggaccaaaatgagatggatcccttacccatgctggtaaagaacatcagcaagtgtttagtaagggagggccagtgcctaaattgagaatgcattatgtgttctctatagtgtcctctgtgcctgtatatgaagccaaattgataaatgcctgattcccaaggcacgagtccatcctctgcccaggcagacacagaacatttaccagagcacattttcctgctgacatctgttccagtgggaacacagaatctgctcaagaaatggctctagaccagcggttctcaaactttaatgtgtattggaatcaccttgttgaaatgcagatttgatattttgattaggggaatgttggcagggaaactgaggttttgcattcctaacaagcttccaggtgatgcccacagaccacactgtgagtggcaaggctgtgagctccagtaatcaaccaggttgggagggtgattactggagatgaaagatgaaacctatttgacacacccaacctaaagcaaaactacctactcatagggctgctctgagggttaactgaaataagtcacacaacgctcctagcactgtgcctaacatctaaaccacgtatagtttccatgccaaatgatgggttccatcactcttattagtagtcttgtaaatgcaatttatatgaaaacttcagaaagcctggtttgtagaagtcaatgagaagagtggggttattaatatatatacactcagttctgactcgcacagagaacaagccttctgcacagcagaattc

SEQ ID NO: 53 - DNA, 176503 bp, Homo sapiens
gaattcaagaccagcctggttaacacggcgagatcccatctctacaaaatgtttatagttttaaattagccaggtgcagtgtggtgatgcacgcctgtagtcccagcttcctgggaggctcaggtgggaagatctcttgagcccaggaggttgaggtgccagtgagctgtgtttacaccactgcactccagcctgagtgacagagtgagatactgtgtcgaaaaaaaaaaaaaaaagaaaagaaaagaaaagaaaaaaaggagaaatggggagtagagacagcttcaattagaaagagaaatgctgtgtatgtggagagaggctgaggtggaaagtttccctgaagacccaaaactgccgcagagtagggtgagtgggtatatgttagaaggacagggagaagggctttacaggcagtggagtgttctctgcaaaggcacaggtgtgggagggcatggtgtgttctggcaactgctcaggattcagtgtcaacggtaggcagatgtcagctcatgaagtgccttttatgccatccaaaggactctaggtttgaagacataaactaaacggggaggctgaagcattctgagcatgggaaagtaggaaatctttgttgaatgcatgtgtgacagtgggaagacgggacatggtaattaggagtacagtcatgtgtcattaaagactgggatatgttctgagaaatgcgtcattagccaacttcatcgttgtataaacattgagtgtatttacagaaacctagatggtatagtcaactacacatctaggctatatggtagagcatagtgctcctaggctagaaaactgcatgttactgtactgaatgctataggtgattgtaacacaatggtaagtatttgtgtatctaaacatgaaaaaggtaaaataaaaatatgataaaataaccttacggggccactgtagtatgtgcagtctgtttttgactggaacgttattaagcagcacatgactatatgtcctaagcttatggccttctataagtgttacttagtctttctacatctgttcctttttttctttcttttttttttttttttttttgtgaaatgagaatttaaaaaaatcaacttgaaagtgttggccaggctctgtggctcacacctgtaatcccagcactttgggaggaagaggcaggaggattgcttgagccaaggagagcagaagttcaagaccagcctgggcaacacggggataccacatctctatgaaaagaaaaagaaaaagtagcaggtcatagtagtgtgagcttgcagtcccagctacttgagaggctgaggtgggagcatcacttgactagaaggtaggttacagtgagatgttatagcgccactgtactccagcctgggtgacagagcaagactccatctcaaaaaaaaaaaaaaaaaaaaaaaaatatatatatatatatatatatatatatatatatatataacccataaagtgttgttgaaatttaaaatattatatataatagatagacaggagtaatacaggcacttaataaaagctgaatattttttaaaaggtgacatttgttttacacaatacacattacctaaacaaacaatcattaatctgtgagctgcttctatgcttctttccttatctgcaaagtggttctccaattttaccctttcatagtaccctgtcctccttcccagcacttaccataatgttaattaatgttctaattcttttctagccaaacccttagactttaactgttttcccaggcaaactcctggctctgtgagaccagtcgcttaaaaatgtagtacttatctgcactctctaacaccacccgtctcttaacccatgttcaataaatgttggtgaaaaaaatcaaagtcacacttatcttgaggagaatttagaggggccaatgaactggcaaagtgtttcattatgacaggagaaaaatagagcagtctacgctatattaaaagtatgcaacaatttattttattttaatcttttttacattcctggtaactcacagaacaaaacaatttatttgtatttgtatttactaatttaagaaatagagatggggtctcactatgttgcccaggctggtcttgaactcctggactcaagtgatcctcccacctcaccctcccaaagtgctgggattacagccatgagccaccgtgcccagtcccccatttttttttaattaaagttatggggtctcttatccaggctggagtgcagtggtgtaatcacagctcacagtgaccttgaacttccaggctcaagcaatcctcccgccccagcctcctgagtaactagagctacaggcgtgccccatcacacctagctaatatttaaaatttgaattatttaaaaattttaatttttatttaatttttataaaaagattttataaaaaggagatttattctttatcttattttttgagacaggatctcagtctgtcacccaggatggagcacggttgcatgatgcatcaccgtgcctggctaatttttaaaattttttaagagatagcctgttggtatattaccgaggctggtttcgaattcttggccttaagagatccttcccccttaggctcccaaaatgctgagattacgagtgtgagcaaccccaccagcccggccaggcattcaaaatttatcagacccagagagacctgagtatgagatgtcagttagcaccatccccatgtacactagcaattgtttaaaggcactttgttcttttctgccctgtacaagcatcaccctttatcttcgtgttcccagaatccgtgatagaaagaacaagtatagccaatggataggttgttattttaatgtaaattcttggaatacaatttagcaagggcctcttctttttttttcctttaaaaattcacttgtagccgggtgcagtcgcccacacctgtaatcccagtactttgggaggcagagatggaaggatcaattcctttgagacaagagttcaagcttcctggccaacaaaacaaagaactcacttgaaactgctgctaagatcatgtattaaattaagggtaacttgaagtgatgctcccagtttgcattcttgagacttggcccaaataaattctctatttatattaactttgcctccgtttttcctttaggttgacagttatttctaaagttgtacagaagggtttaccttgagtattaaaataaggtgtgagaaaggcaactgaagccagaggctcccatcacagccttgtggccttcggaggcttccaaaggatcagcattaactgcaatatttaggaggagtgcagctcttcaagattcataaagtgttaaatctgttgcctggaattccagaaagagggggaggaagagcacagtgtgaactgtgttcaacttcaacctaaaggtaaaagcgatcagcctaagatcaggagcgcaagggagaagcttgaagccatgcgttctcacggaggcgtttcccgctccagggctgcccaggcccgcgggccaagcagctagccgtgcgggccgtcgtcacgcccgcgatcagatcagctccccgccacgtggcactgggaaggcgtccaccaagctccagggagaaggaggcggagcccggcctcaatctcacccgtgtcctcatgggagttgtagttttccttgcgggcgtagagggcacgaactcccggcttttgcccgataaatagcatctcttttgtacgagtcattcaaataatagacgcaatctaggtaacttcaagagaagatgggaaggggaaggggcaaagcatggaaggcaaatctaaagattatgggcggggcagagaaaggttcgcacttagtacgcatgcgcataccaggcgcgacaggtgggcggacacagaaggcgacgcctagggctgtgttgtcccggaagtgccttctctcctcccgggtctgcgcggacgcggcctccttacctcatttgtcctcgcccctccccgtccctctacgcgttttggtccctgtttggtgctttctgtttgcagctacggcagtgagtatgtatgtgacggaccccgagtcacccgcggcctgggacccctgcctaccctccgtctcgccagccgagctgtggaactagcgcgtgccccctcgccgacctcggcgtctccggtccgcccctcacttgtggtggggcgcagctcctggtccctcagctgcgcgccgccccacgcggccgggctgcgggtctagggggtccgcatctccctggctttccaagggctaaggtcgtgattctagggcggctgggcgtccagggcctcggtgggggtggcgtgtctgccctttttatctccccgcaaggcccccagtcttctagggaagccagtcagtgaagcgcggaggtccgggcgcgccgagagagagtccagtctttgaggaccgagtagtcctgggccacctcccgcctctgctgtcagaagcagcagctgccgccgtggaatccaaaatttcgggagctgtgaccctttcctcatgtaaaacgagtagtcttggacggtgagcggacagttgccttcaacttttgggaagagctgccggttcggtggaaaagctgtggctgggaatcaggaggcctgggttctagccgtggctcccccacggactcgctggcgattccagaaagctcttattgaggctgaatttaagattatatcagattacacagttgaattaggggctccattagtagggcccttttagctcagtgaataagtttctccaactataaaacgagagcgttcaatttgatgacttttcaggtcccctcagaagctcttgactttgtggttttctttttcttttaaaaaattttttctaggaccgttagagaaatgacttcgtgtttgaatagttaggctgtcgcatacaaagacttttaaatggattgtgtgtatacttaggaaggcattatgctttcaagagaatctgaggatggggaataaagtcaggaaggatcgcaagtgaggattatattaatatgataattagcacggtaagagactgcatgaccgaaggaaaagggctaagggaaaggtgaaggaaatgtttccggataggattagttctcataaaaatcatatatatatcccaagaagagctgggacttatgtgactaaatttagcttattttttttcccccactgaaatactgtgctctgcctctgttttgtgacctttgttttacacatttggtttctccactccaatctcagatttgattcagagtggccgtggcatttgaaaaatggacattttaaccccttagtcaattgtgtttcacctgtcactatcaggatagctcattaatagtaagaaagaaattttacgttgaaagtaaagtgtgttcagcatattgcagtgaaatttggactgaaaatgaggctgtggatttgatttaaatcggcccgagatagattcctatgtcgtcaagaaggaacatctagggaggctaaaggtgctttggaagtaaataagagcaaaaggtcagaatgaccagtaggtaggctgtgagaccagaaagattgattaaagaccgggcgcggtggctgacgcctgtaaatctcagcactttgggaggccgaggcgggcggatcacctgaggtcaggagttcgagaccatcctgaccaaaatggagaaaccccgtctctactaaatatacaaaaattagccggcgtggtggcgcatgcctgtactcccagttactcgggaggctgaagccggagaattgcttgaacccgggaggcagaggttgcggtgagccgagatcgcgccattgcactgcagcctgggcaacaagagcgaaactccatctcaaaaaacataaagtaaattctgaaagcttaaataagccttaagttgtctagtttaaaacaattcagtcaatgaatactactccctcttttgaatgggaagagcctttgcagttattctatagctgttttatatttgttaagctattttgattcttagataagtttcatttccatttccatgatattttaggatcttatataagaaatatcttttctggtcacgggattgataaagtctttgagtactaacttgggagattcttggatgataaactgacaaatgtgtgtttttcttccaacgaaaatgtctcattcatagttgttaaactctgctgggaggtaaaatggatatttgtgaggtaaacttaggtgttagaaccaatgcaaatacttcaatgaaggaaggtgtttttttactttgaaattacttatttggaaattttatttaaaaattttagtggacagttggctgagaatcacagaaacgtgaatcacttctagctgtgttcttaaccagctgcataaccttggataggcctcctatctctttgtacttcagtttcctgtgggtagattgagtagtctgtatgagataatctgattttgttatctagttagtatacttgggagtcaacgtacagggatcaaaaagctgagaaagccttctgagtcaagggtttgtttgtgtgtatgtaaaaaaacatatatattgtcctctgagaatactcttttttaaaaaagttattaaattcatttgaatgtaattaaagcggtaacataaaccacaacagcctcaggcagactttaaccctggcatacataagctacctaaataagagagcaggttatgcccagcacaattttcaagtacagacggtacaaaatcctcttaaaggccataggggctaaattgttaaattcatttttctacattttagagaaagagataaatccttcgacccagggaagtcagtttttattatggttctgtagtttatttttggcatacattcacaggtgtgcctatggctctattcttaatccctttcctttgggatggctgcaagagtagtacaaatttgtaactgtaatttagctctttaatttttttctgtgctgcactggaattatgttttatcttaagtccacactggatcctcaggatggatccagtgaggattttgaaagaagcataattcctttgacttcttttagaattaatttacctattaaataaaaaggaaaggattcatcttttatttgaattcctctgaggctaacaattcaatataaactgatgaatgctatgagcattattcagacaatcacattcaatttgtgtgacaataacagcatagccacctgaaggacagtacaacaagggcacaggtatatgataccttttagaagaaaagcattaacaggtgggtttatttatttctggaaaacaaaaaactccagcaagaatgtagtacatttttggctcttgtccatttggttcttgggattaagctggttctattaccagaactagcatcacaacaccctgacattttgggcagaaatttgagtggctaagaaaacaactatttttaactttatgtgtatagctacaagtggaaaaaagaataaattggcattgttattgctgtctgggctgtccttgatttttggacacaagcttatttttccagagctctcattttagtcagtagtccatcagtacctaatggaaacatctactgtgtagatatgagaatttctaagactttggagtagttgaaagacagcagagaaatttatcctatcataatttctgtattttaagcacatactagatttatcagggctgaaggacaaatggcctggtgttataattcatttataaattcaacagatacttatagatggcccccaaaataccagttaccctgcttggctttggtgattcattgtttagcagagtgtatatagttcctgcccctcctgtggtttgtgatctgtgcttctgggagatttacattgaataaataattagaaatgtgatgagtgttttgaaatgtaaagtgctatgaaagcctataaaaggggcatttaatttaatctggtgggaagtgattttgagccaagtttaaaagatgaaggctgagaaggatttaatatgctcacagtactaagtgtttcactttatgcatttattcccaaagttgggagttttctctcaattttaggtctttattacgtttgtattttatacacagttttataacaagcacaggaataaacaggtttatcagggtttttttggtttttttttggaattggggttttgttctgtcacccaggctggagtgtagtggcgtgatcatagctcactgtcaactttgaacacttgggctcaagctatcctccctcagcctcccaaggtgggaggtacaggtgagtactccatccacctctgaccttggccctgtgctctcattcaaccaattctgttggtactgcctcttactacaagatttgcttacccgggagttagatagcaagcatgggaaatgcctggcacacagaatatatggaattagtgttaggattttagtaacttcacagtcggaaagaggaaaataggaagagctgttcgtatagggtagactataggagagaatgcaaattttgaaagctacatcatcaaggattaaaattttgctgctagctttgtctctataataatgtggtcatctagtcttaatgcttattccttcaaaaagttcattcttttcatttttctccctttgtgcctaatgctcaatctcttgcactagtttcggaagtggtcttcttttatgtctgccctatatgctgttgttaaaactggtattgaaatgcacttttattcatggtactttattgctccaaaatttgtaatggcatcctgcttccccaggaaactatgacactgaatgtagatcatacttggagcccctgggattggcaaattttttttttttaagaagccagatagaaaatattttaggtttccaagccatatgatatcttaactactcaactctgcccttgtgggaaagcagccttagataatacctgtagaaatcagggtggctattgtcaataaaaccttacttacaaaaacaggtggctggctcagactgtagtttgctaaccctgagaacttgacagcaaaaagaagagataaatagtagttaaaacataaagcagaatcaaataaattttttttccatataggtgagatctgataatgtttttaggtagaaaggaagaaacttgtgaagcaggagagactaaacctgtttgatgtttttggttgggggccaggttagagataggatcgggtgtatgtgttgttgaattattcctaaaagggaagagagacaccagtaattgcaaaatcatcaagtatttatagaggtagaggagaaagaataaattcagatgtgttgagatagatgagagtacctatgaggatttgtttgatttgggaaaatgaaagcagaagtaggagaagcagaagtaggagaaattcagatgtgttgagatagatgagagtacctatgaggatttgtttgatttgggaaaatgaaagcagaagtaggagagggcagaggataattggaagcttagaatggggaaaggatgtctgtgctgtggggaatactttcaggcagttgttaccagtattttgaagatgacaacttgtttaacctcgaaacaatttgtggaccaccccatgattgtagttacatttttagtattcatcaatggagaatatgcatattagaaaaaagctactactcagttctctcttagatgactttgtattttattaaccacaacatggactgcacatttgaaaaatgttaatacatgtatgtgagaaattgtctttatgtaatgcaatgccctgggtacccactgagataactaatttaacagcttcccaggaggctgaaagctcataagttagaaatcattgcgttctaatgaatcaacaataagagaataaaggattgcttagaagtagtattctgtcaaaattaaaatgaacttataatgaactcactttgaaggattccataactttttattcagtagtacttggcagttttgagcaagatgacagaaacaaaatgatctagggttaggcataacattgtatagaaggccagaataaacatttagcttattctttctctaaattaccttttcctgagatcacacccagtttcattaatcacttctgtatttatggtgatcaaattggcatctcattttcttaaccgttttgttgatttcatgttccccatttacaccttactgaatatttccatttgggtatcttactgtttcacatttaacctactgaaaagaaagcttcttatctttcctttgaaacgagctctctgctgatttctacttggagtagagaatatacagagatgctgaagttgatgggaaaatgtggataggttgggaaaaacatgaattaggtgtgggattcattgaagaaattgaacagcatcatgactggtaaatgatggtgatgagaaagtagagaaaacctactgtttgctcttaccatttgttttttaaattttagccaaatcaagttcttgactcatacactcttacaaatattcaaatatatgttctctattttgtttccttaatccaataatgttgtaatccttttccaattaataagcaatatgttcaataccgatgcccatttaagtgtgctgttactctctaatcattattattcctttcataaatagatctgggcataggaaccaatcagaaacaatcgcttcagcaatcaagaccattgttcatcatggaggaacccatggatacctctgagcctctatctgcattaccattcactgggcagcagtcttttgagccaagtggcaaatttggacagtatccatcgatgcagatgaaccacatccaggcactggggaagtggaggacatagaacagctcaatcagtgtttgatccaacacttccatctcattaagacaagtttgatttttctttgctttttatttcatggaatacatgagaatctcttaactgttggagtttccaaggaggcatacctcatgacttcagttaatggaaagaacaaaactaaaatgctgtatggccaaagccacaaagggaaggatccacaatttacattcttggagctatcatctgtactgtactgttgtgatctactgattggcattggcatagtagtaggggtcaagtgacagaatccgtgccagcagtctccaggttcagaagcaattcaagaccctgatgatagctctccagcaaccaacacatggtgattgtgccaacttgttgctcagttataatgcagggccagtgattggtttaagtgaagaccatggttgagatcatttgtctttggtctaatagaatttgagtctagtagaatttgagtctccagggaaagagctacttgaccaaattaaactagtagcaggtagagcatgaatgacagcatattataccatcaagatgttcttagagcagtgtatggatggatcgattgtactgccatcagttgtgactgacgttgtattcaaggagaaagagaaacttgtttagaaagcactttgaaagttttttgagtacgggggtgccctgtatcaccccgttatggttgaactttctccttcaaaattaccagacttggcagcagtggcaaattattgggctaaaagacttaatcagacatattctgggttcaaggctcctaatataatacctggtgcaaacattatacttccactcattcagatggttgcatcctgccaggcatccagtgggactgggaatatggacacttgaacattaaacatcctgaagaattttggaatgacaggttacaagtgaacataatcagttctctatattaaaaaaaaaaaaagatttgggcatagattgggctcacataatctttagagagattttttcatttttgtgaaagtacagaaattcttaactgcttatgaaatgctgattgttaaacagcatccacagctattttgtgttgtttccctgaccccaccctgaagaaaagaaaaattatggcatattgaaaacagcagtatgatgtaagagaaaagatcacaaattccttgagggtgggtcttttccatactcataagcctatttataatattcagagtaatttattgacacatattaatattccctcctatcccattaattgccaaatcatcaaacatttattgagcacctactctgtgtagggtgtaagcagtactggggacttacagtgataaaagacatagttttagccttaagtgatgtactgtttcactgaagagatggaatataagaagccaagtaatttatggaattctcttctttgtttttcttttttttttttggcagtggagtcttgctctttaaatagagcaaggctagtctggaactcctgggctcatgtggtcctcccgccttagctttcagtgtagctgggactacaggtgtgaacacagcttggaaatctcttaaccatgggagttaagtctcaaaattctggtgatacaagtggttgaaacttaaaactgtatttaaaaaataggattcgtgaatttgagatagttcataagtctgcaaaaggctgtataaatacatattttacatttactattattaattttgtagtaaatttgagtacagcactctctttatctgtggaaacttcagactctcccctattactttaatttcagtgagacattattaaatataagtgggcttacacatttgttttgctttactgacaaataatacacaacttggaggcttttttttcctttctattcttcctctaaatgttcaacacttttctgattttgtgatttgaggttgtttaatagcttcctgaggctccattgagaccgtatatacgtgacacttaacagtctagccttcctcggtacatatagatatatgatggtggctttgcctgtagtaaattcatgccaaaacataggctttcagtgcctattacatatggctttcagctctctctactgagggatgtaggagtttatttctgaggtctgagcctcttttcctttacttcctttactctttcctaagccttctttataaaaactatgcatgttctattgttttcctttttgattccctttcttttattatccccagtaggagtgacttgtaattctcatatgttagaaaggcagatctcctggttgaagaaaagatccacccaagcaagtcagcatgtttaataatttttgagggggatctcaaatgtgggaaggattgttatataagacaaccaaatgatgacatgagacaataaatgctataggaattatggaggaataattagctatttattttcttggttagggaagagatattattagttgtagaagtaattactaacttctacattttttattgtggaaatcaaaaatatatatatgaaaataaaatgttataattgacttcagtgtcccataaaccagcttcaacaattaccaaattgtgaccaatctttacacacatgcacaggtgtccctcagtatctgtggggcattggttctaggaccacttatggataccaacatctatggatgctcaagtccctgatataaaatggtggactatttgcatataacctgtgtacatcccgtattatttaaatcatccctagatcacttataatacgtaatacaatgtaaatgccatgtaaataactgttatactgtattaaggaataacaacaagaaaaatgtacatgttcagtacagacgcaattttttttgtgtgtggaatattttcattccaaggtcagttgaacccatggacataggaggctgactgtgtgtgtgtgtgtgtgtgtgtgtgtgtgtgtgtgcatacagacacacatatttctgaaatgtaaatattctcttcttaaaaaaattattatcacagctaaacaaattaccagtaattcttttatcctcatatacccggtgttcagattttctagattggctcctaatttttttacagattatttgaatctgattcaattcatgtactgtaatgtttgataacttaagtaccctttataggttctcttttacctcttctttattaaattccttgtaatttgttgtactaaatagattgtcttctagaatttcctgtagtctgaattatgtagtattgtttcacatgttccagtgtcctcttatttcctgtgagttggtagttagatctagaagcttgattaaattcagattttctctctttagatcatcaactttagatcatcaacttggatcatttgtttcattttgcttttgatatgttgttttttagaattacctcttaaaattttgatttaattttataatcatgtaaaatgtttataaatttccaaattcagatcagcaaaacacaataaaatctattcagagaaggcaaaccttctgtccagtctccatcctgttcctgctcttccccttatgggtaaccattaagagaaaattggtggttggtccttacatttaaaaatatatataatcaaaaaactgtatatctttgtaccctctttcttaaatttattttatttatttatttatttatttatttatttatttatttattttagacagagtttcgctcttattgcccaggctggagtgcagtggcgcaaccttggctcactgcaacctctaactcccaggttcaagcaattctcctgcctcagcctcccgagtagctgggattacaggtgctcgtcaccacgcctggctaattttttgtatttttagtagagatagggtttcaccatgttggccaggctggtctcgaactcccgacctcaggtgatccgcgtgcctcggcctcccaaagtgctgggattacaggcatgagccactgtgcccagcttccctctttcttaataagttgtggaatactatgtgctcttttaaaatgattgatgaatagtagtatacttgtgacaatctttttttttttgagacagagtcttgctctgtcgcccaggctggagtgcagtggtgcaatctgggctcactgcaatctccgcctcccaagttcaagcaattctcctgcctcagccttctgagtagctgggattacaggcatgcgccaccatgctcagctaatttttgtatttttagtagagacggggtttcaccatgttggtcaggctggtctcaaactcctgaccttgtgatccgcccgcctcggcctcccaaagtgctgggattacaggcgtgagccactgcgcccggcccacttctgacagtcttaaaatgtattttaaacaaataaaaaagtctaattccactttcagaagcatgctttgttcttgttcctggtcataatgtttctttctcatttaataattttgaagatttaggtttagcaaaaaattattaggctcaggactttttttttttttttttttttgagatggggtctcgctctgttgcccaggctggatggcagtggcatgatctcggctcactgcaacctctgtctcctgagttcaagcaattctcctgcctcagcctcccaaatagctaggattacagacatgcatcaccacccccagctaatttttgtatttttagtagtttttagtagagtcggttttcaccatgttggccaggctgggctcgaactcccaacctcaagcagtcctcccgtcttagcctcccaaagtgctgggattacaggcgtgagccaccgtgcctggctaggttcaggattttaaaagaatatttgttttgaaaatggaagaatacaacatttttaagagttgaagatggcatattcctagtttgtgagtcttgtggtatgttatcgtagagctccttcaatatgtataatttggaacacagcccctttagtttgtcagcatttggcacatacgggatacctaacagatcgtaggtaaatttaattagaattctgtttttgtgtatagagtacagctctttacatagtatgatttgaagtgaaataatggcttaaggtaagtggcttttgaaattgaaatgaaattatggcttcaacaacttagggcagtaagtcttctaactgttttatgtcaaatcctttttctcccaaaaacatgtacataacagttttagatacaatttaacaggatggagaactcatctagaggcagttgctgaattcctgacgtttattaggcactcaaccaagacttgataactaattaaaatttgagtagagtgggttacctatttgaattttaggttttcaaatatatattttatttgatctgggtcttcacatatgcaggttttttccccctgtgtgagttaatttccaacttgcctggctgacacctacttatctctcaaatatcggtttaaaaggtcacttctgaatgaggtgtaatggtcataggttctcaattagtggttgttgttgggtctgttagaattctgcagtagttagctttgattttgggtaacttaattactttattggtaaaaaatacatttttttccattaaagttataaagctaaaatgagagaatgagtagacttaacataataggcaaatattttgataaaagtcttcataactacatgataagttcatgatcattgtggcaaacatgggcttataccttccactatggttttttctgtttttggtttgtttgtttgttgtttttcttttgagacgaggtctctcactctgttgcccaggctggagagcaatggtgtgatcatggttcactgcagctttgaccccaggcggaagcaatcctctcaaatagctggaactatagacatgtgccaccatacccagttaatttttgtattttttgtagagataggattttgcctttaggatattgctacaaccaccactgtgaaaccacaggcccatatgctaaaacagccctgggagacagttgactcctccccttctcccattttgcagatggagacactaaggcccagagaaggaaatagaattgccaaaggttctacagtgagttcatgggaggggcaagactaatgagaaaagggacatctcttggacatcactgggcactgtgctttgcatacatgatcatattccatcctcaaaacaaacctgtgcagcaggttttgttagtactccggtttcacagatgaagcctcaactctgaggctcagacactgggaagttgcccaggatcacacagttaggagatggcagagctggaatttgaaagccagtctgattttccacacaaatcgtttgaccactaacactttcgggttgcctaaaacccaggccccgtctccccactcccctaagtccactctatccctgtagtcctccattatgttacattgactcctaaagaaaaaagatccagatggtcacagctttggaggatttgcaaagcacttctgtgccttcctgcacatcatctcaggagatcctgataccagaccgagcttgtagcctggccagaaatagcatgctcatttcacaaagcaagaactgttgggtttccttcaatctaatgatttcaccaccatctgtgcgatagctgagcaaagtcaacaggttgataaactcctgtggtaggaatggggacccatgacctgccaatagggaagaacagacatacggaacttggccagggaaacttaatccagaagaaaaaagtgtattttctctccttatatgttttaaatagaataatgagaatcctggattttattttatttttttaattaaaattaattaatttattttgagacggactctagctctattgcccaggctggagtgcagtgtcccagtctcagctcactgcaacctctgcttcccgggttcaaacgattttcctgcctcagcctcccaagtagctgggactataggcgcccaccaacacgcctggctaagttttgtaattttagtagagacggggttttgccatgtggccaggctgagataatcctgattttaaaaactcaactctagtgtttatattttaatttattctcagaagggtaggagggtctagaggaaatgcaaaatgtgagtcttattttatgatttgctatggtaaggcacatttaatcccgttcttcagtgaaaggatttacgaaggatacaacacaatgtacctgtctgttgccttcattgtattttttcccagatttttatttagtttgcaatgttacaacaataagggaaattaaaaggaaagaaaattatccataatcctaccaccctaacaaatgaactgttcagtgttcctcttacttcaggcaaaatttacataggtgatttatgagtgtagttacagcctcgcattcattcggctttcacacctgacagtttatcattataatgccacaggttttcatgattatcatttaaaaataaatgttttaatattttaatggctgcttaatactcttttaagtggatatatcattccctagtattatatatttagaaggactcccgtttttcactatcacagataatcccaaagtgcatgtcttcatacatatcacattctcctatttttgccatttctttaaaatccccagatctagattttgctgggtcaaagggcctgaatgcttgcatggctcttgatatatatgggcaaatcgctttgccaaatgattttatacatttactttgcctctagtaatggatgaggaggatagtctcataccatgctcttgccacaaccaagggaaatctaccaacaaatgaaatgtaacttgataagcaatgtttttacttcattttgacaaatggcttgacaagcctgtcgcaggctctctattctcttatctctgttgctgtcataaattaagtgcctataccaagaatctgggaatgaggcaaagcaattattatacccattttatagctggggaaactgagtctcaaatcagggtttttcccaataggctggacagtgagtaagtggaagtgctgagactttggtaatatcatcaactgttgtgaaccaaagatgatgcattggttccttataacctcctggaaggtcttctgggttttgaagctaggaaagcatgttcacatcaggtacatttgtaactttttttcagcagacctcataggccttccagcctccaattgctactcaaatcatgggcttactttggaggagacttttgatatattttgtttgccagagaatctgtgactttcagagctggagggaacatcagagataatctcattctactgggagaatggagatggagaaacagtcccaaagaagagaaaggatttttccaggttcattcacggagctgacagcagagttaggatctacattctggtttaaaatggtgcctaggccgggtaccatgactcacacctgtaatcccagcactttgggaggccaaagcaggtggatgtgcttgagctgaagagctgagacaagcctgggcaaaatggtgaaaccctgtctctacaaaaacacaaaaatagcagggtgtgatggtgcatgcctgtagtcccagttacttggggggctgagtcaagagaataacttgagcccaggaggttgaggctgccatgagccatgtttgcaccattgcactccagcctgggtgacagagaccctgtctcaaaaacaaacaaataaataaataatgaaaaaaaactactttaaaaatgttgcctagagcatataattgggcaacttgtatattgtgagatattcaaaaatgagcattttttcttttctttttttttttttttgaaatggggtctcactctgtcgcccaggctggagtgcagtggcagtcatggcttactgcaacctcacctcccaggctcaagcgatcctcccatctcagactcctgagtagctgggactacaggaaaatggcaccaagtccagctaatgttttgcattttggtagagatggggtttcaccatgtagtccaggctggtcttgaactgctttcctaggctctgctctcagctcctgagctcaagcaatccgcctgccttagcctcccagagtgctgggattacaggcgtgagccactgcgcctggtccttaagtgaacagtttttaaaagcagtgagaaccatttgagaaacactggataccttatgtttcttttggagatccctggtgaaatagtctgggtaacaatatgttaatgtgaaacagatttttttaaattaaaggatttgccatagtctgctacccaaaatgacaattttttattatttagttttagtgttttgtgggtatttggttgggcttgtttgtttatttttactttgaggaaatatatcctatttattagattttacttttagcatgtgttgtttatttatttatttacttattttttacctggtaatcagtgtcactgtatacttgcagaggtatgtgtacacttaacagtatatcttggtgattgttccacactggtactttaagggcttccttgttgttcttcatatatttttcctgcagtggggtattctgatcaatatgtatttgaatctctaattggaatatagtctctaccctcagggagcttatagtctcctggaaaaatgaggtgtgttcattatggctgctgaaagaagggagcaggtgcactgggaagagatacaaagtttggctggaaacagtggctcatgcctgtaatttcaacattttgagaagcagaggtgggtgcatcacttgagctcaggagtgtgaagaccagcctgggcaacatggtgaatcctaaaaatacaaaaattagccaggcgtggtggtgcacgtctgtaattgcagctactccagtggctgaagcatgaggatcacctgaacctgggaggcggaggttacagtgagccaagatcacaccactgcactccagtgtggggcgacagagcaagactgtctcaaaaaaaaaaaaaaaaaaaaatggagagagagagataaaatgtagtaggcaagaagagaaaagagatcatctcagctggttttggatattggacatgagctcaaacctgagaactgagaagctgtctgctgcaggtgagtctggatgatggacagtgacaagcagttattcatgtgtgaatctggtcaacatgaacatttagatgctgaacacaaaagcttgatttttattagctatatttgttgcccatatattggaacagatcttaaagtggaagtcagacgtgtattatcagatatcatttggagtaatgagtgtattttcctaatctttccaacaccaacctaaaaactcatgtcaaaagcatgcatactaattaatttgttttccatatagtaataagattaacaacctcgcatttacatggggtactgagtcatgctcaaataaaacaagttctaatgagaaaaattgaatgtggcagcaaatcatgtcccacccagcaatccaggtttatgtgtgtttttctgtctttcctacacatatttttgtcaggatctcactgtaaacaagatgatttctttcatgttgcttaggtgaatttgtttagtgaaccacaaagtcactgtaaatattgcacaaatctgagtgccttgcagtgtggctgggaatcttttaacctgcttcaaaaaatgaaatgtgttcactgaaagaaccatattgggagaaaacactcttaacatatcaaggctcttagatatgcaggctggctcaattctatactggacaatagaagaatttgtggtggaataacgtgaccttgtacagtcactctacctcacctaatctgggcctcagtttcttcctctcaactggacagagtcggctaggtctgtgattgtcctacctactaatcatcagaatcagcagagggtggagggtggcaagtgagagctttaaaaaatacatgtggaggccgggcgtggtggctcacccctgtaatcccagcactttgggaggcttgaggcaggcggatcacgaggtcaggagtttgataccctcctggccaacatagtgaaatcctgtctccactaaaaatacaaaaattagctgggtgcagtggcacactgtaattccagctactcaggggcacaagaatcgcttgggcccgggaggcagaggttgcagtgagccgagatcacaccactgcattcctgcctgggcgacagcgagattctgtctcaaaaaaaaaaaaatgcaaacaaaacacatggccaacctgtcctactaaattccagtcctactagaccccaaaaccccagtctctgagggttggggctcccagagtttctatttttaaaaataaatttctcatgtgatttgatgatcaaccaggtttgggaccctctggactagacagattaccactaagatcttttccagatttcatgaccatcaaaactgattattctaaaaactcatcttggaaaataccgttgtgtgtctgggtggaagaacgctggtaagggaagtaggaagctggattcgagtcctagggctcccctcaagctatccaggggacactggaaaagccacttcactctggaccttagtatcttcatccacaaagtaaaggcactggagcaggcagtgtcagggcccttcctctcacattctgcagcctaattaattctgattcctttgagattcattgtttgcacataaaccacccttaggtgactgaatacagagactggtcagtgagactggttgggttcatctgcggtagcctacccattcttcctgaggcccagggagtctcttctgccttgcaccttcggtgggtcccacccctccacctctttcagaggggctgagggtgtgttctggcccagagccaggcacttcctcaaccctcactcctttcctccatttaggactcaactcatttcagcttttcctgttcctccaagacaagatctatgaaagatccccgataccttatcccccacattcccagcccagagatcccctacacagtaaatccccaaaagtatctgagaaatgaatgaatgattgagtgaacaaatgtcatatcagcttctttccagctgtaacattcaatgcctctgtcctcagagggttcatcctcagtgaggtgaaagaagacaaagtcttgtcaggtctagatacggcataggaccatgcaaagagtgggccacttctgccaaacgttgagcctattagttttactaacttcatatggatgggattatactggatgtattcactgtgtcatgctgccttttttttttcttttttttttttaatttccagacacagtttcactctgtcctccaagctagagtgcagtagtgcgaccttggctcactagaacctccacctcccgggttcaagcgattctcatgccttagcctcctgagtcgctggaattacaggtgcgtgccaccatggccagctaattttcctatttttagttgagacagggtttcaccatttggccaggttggtctcgaactcctgcatcaagtgatctgtagacctcggcctcccaaagtgctgggattacaggcgtgagccactgtgcctggcctgtgtcttgcttctttcaaccaacattatattctatatacttgctaggatgggggttattagcattcacttttaattactcattaaagtatatacatatgctttgtgcatattcagtatctgcactatacttcacaataaaagaagaattgagggagtccaagacgattgctgtttgttttcaagagacaacctagaatgagtgttctcttttagccacttttagaaaaagtggctgggcatggtggttcacatctgtagtcccagcactttgtgaggatgaagcaggacagtcactggagcccaggtgtttgagaccagcctggcaaacatggtaaaaacctgtgtctacaaaaaatacaaaaattggctgggcatgctggtgagtgcctgtagttccagctactttggaggctgaggcaggaggatcaccttaccctgggaggttgaggcttcagtaagtcaagatctcaccactccactccagcgtaggccacatagtgagaccatgtctcaaaaaaaaaagagtgacttggaacctgtaagatctttacaaaaggcaagaaccttggggaagtttttcacataggaactttacctcagagcttgccttttcttcactccttggcgagtattcagtcaacagaagcattaccctcactatgtaggtcacacatcacataaggctgtgcctcgcctaccaagtggcctaacctgtctgagcttcagttttttcatatggaaaatgatgatgttgctggcagcacggtgagaggtgtggaggatgcccacataaataaggtatgaggacccgacttgccataccctgtgactgggcctaaatctgcacatgtggcaaggtaactgtatggaaaataggggttataggctttgtgttgataaacctgagaaaaagtttggggaaatcattttccactaacagacccagttcagcaacactttagtatttacctgcctgggctgcctcatgcattgctctgtggcgagtcagggtttaatgaagtgggataaaccacacacacacacattagcatcagcacaggcaggattaactttacactccatttgcaagaggaaagctcctctcctagagtttgttataaagggatttagaatcacagaatgatagaggtggaagagagtccctaagacatcatcataatcctattccgtcattttacagaaggtcaaagagacctgcccaagagagcagaagagacctgcccaaggtcacctactgaattagcacagagctcaggttggaccccagtctccagatccccaggcctacatcctctccgctttctcctgtattgcttaaccactgccttgtaacaaaggcggggtagcacatttctctttctggctttgctctatacccttgatactcacaccctccatattcaggttttatggtgtatgagcaagatttgcatgtacccagctgagccagcctccctcatgtcagtgtagctttgcacttgctgtttcctttgtcttcattggtcttccctctctactctttccagagagattctattcagtgttgccttccccaggaattctctgaaccatgccctctcccatctctctagactttgagcccctctagagtagggacttcgtcttctttgcctttgtatctcactgcctagcaggggaatagcatgtggaagatacagagtaaacacttgctgaatgaacaaatgaccagatgaaataataaataattaaacatacaaatgaatgaatgaagtcaaaggcagagaggaggcagtatgggtctcaagcaacctggagctcttaacaacttgccaatttagctcaagtccttccttgtggagctctggcctgttctggatgttttccatgacaaccatggtccatgacctgcctccttgggatggcctggactctgaccacatatcactgagctgaatctgccatagccctgggctttcatctcaggccccagatagactgtcaatgagccatcaattctgtccttgccaccatcttcaaccagttttcccagggctgcctgcactgggggatacacctagaaaatttccacgtgagacgtgaagcctatgtcttcagggtgaccgtgcccctcagggtggagtgccaacacagattccccatgggcatctcaattctagcaacttgattagagaaggcaccttcagatgtcccttgtttatatagactcctgagagggaaagttgggagtgtgtataagtacctatatacatgtatttgactgggataggcattgacgtaaaagtcaggagactaggggttcagccccaactttgtcagcatggcaaaatggttaagcatgtggactctggaattgtactgctgggttagaatcccagctctcgcacttactagctattcagccttggggaggttacctaactgtggtgtgcttcatttccccacctatagaatggagacaatgatattctctgcctcatagagctgctatgaagaacacatgaggtaggctgggctccgtggctcacacatgtaatctcagtgctttgagaggccaagacgaaaggatcgcttgaacccaggagtttgaggttacagtgaactatgatcatgccactgcactccagtctgggtgacagagtgagacccagtctctggaaaaaaaaaaaaaaaagaatatgtgaggtaatatatgtaatgtgtttagaatagtgccaggcccatagtaagtgttaaataaatgttaggaattgttattttctcagacccttagttcatgttattccttctgcctggaatgttctaccctctggctttctgcatgcccagctccttctccaagtctccacttaaggtcatctcctcagggagaccttccttgaccttatctagaatatattctccccctcactcctgcatcactgaatacatagaggatggatcagggtgtctctgaatctcttctggttcttatcttgtgtattttccacaatgttattttttaggcacaccgttcctcccataagcctaggctattcatttatgtgattaatacagagtaacaaacttgtaaactgcaggcatatttgatctggaacaggctgaggaatctggcaccatccggtgggccactgattgtatttccagtttgcatctggtctttcttgttacatcttttctcctgtgccagaagtttcattgccaaaagtggtcagagacttaaatgtttactttttcgttttggcagcatcagtaaactggattattaaagttttgtcttccctctttgaaacccccaaaagaaaagaaattacaagaagaaatcttggcatacaaagaaaataattcaaagaatgtaatcataatagtagtcaatggttttcagactgacatctgtacattaagaatatgtaaaaataccaattttatgctctgacaacttattctgaattggggtggggtaatatcttgggaatcccaatgtgaaagcattacataatgtcagctattcatgtgcttctttgatgagatatcaacaggaatgtgaattcctaaagggagagtggtcttaacaagtgggaggggagagggaacgcataagaaaaggaaggaaagggctgggtgtggtggctcacgcctgtaatctcagcactttgggaggccgaggcgggtggatcacctgatgtcaggagttcgagaccagcctggccaacatggtgaaacccctgtctccactaaaaattacaaaaaaaaaaaattagccaggcgtggtggtgggtgtctgtaatccctgctactcaagaggctaaggcaggagaatcgcttgaacctgggtggcagaggttgtgatgagctgagaatgtgccattgcactccagcctgggcaatgagcaaaaactctatctcaaaaaaaaaaaaaaaaaaagagggacaaaggaagagagaagatgtcaaatcataatgaaagagtggttgtgtaaagaaaagttaatgcatatatttttaaacaatacatacaatcccaaatctaagccaaccatatctaggggttacttatctctgttttgagtttccacaattaccaccatgatggcattgaacatcatgttgggaagaggtgtgcagcagcacaccattatatcgtgtttccgccatacagatcaactagaggtaaattgccttaagaactaagacaatagtacaacaattaagagctgggtgtgctggttgatgcctgtaatcccagcactttgggaggctgaggtaggaggattgcttgagcccaggagtgcgagactgcctgggcaacatagggaaacccatctctacaaaaaatttaaaatagcaggcctggtggtgcacacctgtagttctactctctcaggaggctgaggtgggaagatcacttcagcctgggagtttgaacttaaagtgagctatgattgtgccactgcactccagcctgggcaacagagctaaaaaacaaataagaaaacaaacaaacaaaaacccaaaaaaacacaattaggaaatgatgaattttaaatattgttaccatatgaaaatatttctttaattgtaagtgtgattcttctgcctcagcctcccaagtagctgggactacaggcacgtaccaccacactcagctaattgtaagttcatataatttaatttttaagaatgaatgggtttaaccagcagcttggagaattccttaaaatttgacaatcagctctcatgagccaatctgagccagctgaggcacaatgctgcccctatcccaccaaaactgtgttacccctcacctggtctcaggcaatagtctcctaactggcctctaacatctagtctcaccttccccacactagccactagaaagggtgtataaaacatgtaattgaccacattactcttcttaaaaccttccatgggttttgattgtcctgaggataaaatcctgttccttatctaccatacctggactttgtgaccagacccaaaccttcctctatagcttcccagtaagtctattctttcacagtgttttcctctctccctccattccccaacatgctgtgctccagtcaggccagctcacttgcagtttcacaaactcacaaggctgagtcatgcctctgccatggctcttgcagagcctcctggctggtgtgcttcagcctgatcctggtttctgcagagaacactcactcctatgtcaagattcaaagagtcactcatgcaaacttttctcattctcttaattacatataaacaacaacctcctcccctttgagatggagtttcactcttgttgcccatgctggagtaaaatggtgctccatttcagctcactggaacctctgccttctgggttcaagcaattctcctgcctcagcctcctgagtagttgggattacaggcacccaccatcacacccggctaactttttgtatttttagtagagatggggttacaccatgttggccaggccggtcttgaactcctgacttcaggtgatcggcccacctcagcctcccaaagtgctgggattacaggcgtgagccactatgcctggcctaccacaattttttgaaaaggaggatcagttcatggatctgaggatctgagtttaggggatcagaggaggagggtggggtgaaaatagagcagtgatgaaacttctctgtaaattacctctctgccttcctgcctccctttttgcctgccacacaggctgagccaggtcctattttggggccaaacgcatatgcttgtgtgcactcagagatgaataagacagcacctcccctggaggagtcagtgctacagataagtcagggaggaagtatgggagccaatttcacaggtggaataataagggagatcatacgtcatgactcgaaatcttcccattattctccttcccctctgacccccgtgcatgcttctgagtctccttgagaggaaaccccataatatttctggagtcaagattagatgagaagatttaatagcatcagaagaaacatctgggtccaattatgaagctttaaatggagcctttacatttcatacttggaattaaggctagtgaatcctccagatgttttcaaataaaccaaactatcacagagacaacaggagagtaattgaaaatggactgagagagaccttgagcataggcagtctgaggtaacactaagcaagctcacaatatcccttgcaaaaaatctactagcaatagatgtgtatgtcaaagaatcttagaatttgggagcttaacaggacctgccttggcagttactaagtctttttcctcattttacagatgaggaaaccaaagtgcacagagattaagtggtttgaaacttcacacaggaaaattatgtcatacctggcactatagtcccatgctttgacttttagttgagtgagggcccttgattttctgctcacctattgctttccttcaataaaatgttctaaccttatattttattttatttttattttatttatttattttttgagatggagtctcactctgtcacccagaccggagtgcagtggcgtcatctcagctcactacaacctctgccgcccaggttcaagccattctcctgtctctgcctactgagtagctgggattacaggcgcctgccactatgccctgctaatttttgtagttttagtagagacggggtttcaccatcttggccaggctggccttgaactcctgatctcgtgatccaccagccttagcctcccaaattgctgggattacaggtgtgagccactgcgcccagcctctaaccttctattttataagtaggattttctcttctagtagtggaatgagtcagacagggagaagcaagtccttgcaaatgataaatatatattgctatgagttgaattgtgtccctccaagggaatgttgaaatccttatgctagtatctcagaatatgaccttatttggaaacagggtcattgcagatatcagttaagatatgatggatccttttttctgtttgtttgagacagagtctcactctgttgcccaggcctgaatgcagtggctcgatctcggctgactgcaacctctgtctcccgggttcaagtgattcttctgcctcagcctcccaagtagccaggactacagtcacatgccaccagactcagctaatttttgtatttttaatagagacggggttttgccatgttggccgggctggtctcgaactcctgacctcaggtgatccatgtgtctctgcctcccaaagtgctgagattacaggcataagccaccatgcccagcctgatgggttctcaattcaatatgactgatggcctcatgggaggaagaataagacacacaggaagaagatgtagccatgtgatgacagaggcagaggttggagtgatgcatctacaaaccaaggattgccaagaacctacagaagccaggaagaggcagggagggttcttccttaaagccatcagagagcatggacctgccaacatcttgatctcggacttctagcctccaaaactgtgagaaaagaaattcttgctgttttaagtcaccccactttttggtaatttgttgtgggcagccctaggaaatgaatacagtacacaaatgttgccagcatgtgagtttccttgggccaaaagaggtgggttccatcaggccttggggtagaggcagttatgaaacaaaagttgggctgggctcgaatatttggtagcaataagccccaaagttcaagcagccagcatgtcccaatcagattctaatctgggatactaacaatggatgatgagcagaatcagaagcaaaggtggaggaaatatttgtcttcccatttgaagaagttgcagttccaaatctttgattcagcaattctgattgggatacagaattttacagtttatgcaagttgcatctctaaggtacacgtagctgacatgaaaagcagcaagttctcttccttgttctcaccaaactcctcctaccgcatacccagtcacagacttatatatgttcaaaagccagaaaagactgtaaggtggttgttaaaacctcactcactttggagtgttgctggaccactgcaggctgacttcagtccagagagatgtgcccatttactcactgttaagtctttgaattagagtctctgcaggaaacaggtgtacattctgaatgaagaattgagtagtttcatgaagggacagtttacagaggggtgggcagaactcagggaagacaacaaggtatggcaccctagggctagccattgcagggagcattcaccttttagttacacctaaaagggccaggaaggaagggagtggctgtatgaagaaggtcacctgacaggagctgtggtcttttgtagaggaacgcaatcaactcatggagacgcagcagagagggagccagcacaccaacggtgtgacttcattcccctcctgtcctcctaaatttagctcatgctgcctattgtccaaccccaaccaaagaccaaaagataaggaagcttttcaaacttaatggtgatagactgaaagctttccccctaagatcagaaacaatataaggatgcctgctttcatcactgctactcaacatggtactgggagtcctagccagagcatcttggaaagaaaaagtaaaacactgtcatcatttggaatcacaagtcatccaaattggaaaggaagaaataaatatttacagttgcagaacacaggactctacatatagaaaatcccaaggaatacacaaaaaatctattagatctagtaaattgatttagcaaatttctagggtacaagatcaacacacaaaaaccagttgtgtttctgtacatcaccaaggaacaatcctaaaaaaaaattccattcataatagcatccagaagaatcaaatacaattcttaggaattttattctgattgggatatagaattttatggtttatgcaagttttgcatctctcaggaatgcatttgatcagaccattcatcaagaaaggtgaaggacatgtacactgaaaagtataaaactgctgaataaaatttaaaaagacctaacttaacatgaaattccatggttatgtatcagaaaacttaatattgttaagatggcagtactcccaaaatgacttacagattcaacgcaatccctataaaaattttaatggccatttttgtgtaaatttaaccaaggaggtgaaggacttgcacactgaaaagtataaaactgctgaataaaatttaaaaagacctaatttaatataatgaaattccatggttatgtatcagaaaacttaatattgttaagatggcagtactcccaaaatgatctacagattcaatgcaatccctataacaattttaatggccatttttgtgtaaatggaaaggttgatcctcaaattcacacagaattgcatgaggccctaaacagccaaaacaatattgaaaaagagaaataaagtactacaaagctacaataatcaaaacagtgtggtgctggcataaggatagacatatatatcaacagaatagagttgagagtccagaaataaacccaaacacctatggcgaattgatttatcaacaagggtgccaagaacattcaatagggaaaaaaaagtgtcttcagaagatggtgctggaactgggaaactacatgcaaaagaatgaagttggacccctacctcactccatatacaaagattaactgaaatggatcaattacctaaatataagagccaaaagtataaaactattagaagaaagcaggggtaaatctttatgagcttggatttggcaatggattcttagaactaacactaaagcacaagcaacaaaagaatacatcaattagatttcacaaaaattaaaacctttccaaatcaaaggatattatcaataaagtgaaaaggtaacctacagaatgggagaaaatacttataaatcatatctcataagggtttagtattcagaatatataaaaaatgctcagccaggtgcagtggcttgcttctgtaatcccagcactttgggaggctgaggcaggctcatcccttgagcccaggagttggagatcagcctgggcaacatggcaaaactctgtctttacaaaaaatacaaaaattagctgaatgtgttggttcacaactgaagtctcagctactcaggaggctgaggtaggaggattgatggagccccagaggcagaggttgcggggagccgagatcacactactgcactccagcttaggtgacagagcgagaccctgtctcaaaaaaaaaaaaaaaaaaaaatttgtgactccacaacaaaaatacaaacaattcaatttaaaaattgatagtggatttgaatagatagttctccagagaaaatgtacaaatagcctacattcacattaaaatgttcaactttattggtcattaaagaaatttaagtcaaaatcacaatgaaatgccatttcacacccactaggattactataacttaaaaaattgaaaataacaagtgttggtaagtatgtgaagaaataggaatcctggtacattacagtttggaatgtaaaatcatgtagccactgtggaaaacagcttggtggttcctcaaaaagtaaaacattggattaccataatgacccaataattctaggtatatgaatagaaacgaaaacatttgttcacatagaaacttgtctgtgaatgtttgtagtagcgttactcataacaacccaaaggtggaaacaatccaaatgcctgtcagtagatgtatggataaacaaattgtggtatatacatataatggaatattattcagccattaaaaagaatgaaatggctgactgaggtaggtcatgcctgtaatcccaccagtttgggaggctgagttaggcagattgcttgagcccaagagtttgagactagcttgggaagcatggcaaaaccctatctctacaaaaagtacaaaaattagctggacatggtggcatgtctataattccaggtacctgggaggctaaggtgggaggattgattgaatctgggagttcgaggctgcagtgagccatgatttgatcactacactccagcctcagcaacagatactgtttcaaaaaaaaaaaaaaaacaaagaatgaagtactgatatgtgccacaatggatgaacctcaaaaatttttgtgttatgtgaaagtagccagacatagaaggttacatatgtatgatttcttttcttttttttttttttggagacagagtctcactctgtcacccaggctggagtacagtggcgtgatcttggctcactgcaacctctgcctcccagattcaagcgattctcattattcctatcattattctcattattccttcttattattcctatcatacatgataataaataggaataaaacctctcttattattcccccacagctgagcataggcacagaaaagagaaagttccagggggtaagttctgagagcaacagcatagcacaatgagaaaaaagccattctctggagggagacatcaaacattctgaagaaactgtatggcagttccaggattttaacagatctgtccatagcaagtaagaacagggattgctagagccatgcagatagagtttttgaagactgtacaggaaacaggaagtttgaggtattggggatagggagacagaaccttctgcaattaataggtctgataaaagaaatacaacacccatatgcagactcgtcagtcaaccacagaagaatatcagatcccgaagggaggcagaggaagaggatatcacagagacagtccttttaaagccccatattgctaatggtttcaccagttgagtaagaaacaatggataataatggttgaaacacaaagcatcacgtctatagtttatcatatataattgtgcttaagttgactgtagtaaactgtggctcacatgacagaatgatcttagttattttcaattagtttcttttgtggttaatctaaagtcccaagtaaaataattcatggtagcattgccgcaaagacatgtggaaactgaaaactgtagacataattcccgggtccgggacgggcagctgaagagagcagcccctctatagatgacacctaaataagccctgtttgagcatgcgtgatccttcatgtctcataatctgtggatccagggctcatggacatttaaaagaaaggcatgcctttttagacagcttctccacatgttactgatgacatgcttcaagatttcttgtgcagaatctgatgattcttaaattagaatcccaatagttttgccagtcagtattcattatatagtcacttagagctaagccttgaggaataaaattccagctaggaataataataaaaaacgggaatggtgcccttgcaatactagttccttatccctaggattttattataatgagaatagtaagtatatagtttaatttataatacatatttttaaatttcattatttcataaggaaaggcagtctccaagaaaaattaaaagccatctctatgaatgtccacattttcaagaacgatttcatagcctggttgaaaattgtgtgctctctccatcatcttgcaatttgaagaactgcaaaatcatgaataatacaaaaggatgttaaacttttcaacaaatccagatgggtaccaatgtcattgagaattcctgagaatcaccttgattgctgcttcagacctaggagcctgaattgaatatcacttaccagttggaagctattggcttcagtgacgacagtttctacaataacattggtatctatatcgtttacttttaaaattgtatagacactaagtttgtaattttggcaaataaaaaacgtccaaactttaacattcagtcatttcccttgctagccttctatttcttctcccttattatttagactttggtgcaacagaaagaatgatggactgggaactagaggccagttttaacactaacctttgctgggaccttgcaaatctcttcttcattttgcatcttagttgtcccttctgcaaaatgagagagttggactagatgtccctttcagccatgattctcgggtttccattgttccacacagtcactggatgaagagacactgccaatgcaaagactgagccgccatgagaactcatgttatgtcttgcaactcttgaggctgggtataatgtaggcctaaagtctttacttctaatcttaggtagcagggaaatgtgtccatttgtgggttatgctgctcgttatccctctaatccccgtctccccacaccatgctagtcctggatattcagagtcagggcttgtttgtcaacacagaagactcgcacacttgtgatgcttttgcttatcctgttcctttaccagaagatccttctgcttctctacctagtaaactctcactcattcttttaattttgccttttaattttatattttgacataatttcagactgggagaaaagttgcaaaatccgtacaaagaatcctcatataccttttacgcagaccccccaaatgataactttttaccacactcctctgtctctctctccctctagctcccagaattttttttctgagccacttaagcatcagtttcagacatgatgcccctttactccaggtagttcagtgtgctcgacctgaaaaataaaaccaagacgttctcctacataatgtaaatataaaaatcgaggaaataacgttaatgcagtgctgtcctctaacctagatctggatgttgccaattgttcctttaatgtggtacagctcctcggtctttctttgcatttcctgccactgacagttttggagagataagtccagtattttgtagaatgtccctcaatatgtgtttgatagttttctcatgtttatattcaagttatgtacttttgatgggaataccacagaagttacatgctgtttttctcaatgaataatgtctcacatttttttgtttagatgaaagtccttcaatctcttactcccactcccctcctaagatgtaaataaccactgttaacaattggcatccatgcagtattttgtctatgtatctatgtacacacatatctacatacagacacacaggtaccctttaaaaacataaaaatgggctgggttcggtggctcctgcctgtaatcccagcactttgggtggctggggtgggtggatcacttgaggccaggagttcaagaccagcctggccaacatggtgaaaccctgtctttactaaaaatacaaaaattaactgggcgtggttgcaggtgcctgtagtacctgctacttgggaagctgaggcaggagaatcacttgagccggggaggtggaggttgcagtgagctgagatcatgccatttcactccagcctgggcaacagagtgagactctgtcacaaaaaataaaaaaataaaaaaaagatttcacaatacacctactgctctgcaatgtaccttttttcactgaactgtatgtctttgtgaatctttctatatctttttgttgaagctgcgtctacaggcgtgtgccaccgtgcacggctaatttctgtatttttagtagacgggggttttgccatgttggccaggctggtctccacctactgggctcaagtgatcctcccacctcagcctcccgagtagctgggactactgatgcatatcaccattcccagctaatttttgtatttttgttgagacagggtttcgccatgttacccaggctggtctggaacttctgggctcaagaagtctgccttccttagcctaccaaagtgctaggattacaggtgtgagccactgtgccaggccaaaagtggcattttttttaatagtataagtatgtccttgtttagatcgttccctactaatgaatatttgtttccatttttttctatcacaatgtttgtacatacatttaagaacatacctcataatagcgatagatgctattaaatagctctcctaacacacttttccagtttgtattctcatctactgtgcatgagataatttgcatttttctgactgttagtgatgcagagcacctattcacggcctttgggtttcttgttctgtgaattgcctgttagtggtctttgctgtgagaatgctgaattgtccgtctttgtctgactacttatttctccaggcctcactcaattctgttcctctgcagaggcttccccatgtcccctaatcagccaccaccccctcctctgctgtcccataacactgttcacaccatgcccaggccttcatttaccaaccattccatacaaaatctactcattccaaaagtgtccactgtgagccttctctgtgcttggccttgggctaggtgctgggtggagagacatgagccagtcatcatagactccatgctaaagttcaattttgaaatgcagctttgagcatagaaaagagcatgagttttagatctagacataacttgagttgaattccagcttcaccacttcccagctgtgtaattcagagcaagtcacttgattactccaagtctccatttccatactagtgaggtgaggctaatccctccctaagagagtcacttgaagctgggcaagagacaataatatctgaaatggctaaaaagggcctgttacacagtaggcttgcagtggatgaatggtagttgaaaggcaactgttaagaggtcaaaatcagttagttctcagaggttctaagagccaccaataaactggaaaataaaaaggaaggaagtagctcctctctttgcaatgcaaaggatatggatgagtgccacttgcccagatcctgctgcagaatatcctttatctttcctgctctctgcagcagatttctgctttgtcttggcccctcatcccaattcagctgtgcactgttgatgtcctactgccactttcgtgggaagaacaggtgcttcccttctcaaataaatgttggtctaggcagggcgtggtggctcacgcccgtaatgccagcactttgggaggcagaggcgggtggatcacgaggtcaggagatcgagaccatcctggctaacacagtgaaaccctgtctctactaaaaatacaaaaaaataagctgggcgttgtggcgggtgcctgtagtcctagctactcaggaggctgaggcaggagaatggcgtgaacccgggaggcggaggagtttgcagtgagccgagatcgcgccactgctctccagcctgggtgatagagtgagactccatctcaaataaataaataaataaataaataaataaataaataaaataaacgttggtctctttagaagatactctgtaagaaagacttcaggatatttgtgcatgctgtcacccatgatttcaagaagtaggggctgagcactgtggttcacactgaggcgggaggactgcttgagacagttcaagaccagcctggtcaacatggcgagatcccatctctacaaaatgtatatagttttaaattagccaggtgcagtgtggtgatgcacgcctgtagtcccagcttcttgggaggctcaggtgggaggatctcttgagcccaggaggttgaggctccagtgagctgtgtttacaccactgcactccagcctgagtgacagagtgagaccctgcgtcaaaaaaaaaataaaataaaataaaaaggagaaatggggagtagagacagcttcaattagaaagagaaatgctgtgtatgtggagagaggctaaggtggaaagtttccctgaagacccaaaacttcagcagagtagggtgagtgggtatatgttagaaggacagggagaagggctttacaggcagtggagtgttctctgcaaaggcacaggtgtgggagggcatggtgtgttctggcaactgcccaggattcagcgtcaacagtaggcagatgtcagctcatgaagtgccttttatgccatccaaaggactctaggtttgaagacataaactaaaggggtaggctgaagcattctgagcatgggaaagcagtaaatctttgttgaatgcatgtgtgacagtgggaagatgggacatggtaattaggagtacagtcgtgtcatttaatgatggggataagttttgagaagtgcattgttaggtgattttttcattgtgcaaacttcatcgagcatatttacacaaacctagatggtatagtcaagtaaacacctaggccacatgatgtagcctattgctcccagattacaaactgctacatgttactgtactgaatactgtaggtgactataacacaataagtatttgtgcatctaaacatggaagaggtacagtaaaaatatgataaaataatcatcatatatgcagtctggttttgagtggaatgtcattatgaagcacataactattatttcctatacttgtggccttctataagttttacttagcctttctacgcctcttttctttttttgtgtgtgtgaaattggaacttaaaacatcaacttgaaagtattggtggggctgagtgtctcatgcctgtaatcctaggactttgggaggctgaggtggggggatcacttgaggcctggagcccagaagctggagaccagcctgggcaatacggggagaccctatctctacaaaaaagttttaaaaattaaaaaaataattaactcagcatggtggtgtgtgcctttagtcccagctacttgggaggttaatgcgggagcatcatttgggagataggtttcagtgagctgtgattacaccactgcactccagcctgggtgacagagcaagaccctttctcaaaaaaaaaaaaaaaatccacaaagtgttgtcgaaatttaaaatattataatagatggacaggagtaatcctggcaatatatttttaaatttttaaaaaggtgacatttgttttacacaatacatattaccaaaacaaacaatctagtcatctgtgatgtgcttctatgcctgttttcttttctggaaagtggttctccaattttaccttttcatagtaccttgtccttctccttcccagcacttaccccataatgttaattaaatgttctaattcttttctggccaaactcctagactataactgttttcctagctagatgcctatctctatgagatcagtgacttaaaaatttacagcttttctgcactttctaacaccgtcttttaacagatagatgttcaataaacgttggtgaaaacaatcaaactcacacttgtcttgaggagaattgaaataggccaatgaattggcagtgtgtcattatgagaggagaaaaatagttcagagcagtctaagttacgttaaaggtatgcaaaaataatttttttaaaaattaaagatatggggtctctcatccaggctggagtgcagtggtgtgatcacagctcactatgaccttgaactctcaggctcaagcaatcttctcaccttggcctccttagtagctaggaatacagttgtgtgccaccacgcctggctaatttttactatttaaaatttcttatttatttttatttttataaaaagatttgtttttttaaatttatttttatataattttttaattaagaaaaggatcttattttaaatatagatggggtcttcttatgttgcccaggctggtctccaactcctgagctcaagcgatccacctgcctcaacctcccaaagtgctgggattacagccatgaggcaccttgcttgagctttaaacatttttgttcagacggtctcattctggagtgcaatggtgcgatctcggctcactgcagcctagacctccgcagttcaaacctcagccaggaacagctgggactccaggtgtgggccaccacgccctgttattattattatttttttgacacggagtttctctcttgctgcccagggtggagtgcaatggcgcaatctcggctcactgcaacctccgcctgccgggttaaagcgattctcctgccttaacctcaggagtggctaggattacaggcatgcgccatcacgcccggctaattttgtatttttactagagacggggtttcgccatgttggtcaggctggtctccaactcctgacctcaggtgatccgcccgcctcggcctcccaaagtgctgggattacaggcgtgagccactgcgcccagtcgcccagttaatttttaaatttttaaatttttttgtagagacagcgtcttgctatattaccccggctggtttcgaattctcggccttaagctatcctcccacttcgggctcccaaacaggtgagagctaccccattagccaggcaggcattcaaactttatcaggcccagagggacttgagtatggtacttcagttagcaccatcccatgtaggtggtggtgggggtgggggtggggggtaggggtgtgtggcaattgtttaaaggcattttgttcttttcttcccagtacctgcatcaccctttatcttcgtgttcctaaaatttgtgatagaaagaacaatgtgtagccaatggatagcttatgttattttagtgtcaattcttggtatgtagtttagcaaaagcctcttcttttttcctttaaaaattcactcgtggccgggcgcggtggctcacgcctctaatcccagcactttggcaggtcgaggccaggagttcgagaccagcctggccaacatggtgaaaccccgactctactaaaaatacaaaaattagctgggcgtggtggcaggcgcctgtaatcccagctacttcggaggctgaggcaggaggatggcttgaatctgggaggcggaggttgcagtgagccgagaccgcgccattgcactccagcctgggcaacaactgcgaaactccgtctcaggaaaaaaaaaaaaaaaaaaaaaaaaaaaaccataaagaaagaaaaaaattcactcgtagctgctacaagaagtgtaatggctcatgcctgtgatcccagtgctttgggagacagaggtgggaggatcgatacctttaagcctggagcttcacaagacaaagaactcagttgaaactgctgcttatcggatcacatattaagggcaacttgaattgatgatcccaggttgccctcatcaaacttggcccaaataaattctccacttatattaactttgcctcagtttttcctttaggtcgacagttatttctaaagttctacagatgggtttaccttgtattaaaataaggtgtgagaagggcaaatgaagccagaggctcccagcacaatcttgcaaccttcagagacttccaaaggatcagcattaactccaatatttagcaggagtgcagctcttcgagattcacaaagtgttaatctgttgcctagaattccagagagttggaggcgcccagtgtgaactgtgttccgcctaaaagaaaaagcgaccagcctaagatcatgagcgcaagggagaagcttgaagccatgcgctctcaagtacgcgtttcccgctgcccaggtctgcgggccaagcagccagccacgctggccctcgtcatgcacgcgatcagctaggctcccgcgccacgtggcactgagaaggcgtccaccgagcgccagggagaaggaggcggagcccggcctcaacctcgcccgtgtcctcatgggggttgtagttttcctcgcgggggtagagggcacgaactccccggcttttgcccggtaaatagcatctccttcgtacgagtcattcaaataatagatgcagcctaggtagcttcaagagaagttgggaaggggaagggggaaagcaaggaaggcaaacctaataattatgggcggggcagagaacggttcgcacccactacgcatgcgcacatcaggcgcggcaggtgggcggggacggaaaggcggtgactagagctgtgttgtccccggaagtgccttccctcccgggtctgcgcggacgcggcctccttacctcatttgtcctcgcccctccccgtccctctacgcgttttggttcccggttggtgcttcctgttcgcagctgcggcagtgagtatgtgtgtgacggacccccgccgcccgcggctcgggacccctgcctaccctccttcttgcccgccgggctgtggaactagcgcgtgccccctcgccggcctcgacgtctcccgtccgcccctcactcgtggcagggcgcagctcctggtccgtcacctgcgcgccgccccacgcggccgggctgcgggtctagggggtccgcgtctccctggctttccaagggctaatgccgtgattctagagcggctgggcgtctagggcctcggtgagggtggcgtgtctgccctttttatttccccgcaaggcccccagtcttctagggaagccagtcagtgaagcgcggaggtcccggcgcgccgagagagagtccagtctttgaggaccgagtagtcctgggccacctcccgcctctgctgtcagaagcagcagctgcagcagtagaatccaaaatttcgggagctgtgaccctttcctcatgtaaaacgagtagacttggactgtgtttactaaggcgccctttatccctcccatcctgtgagcggacagttgccttcaacttttgggaagagctgctggttcggtggaaaagctgtggctgggaatcaggaggcctgggttctagccgtggctcccccacggattcgctggcgattccagaaagctcttattgaagctgaatttaagattatttcagattgcacagttgaattacgggctgcattagtagggcctttttagctcagtgaataagtttctctgagctcctttctccaactataaaacgagagcgttcaatttgatgacttttcaggtcccctcagaagctcttgactttgtggttttctttttctttttaaaattttttctaggaccgttagagaaatgacttcgtgtttgaatagttaggctgtcgcatacaaagacttttaaatggattgtgtgtatacttaggaaagcgttatgctttcaggagaatctgagcatggggaataaagtcaggaaggatcgcaagtgaggattatattaatatgataattagcacggtaagagactgcatgaccgaaggaaaagggctaagggaaaggtgaaggaaatgtttccggataggattagttctcgtaaaaatcatatatatatcccaagaagagctgggacttaagtgactaaatttagcttattttttttcccccactgaaatactgtgctctgtttgtcttttgtgacttttgttttacacatttggattctccatcccaatcagatttgattcagagtggccatcgcatttgaaaaatggacagacattttaaccctttagacaattgtgtttcaactgtcctgtcagggcagcttactaagagtaagaaaaattttactttgaaagtaaagtgtattcatcacattccaatgaaaattggactgaaaatgaggctgtggatttgatttaaatcggccggagatggatgcgtgtgtcatcaagaaggaacatctagggaggctaaagatatttggaagtaaataagagcaaaaggtcagaatgaccagtaggtagactgtgagagcagaaggattgattaaagactgtgttaagtaaatgctgaaagcttaaataagccttaagttgtctagtttaaaacaattcagtcaatgaatactgctccctcttttgaatggtaatagcctttgcagttattctatagctgttttatatttgttaaggtattttaattcttagataagtttcatttgcatgatattttaagatgttatataggaaacatcttttctggtcatgggattgatagtttttgagtaccaacttgggagattcttaaatggcaaactgacaaacgtgtgttttccttacacctaaaatgtctcatttagtttttaaactctgctgggacataaaatggatatttgtgaggtaaatttaggtgttagaaccaatgcaaatattgcaatgaaggaaggtttttcttcaaaaaatcttaatttgaagttaacttatttgaaaattttattttgggccatgtgcggtggctcacgcctgtaatccaggcactttgggagtccgagtggggcggatcacgaggtcaggagttcgagaccagcctggccaacatggtgaaacccgtctctgctaagaatacaaaaattacccaggcgtggtggcgcgtgcctgtaatcccagctacttgggaggcggaggcaggagaatttcttgaacccaggaggaggaggttgcagtgagccgagattgcgccactgcactctcacctgggggacagaacgagactccgtctcaagggggaaaaaaagaaatttgtttaaaaattttagtaaacagttggctgagaatcacagaaatgtgaatcacttctagccgtgttcttaaccagctgcataaccttgaataggcttcctatctctttgtatttcagtttcctgatgggaagattgaggagtctgtatgagataatctgattttgttacctagttagtatacttgggaatcatgtacagggataaaaaagctgagaaagccttctgagtcaagggtgtgtgtgtgtgtgtgtgtgtgtgtgtgtgtgtgcgtgtgcgtgtgtgtgtaaaaaacatatattgtcttccaagacactttttaaaagggtaaattaaattcatttgaacgtaattaaagcagtaacattaacgaaaacaaccttaggcagaccttaaccctggcatacataaactacctaaataagagagcacgttatgcccagcacaattttcaagtacagacggtacaaaatcctcttaaaggccataggggctaaattgttaaattcatttttctacatttcagggaaagagataaatcctttgacccaaggaagtcagtttttattatggttctgtagtttatttttggcatacattcacaggtgtgcctatggctctattcttaatccctttcctttgggatggctgcaagagtagtacaaacttgtaactttgtaatttggctttttaattttttctgtgctgcactggaattatgttttgtcttaagtccacactggatcctcaggatggatccagtgaggattttgaaagaagcataattcctttgacttcttttagaattaatttacctattaaataaaaaggaaaggattcatcttttattcgaattcctctgaggctaacaattcaatataaactgatgaatgctgtgagcattattcagacaatcacattcaatttgtgtgacagtaacagcatagccacctgaaggacagtgcaacaagggcacaggtatatgataccctttagaagaaaagcattacaggtgggtttatttgtttctggaaaacaaacaactccagtaggaatgtagtacatttttggctcttgtccatttggtttttgggattaaggtggttctattaccagaactaccaccacaacaccctggtatttttgggcagaaatttgggacactaagaaaacaactattttttattttatgtgtatagctgttagtggaagaaagaataaataggcatcattattgctctttaggctgtccctgattttggacacacacttattttttcagggctctcattttaatcagtagtccatcagtacctaatggaaacatctactgtgtagagttttggttgctgatgctagaatttaagactttggagtagtcgaaagacaacagagaaattcatctcataatttttgtattttaagcacatactagatttatcagggctgaagaacaaatgcccgatggtgtagttcatttattcatttatgaattcagcaaacgtttgtagctgaccccgaaaataccagttaccctgtttggctttggtgattcattgtttagcagagtgcatatagttcctgccctcctgggatttgtgatctgcgtttcttggaaatttatattgaataagtaattataaatgtgatgagtgttttgacatgtaaagtacttatggaagcccataaaaggggctcttaatttagcctggttgcaagtgattttgagctgagtttaaaagatgaaggctgaggaggatttaatatgctcacagtagaaagtaaagtgtttcactttacacatttattcccaaagctgggagttttgtctcaatattgggtcattattaagtttgtatttatacattataaatatacattgtaaaaatatacatttttgtaactagtacagagtttttagacagtctgctctgttgcccagggtgaagtgcagtggcatgatctcgactcactgcagcctgtgcctcccaggttcaagctattcttgtgcctccacctcctgagtagctgggattataggcgcacaccaccacacccagctgatttctttatttttagcagatatgtagtttcaccatcttggctaggctggtctcgaactcctgactcaagtgatccacccgccttggcctcccaaagtcctgggattacaggcgtgagccactgcactggcccacccttgttttatttttgagttgggttcttgctttgtcacccaggctggagtacaatggtatgagcatagctcactgtaactttgaactcctgagctcaagcggttctcccacctcaacctcctgagtagtagctgggactacaggtttgcactgccatgcctggctaagtttttagttttaatttttatggagatggggtcttactgtgttgcccaggctgttctcaaacttctaacctcaacgtgatcctcctgccttggcctcccaaagtgttgggattacaggcatgagccactgccagctcaggcatttttatttattcttttggccaatgatcagagggccgtgcgattaatttgttaattgagaatatacatttacacccaaacagtaaacaaaattgtttcctgttatagattttagtcataattgaagtaatattcctgtatatgcttgaaaatatgagctatagaaccagaaccaaggaaaagatgaagaatggataggatagtgagagctgctttaagttttgttttaacattttggaaagcaagggttttgtatcctgcggtagatctcaatttgtttttcgtttacaatatacctgtgaaatcttacatatcatgtgctgcataatagcattttggttaaagacagacagtgtgactgtggtcccataggatttgtatacgtttttgctatatcttttgtatgtttagatacccaaataccattgtgttacagttacttacagtatttggcaccgttacatgctgtattggtttgtatcctaggagcaatagaccataccatgtagcctagttgtgtagttgactacaccatctagtttgtgaaaatcatcctatgaagtttgcacgatgaaatcacagaacaaagcatttcttagagtgttgactgtgtttccatcaataactataactcaatttgtcagtagtaattctcgttggggagtggtgggacttacaggagtgggtcctaacaggacttagaaatccttggaaaaaaaggtattttaatatgtctgagaatagtgatggccttcatattagcagttgtcactgacaggtgatattgttacttaaactggcatgatctgaacttttaaagtatattctgtgtacaactttctcttttgcagcttcaaggttactgactttttatgatgtttggtggctatgagactatagaagcatacgaagatgatctttatcgagatgagtcatctagtgaactgagtgttgatagtgaggtggaatttcaactctatagccaaattcattatgcccaagatcttgatgatgtcatcagggaggaagagcatgaagaaaagaactctgggaattcggaatcttcgagtagtaaaccaaatcagaagaagctaatcgtcctttcagatagtgaggtcatccagctgtcagatgggtcagaggtcatcactttgtctgatgaagacagtatttatagatgtaaaggaaagaatgttagagttcaagcacaagaaaatgcccatggtctttcttcttctcttcaatctaatgagctggttgataagaaatgcaagagtgatattgagaagcctaaatctgaagagagatcaggtgtaatccgagaggtcatgattatagaggtcagttcaagtgaagaggaagagagcaccatttcagaaggtgataatgtggaaagctggatgctactgggatgtgaagtagatgataaagatgatgatatccttctcaaccttgtgggatgtgaaaactctgttactgaaggttagtatcatattggccattttgaaagtagtatcatctttcataaggaggactgcttttcctagagaaaagaccaatagggtctactccgtttaattcctcactttttggtcttgttttttggtttgtttctcatgcgactctcttaccagtggctactctaatggtggtttgtctgaacgtcagaaagagtatgtcagaataccaaagacactctgcttctgctgtaagcagattcatagctgcttcttcctgtttggctagagccagttctggacctgaaatcttacttcccccctctctctctgcttggtaccacaggtgagtactccatccacctctggcattagccctgtgcactcattcagccaactctgttgggactgtctcttcctatgggatttgcttacccaggagttagatggcaagcatagggaatgtctggcacacagaatatatggaattagtgttaggattaggattttaggtactccacagtcagaaagacaggaaaatatgaagagctgtaagtctagggcaggttataggggagaatgcaaattttgatagctacatcatcaaggattaaaattttggtgttagttatgtctctgtgacatgtagtcatctagtcttaatgcttatgccttcaagaagttccttttcatttccctccctttatgcctaatgctcagtctcttgcactagtttcctaagtagtcttcttttatatctaccctgtacactgttgttaaaactggtattgaaatgctcttttactcatagtactttattgctgctccaaaatttttaatggcagcctgcttccctagaaatgatgacattgaatgtagattgtgcttggagcccctgggattggcaaatgtttttttaagaagccagatagaaaatattttaggattccaagccatgtgatatcttaactactcaacttggcccttgtgggaaagcagccttaaataatacctatagaaatgggggtggctgttctcagtaaagccctacttacaaaaacaggtggccggctcaggctgtagtttgcaaaccctgagaacttgacagcaaaacgaaaagagagaatagtagttaggacagaacagaatcgcgtaaagttttttccatataggtgagctctgataatgtttgtaggtagaaagaaagaaacttgtgaaggagagactaaacctgtttgatggattgggttgggggccaggttagagataggatcaggtgtatgtgttgttgaattattcctaaaaaggaagagagacactagtaattgctaaatcatcaaatatttgtagaggtagaggagaaagaataaattcagatggattgaggcagatgagagaacatatggggatgtgtttgattttcttaggaaaatgaaagcagaagtgggagagggcgggggataattggaagcttagaatgtggaagggatgtttaagtgctgtggggaatactttgaggcagtggttaccagtattttgaagatgacaacctgtgtaactttgaaacaatttgtggaccacccatggttgtagttatgattttagtattcaattgagaaaatgcatattagaaagaagctactactcttacatgactttgtgttttattaatcacaacattgatatgtgagaaatagtgtttataatgcgttgctctaggtacccattaaggtaactaattctgcagtttcccaggaggctgaaggctcttaagttggaaatcattgcacttgagtgaatcaacagtaagagaataaaggattgtttagaagtagtattcagtcaaaattaaaatgatgtgaacttgtagtgaactcactttgaaggattccataactttatccagtaatacttgtcagcttggagcaagatgacagaaacaaaatgatcttgggttaggcgtaacactatagaaggccaaaataagcatttagcttattctttctctaaattaccttttcctgagatcacacctagtttcattaatcacttctgtatttatggtcatcaaattgtcatctccttaaccattttgttgatttcaaattctctgtgtacatctacagaatatttccatttgggtatcttactgtctcacatttgacatactgaaaagaaagcttgataacttgaaaaaaaagcttattatctttcctttgaaacaactccctgctgctttctgtttgcactagagaatctacagacatgctaaagttgatggcacaatgtggataggttgggaaaaacatgaattaggtgctggatttagtgaagaaatcgaactgtgccatatttggcaaatgatggtgatgagaaagtagagagaaccttggatttgttttctgttttagccaaatagaattaaattctgaatttttggaaattaatttacttgactcttataaactcttacaaatactcaaatatatattctccattttatttccttgatccactaatgctgtaatcctatttccaattaataaacaacatatttagtactgatgcccatttaagtgtgttgttactctgtaatcactatccctctcataaaactatctggggatagattggttcatataatctttagagagaagatttttctcatttctgtaaaagtgtagagaaaatctcaagtactttagaaatgcctattgttaaacagtatccataattattttgtgttctgtttccttgacctcactcaagaaaaaaacaaaatatctcccagaattatggcatactgaaaactgcagtatgacataaaagaaaagactacaggctccttgaggttgggtcttttccatactcataaacctgcttataataatatttagagtaatttcttggcacatacattacctgctttctcatcaattgctaaatcatcaaacatttattgagcatctcctctatgtagggtataagtaatgctgaggtagtactcgtgacttacagtggtaaaagacttaagttttaggccgagagcagtggctcacgcctgtaatcccaacactttgagaggccgaggcgggtggatcacctgaggtcaggagttcgagaccagcctggccaacatggcgaaaccccatctctactaaaaataaataaattagctgggagtggtggcaggcacctgtaatcccagctacttgggaggctaaggcaggagaattgcttgacccaggaggtggaggttgcagtgagctgagattgcaccattgcactccagcctgggtgatggagtgagactgtctcaaaaaaaaaaaaaaaaagataagttttagccttgaatgacatagtgtttcactaaagagacagaatataggaagctaagtaatttacggaattctctccttttttttttttttttttttttttttttttatagcagtggggtcttaccctataaatagagcaaggctagtttggaactcctgggcttgtgtggtcctcccgccttagccttcagagtagctgggagtgcaggtgtgaacacagctttgaaatctcaattttttttttttttttttgagacagagtctcgctctgtcgcccaggctggagtgcaatggcatgatctcggctcactgcaagctgcgcctcccgggttcacgccattctcctgcctcagcctcccaagtagctgggactacaggcacctgccaccacgcctggctaattttttgtatttttttttagtagagacggggtttcgcagtgttagccaggatggtcgcgatctcctgacctcgtgatccgcctgcctcggcctcccaaagtgctgggattacaggcgtgagccactgcgtctggccagaaatctcttaaccatgggagttaagtctcaaaattctggtgatacaagtggttgaaacttaaaactttgtttaaaaaataggattagtgaatttgagataattcataagtctgtgaaagacaataaatacatacatattttacatttactattactaaatttgtagtaaatttgagtacagcactacctctttatctgtgaaaacttcagactctcccctattactttaatttcagtgagacattattatattaaaaaaatggccaggcctggtggctcacgcctgtaatcccagcactttgggaggccgaggcaggtggatcacgaggtcgggagatcgagaccagcctggctaacacggtgaaaccccgtctctactaaaaatacaaaaaattagccgggtgtggtggcggacgcctgtagtcccagctactcaggaggctgaggcaggagaatggtgtgaacctgggaggcagagtttgcagtgagccgagatagcgccactgcactccagcctgggtgatagagcgagactctgtcaaaaaaaaaaagaaaaaaaaaatacaggccgggcatggtggctcacacctgtaatcccagcactttgggaggctgaggtgggtggatcacttgaggtcaggagttcgagaccagcctggccaacatggtgaaaccccgtctctactaaaaatgcaaaattagccgggcattctggcaagcatctgtaatcccagctacttgggaggctgaggaaggagaattgcttcaacctgggaggcggaggttgcagtgagccgagattgtgcaactgcactcaagcctaggcgacagagtgagactcttgtctcaaaaagaaaaagaaaaaaaagaaaatgggcgtacacatttgttttgctctactgacagttaataccacaactcagaggcatttttttttcctttctattcttcttctaaatgttcaacacttttctgattttgtgatttgaggttgttgattagcttcctgaggctccattgagactgtatatacgtgacacttaacagtctagccttcctcggtgcatatagatatatgatggtggttttgcctgtagtaaattcatgtcaaaacataggctttcagtgcctattacatatgactttcagctctctctactgagggatgtaggagtttatttctgaggtctgagcctcttttcctttacttcctttattctttcctaagccttctttataaaaactatgcatgttctatcgtttgttttccttcttgattcccgccccttcctttttttttaattatccccagcaggagtgacttgtaattctcatatattagaaaggcagatctcctggtggaagaaaagatgcaccgaaggaagtcagcatatttagtaatttgtgagggggatctcaagtttggaaaggattgttatgtaagacaaccaaatgatgacatgtgacaataaagccataatagctacttattttcctggttagggaagggatattactagttctaggagtaactgctagctctttcttgtactttttttattgtggaaatataaaaatatacaaaaataaaatgttataattgacttcagtgtcccataaaccagcttcaacagttaccaatttatgtctaatctttcctatctataactctgtgcccctctgttattttgaagctcatcagacatcaagtcattcatatatgtatgtatgtgtatgtgtgtgtatacacatcatgtgtgcacatgtgtgtatgcatgtatacacatttgtatacaagtgtgcactcatgtttgtccctcagtgtctgtgggggattggttctaggacttcccatggataccaaaatctatggatgctcaagtccctgatataaaattgtggaatatttgcatataacctatttacatcctctcgtatacttttaagtccggggtgtccaatcttttggcttccatgggccacattggaagaattgtcttgggccacacataaaaaacactaatactgacagtagccgatgagctaaaaaaaaattaccagctggacatggtggctcacgcctgtaatcccggcactttgggaggccgaggcgggcggatcacgaggtctggagttcgagactagcctgaccaacatggtgaaaccccgtctcttctaaaaatacaaaaattagcccagtgtggtggtgtgcacctgtaatcccagcctcagaggctgaggcaggagaatcgcttgaacctgggagacggaggttgcagtgagccgagatcgtgccactgcattctagcctgggcgacagagtgagagagactctgtctcagaaaaaaattaacaaaacaatctcatattgttttaagaaagtttacgaatttgtgttgggccacattcaaaagccttcatggctgtgagttggacaagtcatctctggattacttaacatacccatacaatgtaaataccatgtaaataactgttatattgtatttaaggagtcataatgagaagaaaaatatacacgttaagtagacatgcaattttttttggtctggaatattttcttttttttttttttttgagacacagtcttgctcttgtcacccagggtggattgcagtggtgcagtcttggctcactgcaacctctgccacctgggttcaagcagttcttccacctcagcttcctgaatagctgcgaatgcaggtacctgccaccatgcttggctaatttttgtatttttattttttatttttttaaaatttaaaaattttaaaatttttatttattttctgagacggagtctcgctgtgtcacccagcctggagtgcggtggcgttatcttggctcactgcaacctccgcctcccaggttcaagtgattcttccacctcagccttccgagtagctgggattacaggcacgagccaccacgcccagctaatttttgtatttttagtagaaacggggtttcaccatgttggccaggctggtcttgaactcctgacctcaggtgatctgcccaccttggcctcccaaagtgccagaattataggcgtgagccaccgtgcctggccagttattgtatttttagtagagttggggtttcagcatgttggctagactggtcttgaactcctggcctcaagtgatccaccggccttggcctcccaaagtggtaggattacaggtgtgagccaccgtgcccgactgaaacgtactatatatatatatgtatatatttaatcatattaccataggtaaacaaattcccggtaattctttcatcatcacatacccagctagtgttcagatttcctacactggctcctaatttttttttcttacagattatttgaattcgatccaatccaggtattgtaattggctgttaaacttaagtatcctttaatgtataggttccccttaatctcttcctttttttaatttcttgtaatttgttgtaatacctagattctttgtcttctagaatttccaatggtctgaattttatagtattgcttaacatgttctactgtcctctgtctttcctgtgaattggtagttagatctagaagcttgattaaattcagattttctctctgttgttacatcatcagtttgacacacaggttcatttgtttcactttgcttttgatatgttattttttggaattatcttttaaaaatttggttttcttttataatcatgtaaaatgtgtataaggttccagattcaaatcagcaaaacatgataaaatctatccagagaaggcaaaccttctgtccagtcgccatcctgttcctgcccttccccttatgagtaatcattaagagaaaattgttggtttgtccttacatgtgtatatctttgtacactcttgcccttgttttttgttggttgttttttgttgttgttgttttattttttgagacggaatttcgctcttgttgcccaggctggagtgcaacagtgcagtctcagctcaccgcaacttccgcctcccgggttcaagtgattcttctgcctcagcctcccgagtagctaggattacaggcatgtgccaccatgcccagctaatttttgtatttttagtagagatgggggtttctccatgctggtcaggctggcctcaaactcccgacctcaggtgatccacccacctcggcctcccaaagtgctaggattacaggcatgagccaccacacccggccctctttcttaataaatagtggcatactatctactcttttctctaaccttatttttttctcttagccgtatatcctggcgatcaatccatagtcctatgtaaagatatttaatatttcttatttctaggactatgaactatttttgtatcttctacactaatctgagctgggcacattaggcatgtaataaatactttttgaaagtgaatgaatagtaatttaaaatagttgatgactaatgcacttgttacagtcttaaaatatattttaaacaaataaataattgtctaattccactttcagaagaaataagaagttcttattcctgtttgtaattttttttatcatttggtaattttgaaatatttaggtttagcaaaaaattaataggctcaggttttaaaaagaaaaatgccttctgcaaaaggaacaatatggtatttttaagagttgaagaaaccatattagttcctggtttatgactgttatggtatagaattttgtgtcaatgtagagctccttcagtatgtgtaatttggcacacaacccctttagttcgtcagcatttggcacatcggggatacctaacaaattgtaggtaaatttgtttatttatttattttttcccttaggtaaatttatttgcagttctgcctttgtgtatagagtagagctctttacatagtattatttaaagtgaaataattgcttgactaaggtaaatggcttttgaaactgaagtaaaattatggcttcaacacttatggcagaaagtgttttaactattttgtgttaaatccctttttctcccaaaactatacacacagaagttttggatataatttcaaaggatgaagaactcatctagaggccattgttgaattcctggcattcattaggcactcaaccaagactggatatctaattaaaatttgaatagagtgggttacctatttgaattttaggttttctagtaaatcattttgtttgatctaggtctttacatatgtgtttttttgtttgtttttcttttcctgtgtggattagtttctaccttgcctggctgatatatctacttatctctcagttcttagtttgaaaggtcacttctgaatgaggtgtaatggtcataggttctcaattagtggttgttattgggtctgttacagctgtgcagttggccaactttgactttgggtaacttaatttctttattggtaaaaaatactttttattttattaaagtcataaagaaaaatgagatattgggtaggcttaatgtcacaggaaaatattttgataaaagtcttcatagttacacgataggttcatgatcattgtggcaaacatgagcttatagcttccacttttttgttgttgtttgttgttgttgttgtttttcagacagggtgtctctctcccaccccacccctgccccacctgcaatctctctctctctgtcttgctctcacccaggcaggagtacagtattgcagtcatggctcactgtagccttgacctcccgggctgaagtgatcctcctacctcaacctcccaggtagctgagactgcagatgtgggccaccatgccctgctaattttttgtatggagttagatggagtttcaccattttgcccatgttcaccatgttgctcatgttgctggtcttgaactcttggctcaagcgagctgcccacctcagcctcccaaagtgctgggatttacaggtgtgagtcaccgccctggccccacttgatttttttgttttgtgttgttttgttttgtagagacagtgtctcaccatgttgcctacccttgtcttgaactcctgagctcaagctcccaccttggcctcccaaagtgttgtgcttacaggcatgagccaccgagcctggccccaagttgcttttgaacaacatgtctctagtatggtgctatccttaaagaaatttaatttggtgacattttatgatctgctagtttatgacattgaacttaattctgaaatcttaaaatctttccaaatattatttactgggtgctgacaacgtacaagccactgtaccattaaggtattgggattcaaaaattgccatgtactttttgcctttagaaatcctaaaatgcatgacagtatggaaagttcactgtaaaaccagagttaaatgcatttctacaaatatatgagatgctccagcagaatacgtaatcattccaggtgaatgcagtagattttttaaaaagattaaaaagtagataggcaaagtacaagactgaattgaaaaggaaccctttgaatttgagtttcgaaaaatgggtaggacttgaagttcaggttaaatgcagctaaaaatagaaggtgaagcccttagtagaaactgaagactgtatgtgccattcatgtttatatgtggctggatgtgatgaaatgttttaatagtatatctttttagaagccacctctgcctaaacaagaaaggattatttatgttttgtatatgttcagaatactgttggaagatttcttagtcataattttatttcattgctttctccctgttttttgcgtacatacctccttttttcttttaaaattaattggaccagaggttagtcaaaggacctgaccagctgtttaacgtgtattttgtgcagggctgttcaaagtagagcaggtcttaaggtacaactttcactcctcatagttatgttcttccttataatcttttaacataggaaaggatcattattttgttagtttggaaacaatacattaaactttgccttcagtaacttctcagatcattaaggtggtgttttttcccctcctttggcattcatcgtcttaatgtcagtagtttcttgagacattttataccctaacaggtcataagagtgtattgccatgtgacatacttctcattaatgtatagtttaatttctgccttataactgaaaaatggccacatgctagaattccagtcaccaggagcatcaaggagctccctctctgatgttttcagcttttgtaagcctgtactgcacagttcctaaagctgcttttgaactgtgtctttagttgtagcatgtcaccttacacttaactattgttagggcatctttttatttaatttctaattagcataatgacttgagctgtgttattcactgttccatggtgaagttgtcatagggagagaagaaataaaaatgttcagtttcagctttacttgtgaatggagcgaggtttgaagaaagctttttatggccattgttcagcagaatgaaaatctcattagaaaccccagaaatcccatgcagctttgggttggattttaataacattttggaatgttgatattgtatatcactaatttctgtgatttcactgtagatcagcaacatagggaggcagtcttccaaagttaatttatgacttttaatctaaattcatttacagttttcttttcaacaatgttaagtacccagggagagaattaaattttactttaaaaaaatacatttcttctagtaactgatttgatcttcatgtaagatatactaaattcattggaaactgcttaaacagaaataccatgatatgtatttattgaactaatgacttagtttagttgccattaaaatgtcactcaccttatctacaggtttgtattttttttttttttttttagaatggaaaagcataaaattagatgggcaacattttcttccttgtcagaagagcttgaatcctgatgtctttttaagtgaagagtgtttatatataattttcttgtagcttttgtttattataaaaataattattgcatatagtgatcacttatctaagaagataagtatgatttatatagacagtatatttttatggtcagaaagtaaatttgatgtgagctacatatgattagacagtaaaacttttttccaaagaaatatagaatggagaacatttaatcattatttccccttcttagagtagaggctgttcagataattcatattctgtaagtaggagatcctgtttttaagactttactaaatttaatttcaaagtaataatctcttataaatgcttccttggtggttaagacttattaatgaagcaaaagtatggacttcatggaagttttcagcctaacgttttaaatctcttcattattatttatctttgttttgttataaattaaagatactggcatggttaacttttggcattttgagttacttgccagatatttgttgattgtgcaaatagttaagaaataaatattttaattgggcatccaccatgtattatgtcacattttctttttaaatcatatgcttaagaatacttaaaggagtatgacttgctttttagtttgaatcttgatctaacagcattggttctggatggagatgtaattctagagataaaaattatttctgttgtgtagatttggattctaaatgtaataattattttaaagtggatcttgtctgctaaatgtatagcttttatttctataacaaattcttaccttagaattccaacttttgtcagttttgaaaattagtttattgtggacttgagagcatctgttcttaatctcgtgttttgcaaacacgttttaagggaagacagcataaatctgtgatagtgaaaatcatttgtacttcccctccctcgcttttgcttaaatatacaattaacttataaccacctcagtgtgaaagaatggatgttaagtagcttaagaggtatttattaagggaaaatatttttattggcagttcccttaagtcatatttgttttgtaactaaatagtgcttgcaacagaattatctatcatagggagggaaagctccaactcttgaaaacttttcaatactttttctatattggtagttaatgagaattcttaagataggaaatagactggttatgactggtaatatgatattgctaatgtaatacaaattatgctttaaaaaagccaggtgaggaattcaggatttggaagaatatgacatacatatacatttaactaaagaaaggagattttctttaaagagaagatgtgcaaccacaatcaatcctgtaagttagtccttaatcctgtactagccagtttttagtattaaatggtctgatttaacacaaatgaacttttgtcaatggttttatttagaaatagcattacttcctacttttaaggaggattttaatagctaataaaaattcgttgttctgataagaacttgaaagacatccttactcccatataattgagtattttgctcttcattcaacacctcagcccttttggtttgcttaaaaaatgatacaaattttgtgggagaataaatataacttaaatattgctgtaaatgtgttgtataatcatattttagcctggtattattggttcttctgtgtatgaaatacttttaaacattcaaaatattcaatttaaaagtttctggataggtgagtggtagagatccatcaggtacttacttggttgtggaatatttgtgttcttgatgccatgacattttaaagttgtattaatccctttatttttctgtttgagatgattcagtttgggaggttttattatcagatctaacagaagaaacgtaagtgttgtaccacaggtcatctaattttcaaaccatgttggttagttaaactgactttggtgtataattatgtacccggtagtcagaggagttcaagtcgattgcaattcaactctgtgattgtgccaccagttaggttaacatcagcagtgaagggccttcattgtgttaaatttttaaattccgttaagattatttaaacatagaaggagataggtttgtgaagcaaatttctaaagcagtattaagcaaagagaatcttttcttcctcttcttttagatatatcacatacatgtgtattttgattaaaaggaaaaaaatttaatgcttatagtataatgcgcatacttatttcttatttttagaatttattaaaactaataaaatttgtttggaaatctcaaaagatctttagtagtatacctgcaacctcagcagtccctttttatccatacagattctctgcctattgtggccgtttgctctaatttaaatttcccatggctttcggttgcagacttggttttctgcaagagtgcccatgcttacatggtcatatattcttggtgacttttccactttttcttttttgttattttgttgattgctaaagaaaaaggggaatttttttttttaaatttgtttctttgttttgatctttcttccttagcccatctatttgtgtgttctttgttttgcagattggaaagaattattgtgtggtacttagatccatggggactagcaggggaaaactaattttgttcttggttttgttttcttaataacagaagcaatttaatttttgagccattgagaagctgaaaagatatgttagtgttatgcatgaaattgatgggaaattattaatcctgaaaatttgtattcatggtcactttactgttggaataaaaatgttattttatagtgtaaccaagttaatactagaaatactaattaacagtaagtggtactgttataaatctttaatttaaatattattgtatattaagtagttgtttacaagaaatctgttgtaatctgataatgtgatttctcttacattcaattttgtggtccacagtgtgtatatattcaaataagcatatgaacatgcctttgacggtggacacatttttactttgaccagatcttaagagtttgctttttcttggcaaaacttgcatactttcaaatgtgaggaattttgttttataacataactttgtactgctgaatttaagtccttgaagtgctatggcaatttagttattgttagaagtcaaaagtagaggtctctgttcccaacatctccccaaaatattttttcattaatattcacaggctttaaaatatcaaattattgtgatcaaagctacttctgttttacagttgttttgtgaggctggtgtcatacagtaacatttaactgaattttgtatttgctaaattaacataaaataataaagagatcctttttaccatttaaaaaattctaataatttcctaatcaggaaaaatgatgttatgatatactgtaaataggctaaaaaaaaccttgtaatgttgatacatagggaaaagagtaattttgataattaataattttagatttttttcctttgattgtacctcatggttgtgaggtgtctaaaatgctctttctgcatatctgttaaggactttgggaattggggtaagggcaagccttctttctgtgtctgttaattacaggttttttcttgtggatgtagtgctcttagaatatgaaactgatttatagaatttgtaattaccaagaaataaatagcatcattgaattttgttttctttatttttgctattattttctagttactgtgcttcacattttgatttctatcaaatgacttctcaaaaagcaatttcttttaaatcagtgagtttcaaactaagaagaaaatgtatcctgatagtctaattagctgttgtttgtccatgccaattaaaataatcttttgaatttctagtctttgattatagttatataggcttcatgagtttgtaaaactattcctccttttaaagtattttaaaaggtgtattgtaattttataattgatattcatatgtaattattgagaaacttgaataacctaaaatatatttctagtattcagcacatcaaatcaaggtataacctgtgatataaaagtggtccaacagaagtatacagctttaaaaataacaaggaattaattctgttagcatgttttactagcaaatgttcgtggaaaatgttattaattcttaaagctcagtgcctgggttttattgtgtgtggccttactaggagaacactgtagagccgaacttgaaatttattaaggaaagaagaaactggtgaagtgcttttatgctgttaaaaaaacttcacagacaattgtcagacaattttttttttaaaggtcatgattgcttgatgccttttccagtctttatttgaaactctcgttttgtaggatttcttttttgttcttcctcttccttttttcttttggcagtgggtggaagattcttttaaaactgaatggctaaacctgtatggtaactattgaagtatgatcgaaatacttttattcatgatttttttaggccaaaaaatgctatgaaggtaagccaatgatggtaaaattacattgtgttgcgtggaaactgttttagctttagcgttttctgttcagaaaagtaggctctgcattagagttttaaattgggatttgtttgtgaaatattttgtaattctcatattgctgattgcctttatgtctcggtgttctagtagatagttcgtagttcctgaaaaataatattctgtgtatgaaagaaaataggaggtgagaacagaatgagaattgggaaagaaaaccccctacccaaaatgccgccacctaacaggtggaaatatctatgccattacagattttcaaaacgtagagtgcttgaactctttttttctaagagattacttcaaatttgacagatttcacaaaattttgttatgataaatattaaaattttaactcttatttttatcctaaatttaagcccttacaaattaagaaaagagtgcctcgaggctgattgctaatgttcaattaagttatgtgttcagtgaagtaattttttgattatgatattttgattttattaatatgtaaactaaaaattataaaaggattatgagtacagaaattaaattatgtgaaattaattttgatattttgcggcagacagtttagaattaaaatatccttggtgtgtaataattttatttcttgtaaggacatctgttggctttcagtattcagaaaatttagactttttaattttaaatgttgacgtaaattaacgggagccatactttaaattgaaagaacttaagggaaatacataaaatatgctagtgattggcttacttacattttcagtgattagactttgtgaaataagagtaaggcctagcattttattttatttaagaaaatatacttaatttaaaagtactaatacaagaatgagagaaatctggtcaagtatagtaaatccatatccataattattttcaatcactagttacagaggaaggtgtgaatgctaatatcttctttgttgaaaatcataagttgtattttgaaaagggatgaaagggaacaagtaactgctttcaggcagatttatatcatcctaacatcatatgttatttgtgggttcatgtcacaaaagcttgcaaaacttcacaaaataatttaatgtattttaatttagtaagcttgctgaaaactcttttgtgataaatctagaaaaatttatacatgatatttttcttttttaaagtttagtgatccatcttggtactttgtctcaatttcagtcttgttgatttagataatattcttattgttttataaatttcctttcaggaatgtgttactgccttgatacgttctcacctttccagttatatatgatccatctatgacattctatcatccaggtgttactattttattgttctttcttgtacttttgttgtaaggtacagacttcaagtctaaagtaagagctagtgtatattacagtgtatatgaccatttctaatttgacctgttactgtaaagaaggctaacaagtgtgtatgcctagcccaccccttctggagcagttgaaaacaggcctcagaagactcaaaggaattcttttaactcctagcagggccacggggtcaatgtcagatttagtcatgctgttattttagcccagtggtccagagagatgactgaaaagtgagtctttcatttctttttttgtgtggttattaacaggattaaatgtaagccattgtgtacttagtaccaattagtttctcatctgagaggttcattatgattttttgtcagccttcgtcttgtaatatttgtttctttgtttgattagttaaggggctgaatgggctaaagggaagttttaacagcagtacttttaaattcattaagaattttaatagtcaacttttcaaatatgtagaccttgattaaaaaagggaccatgttgaaaattggcaaaattaagtaaattgtttaaaattttccttttcctgttgtatttttttaatctgaaaaacagactgtctttattatatcaaataatacttttatgtttctagaagtctacttcagattcttgtacatacttcttaagattgtatttagtttgctgtgaatatgtaattatcgttcagaaggggcacataccaaaaagctccaaaattaaaaaaccttttcagtttctaggatagaaacatagattgagctattaaaagcagaacattagagttctgggataaagatagttgtcaggtgtaaacaagccttaattgaaaaggaggcagcctaaaagttgattctttatgctattataaataagtaaaaatgcaaacttgcttgagttcagaaaataggagcatacccaacttttaaaactacttattagattggtagttgctttagatccttaacttaaaaaaattcttattaaaatcagtgttcaattgagtaatattcctcgtttaatagattgagatgcctcagttaaattttgaacaaaaattgttcctataaattgaattggagatgctgatctgttaaaagcaaggaatataacccaaaattaaaataggaattattttgctagtggataattatcttggacagtaggtcttatatcttgttgaagtgtgtagaacacacattttcacattcattcatctttaagtgaatatacctgtaggctgattcagacttggtattttatttattttaaacattagaaatgataaatactaatttaagcaagtgcgattactattttaactcattcttcgagagttgcttcatttatctcagagtttttggtgtaccttatttaccttatttagattatatcattgtattaagtcctttgcttactgctgtagttttttggtacctagaataatttattatggaattgaatattaaaaatttgacgatcccaatagttatgaagcttacagattctgtatgtaggcttttttcctcctttggtttcaggcataatgaatggatggcccttgctttctgatatttgtgtatccaattttctgaggaaacacttttctacaaagtctgcatgtttgattgttctacatttttctttcattataatttgaaaaggacttagatcctccaaatgaaaaatggctgtcttggccatatggtaaattaggcctgctttattattgtctaataattaagcctccctttacttatcccaccctcgttttaaaaactaaaaacgtgtggtagctgtattagttagaacattttcaagtaacaggaagtaattcagtggtaacttcctcatgtggtttactgtttatcaaaaaggaaagtagtttcttttgagagaataatgcagtttttgctgctcaacattttctcaagctctttggaaaataagagagaagtctttaatgtgcttgtaatatgataaggacagatttaaaaattttgtttctcttctcattacttggtgtttgacttcagtggaagctgaaagaagtaaatagatgttaagttgaaaatctgcctcagtgtcagatgctcatataatttaaataatttaaaatttgtgggtacttatattgattgaccttatattttaaaaacatagggaataacatcaactatttgtatcttctctcttaacttaaagttgaattaattaactttagctatctaatagagtaggtccagaaattaacattcaaataacagtagtaagtataggtgaagaccaggctatcccaaagataattcattaggacttctgtttctatagtatctttcatatgatagtaactgttgtaaacaattgaattatatatatcaatttaataaataattgcaatattaaaaagttagccccgataatttctacccaaacacctccaaattatgctacttcaaaaacagttgaagggaagtttaggaatataatatagtttcattttaagaccactaggataatagacattgtaatgtaatggaaaaacattttgtcccataaaaaccactttcatttaatgctttgtttttctgtctaaccaggtaatacctagcaaatacagaaagagagataaagcaagcaagctgttttgaaagtgtctaatattggctgatgtagagctataggtgggtgtatcttattattccataaaattaaaaataagagtggggggaaaaaacaaatcccaagaaaataaatggaaggtgagtgaagagtgaatagaataaaaatagagatctagtatttcagtcagtctgctagttaaattttatattcagagctttaacattttgggcttttaaatttcctgcagtgcacatgactttctttcataaaagatatgtcaatcatattaggaataaaagtaatagctcatatagtgctttattattagcatctaagaaaccactggtatttgagtaaattgtaagttagaattgattttttaatagctttttaatgcagatcaaacatttgtggcttttgaatgaaaaatacttatcaactaatttttattagcattgcatttttaaaaaaatctacattataacatattggaggttgattgaaagggagtttttgcctccattttataaagatgctctgtaagagcactggtgataatgatgtctattcctgtattttttgctgacttttacctggtatcctgtcagtaattgttttttcatgttgaggaagaaaaaagaatctatacttgcatctgtcagtattattgttgttttaactttataggtatattgtagacattgaattgaaagatttgtaagcttttggttttctgtgatactgattgggaacaaaggcatagataatcagagacagcaaataatagccaaaaatatatatttgatatgtattcatttagccaacaataactagggccttttgtgaatcactgtgcaagatgtgctggtacttacaaagatgaatcaggtatagaccctgaccccacggatcctatggcttaatagaagaggtaagaggtgagtggcataatagagtcatggggtgcaggagaggaaagatactgctttcatgaggggtagaggtgtgtgtcaggggagataaggatatatcatgtttagaggaacaacagacttttaaaattctattttgaattaggtcggtttttcttagactgagttcctcattctcctagggtccatttgtagggaaaggttttttagttcttaaattatttcttaaatttgtatttttattttgatgttaaaaagtgatcgtacctgttataaaggtaacactttgcagtgataactcatagatgaaagacatttgttataggatgagacttcagtttcttaagtcagtgtttctcattgggatttttggacagatatgatgttcaagagaactttttttttaaggggtttatatattttctaagtttgagaaacaaaggcttaggctcatttcatgttactttgcactgtctaaactacattctaattggtggcagaaagtaggtggcctagaaatgtaagtagcaaatttttttcaggaggtaaggcaattcagcaaggtagtggagagttcactgtcagttaccactatttaggagttaagttggtggcagtgctgctgaatgggcacagtttgtttgattttaaatggtaatgaactgtgagtttattaaatagagggtaaaagttctaaatacattctgaacataaactagacccgttaaagtggtttgtgttacaacctactctatagtgtcctatacagtagtcaaagcttttgtgtaattgattacttctgtggtcccaatgttaatttctgcttatagttttgtaatagcttaatttcattaaagttaattaaacatagattatcttgtacagtatggtatagaattttgttccataaattgggagaaactcataaggaataaataagtactctttaatttatagttcggtgtttccaaagaaatttgggcttcacattgggtgaattcatcacgatagatttaagaatatctgtattgaatatcccaaacattgtacacttttgggggaacatcactgaacaatattttcctttcccacttatttttttttagcagaaaaaaatacccccctgtccccaacaaacaaaactgatcaaagtaagaattagatcatggctttcaattccttagacattttttgaagtctctccaggcttttaagatgaggaattcctaggaattactattcttactggggaaaaagactattttgattacagagagaaaattaggtgacatttgctcacattatacatagaatagaatgattctagttcatctgtagattcttattatagtgtttcgcatgtaatatatgctactttaggataatattttattactgtttgaggttcttaatagttcatgtgtcagcttgcctttatataaaagtctatgtaagttgctttgacagactttaaataaaaatgggaaacacataaatgcagtgttgccatgttctcttttgttttgagcaattacaagcatttctcatttcctgtgcacagaaattccctgaaaaatcaagacgctgctaaaagagtcaaactctgaaagaaatcccaaagatacatcactgcttgacgcaaacatttttaagaagtcactgattataatgaacacagcctttaatggcagtttttcatctccttttcacaagaatgtgacagagtgtcattaaggttttagaaatgaatgctcctaaggaaaggaggatcactaggactacaatgatgctcagtatgtggccatgggattctctgttgggctctttttaggtttttaatcaggttggagaagggagttagagaggaaaggaataggaacagacaagagctttaggacacctgtacaccacagtattttactttctcattgatcttctagatgttgaatccgtaaggtttaatatagaaagtcaaacaaggttccaaatattttgaggaccagtaaacaaaatcagctctaactatatatatgtggaagcacataatttttgcatttaacttaaagtgtttggatatattaaatctgaaatttcatttaaatagtaattccagttctgctctaaggatattgttttaacccattgttcttttctatggtgacagtgattgcccttgatgtattctgcaggtcagtcagattgtatcacagaagagggcacataataaatgtgagccagaaacagctatgtctcagtacaggaacagaaaagcatatttttgcatcacacattaaaataacacccagaaggcattgcatcacatataaatgtaaatcttttctagaggggtgtagcatggaaagaagggttcagccaaaatgtcctcttaagttttttaacaataacaaacactataaagctcatatttaatgagtaataattaatgtctatgaagtttgttttatgagtttttaaaattacagaatattgtaataaataatgtaaaatattacaaaatatgctgtgcttgagaagatatttttccaggttagaaagttacagtttttctgagcaggtgttttctgtgaatctctgtagcattggaatttatagagatataacttttctatttctgtggggtttttttgttttttttttttttttgagacggagtcttgctctgttgctctggctggagtgcagtggagccatctcagctcactgcaagctccgcctcccgggtttacgccattctcctgcctaagcctcccgagtagctgggactacaggcgcctgccaccacgcccggctaattttttttgtatttttagcagagacggggtttcaccgtgttagccaggatagtctcgatctcctgacctcgtgatccacccgcctcggcctcccaaagtgctgggattacaggcgtgagccaccgtgcccgaccgatttatctatttcttttttccatttgaagtcagaaagaaattgctagaatccttcaagtctttctcagtgagagtaaaccttttctgtatataaaacgatcattctgtatacttcattttactttgagttttttagacattaaagctgacactggaaagggtagcttttattttactttttgacttagctacttaggttgtatgaacaattataaaatcatcttcatatgttaaatctgtaacaaattctttttctggctgggtgtggtggctcacgcctgtaattccagcactttgggagcctgaggcaggtggatcacctgaggtcaggagcttgagaccagcctggcaaacatggtgaaaccctgtttctactaaaaatacaaaaattagcctgacgtggtggtgcacacctgtaatctcagctacttgggagcctggggcaggagaatcacttgaacctgggaggcggaggttgcagtgagccgagattgtgccactgcactccagcctggacaacagggtgagactccatctcaaagaaaaaaaaaatcttttttcttcgactctaagatgatgttgaggcttttttgagctctgaatgtaaacttagatcctgtgggttgtttcttagtatactttctggtagctcagtgctacattagcagttctttattttggcattgtatttcctcacacaaagtaaaaagtctcataaatcttcctccttttaaaaaaatgaattgagaccaacagttttctaatctgatctggcaacctgggcttcagtaagggcagactaacagtaatggtagtatgtagtagaaagagattgaaagaatttctctccctggagtgctctaaagaaagatttccaaatagctatagaaaattaaataacttgctttgaattaggtaggaaaataaacttgaacttccccctttcttcatttgtgttttgtttgctgttttttgtttttttttttaattttagaaaaattggtttacagaaaaattgcaaagatagtgcagggagttgtcatgtgccctgtattcagtttttcccattagtagcatcttatattaattggctacatttgtcaaaattaatgcatcaatattaacgacttattaactaaagtccatacattattcagatttctttagtttttacctaatgttctttttcttttctaggatcctgttcaggacaccacattacatttagttgtcatgtctccttaggcttctcttggctgtggcagtttctcagactttccttttttttgatgaccatgtcagttttgaggaatgttaggtattttatagaatgtccccaaattaggatttgtttgatgtttttattatcattagactgcatgtatgggttttgggaggaagacagaaataaagtagcattcttatcacatcaagtataaaatgctatcagcatgatttgtcattgatgttagccttgattaccttgctgaggtcgtgtttgtctggtttctctactgtgaaggtattcttttttccccccttcttcccaaacagtattctttggaaggaagtcactatacacagcccatacttaaggaagagagtgttatgctctaccttcttgagggtgaaatatctataaaaattatttggaattcttcctatgggtgatttgtctgttcttgcccattcattcattcttatttgtatcaacttgtggatatttactttacattttgggttataatttaatagtactttattgtgttgcttaaattgttctagctttgacctttgggagtgctttcagttggctcctatgtttctttaatatactcctatcttttttccttaattttattttttaaaattttatttttatttactattattattgattgattgattgattgattgatttagagatggagtcttgctcttttgcccaggctggagtgcactggtgtgatctcggttcactgcaacctccgcctcccaggttcaagcaattctcctgcctcagcctcccaagtagctgggatcataggtgcccgccaccatgcctggctaattttggtatttttagtagacacagggtttcaccatgttggccaggctggtctcgaactcccaacctcaggtgatccgccagtctcagcctaccaaagtgctgggattacaggtgtgagccaccacaccctgcctgttgttattatttgtggttattttttagggtcagggttcactctgtttcccaggctggtctcgaactcctaagctcaagtgattctcctgcctcggcctcccaaaatgttgggattaaggtatgagccactgcacctggcctttctttctttctttcttttttttttaaacatcagatagtggagcaataatattggtcatcagtgtttcttttcttttttaaagcacttcgttacttcctggcactgcaagatgctaccgctcatcttgtttctttctttccccagacctagaatcagctatttctgaaaggagtcctggtttctttaattggagaatgatattagaaaccaaaatctgggtgctcagtgtttgtcttaatatagtttgactcaatggattgagtcaaatcataggtaatttttgtttgcttttggagacaaggtcttgctctgtcatccaggctagagtgcagtggtacaatcacggttcattgcagcctcaatcttcaagttctaagtgatcctcacacctcagcctcccaagtagatgagaccacaggcatgcaccatcatgcccaactaattttttgattttttgtagagatgaggtctcactctgttgcccaggctggtctagaactcctggcctcaagtgtcctcccgcctcagcctcccaaagtagctggaattacaggatgagccactccgcctggctctttggggatcttgattactcttgagagtggaggggtgtcaactcttctttccttctttattacctgtaatgaaaataacagtgcttaccttggggtttgtgagtatgaaatgaaataatgcatgtgatgaacttaaccaccatcttgcattgactgtattattgctaacccattttgagagatgaactgtttgaatatcaaggtgtcatgtaggcaagaatattgtataaatataagcttgtttagaattctgtgtcattaattgcatttactctatcagttaattagagattcttttttgttggctttttttgagacagtgtcacttcgtcacctaggttggagtgcaggggtgccatcacagctcactatagccccgacctcctgggcttaagaaatcctctcaccttatcccccaagaggctgggactaagggtgcacaccaccatgcctgggtgatttttctgttttttgttttttttttaaatagggacgaggttttgccatgttgcccaggcttgtcttgaactcctaggctcaagccatctatctgcctctgcctccccaatgctgggattacaggtgtgagccactgcacccggtcgttaattagagagtcctgatctcagttggattgtttaaaagtgaaagtgaatgatgataatatttagtaaaatcatcttaatgcattttgacttttaacttcttcagatttttattaaagtatagagaatttagatgttttagaaaatcagtgcaatatgtttggattttggaaaacatgaaatttacataatttgaagacaaacctcattgcatttaatattctgtttccacatttgtgggtgttctggctacactggttattggaagacatttaaagatggcgggcggggtgtagtggctcacacctgtaatcccagcactttgggaggccaaggcgggcggatcatgaggtcaggagatcgagaccatcctggctaacacagtgaaaccctgtctctactaaaaatacaaaaaaattagccgggcgtggtggtgggcgcacgtagtcccggctactcgggaggctgaggcgggagaatggtgtgaacccgggaggcagaggtttcagtgagccaccactgcactccatccagcctggtgacagagcgagactccgtctcaaaaaaaaaaaacggcaattaagatgacatttaaataattcacttagtaataaccaagtcaaccaaattgatattattaatatgtagtagttgtgcttttaatattacatttgacaataattttttaattaaatatattctagtaaatggttttgaattctaattctttctttaaaataattctttcatataaatacttttacatttaagtccagtgattagatatctcatgctgttgactaagaacattcaatcttcgtaaactggccattggtgttctgagaaattgaatcttacagagttctttaattttgaaagtttcttgttctcagataatagccttgtaaatgtctccaaatttcagagtcctattcatcttacctaaaatacactaagcctttgttctctttaagtagtacagatatcttagcagccggtaatggttaagggtgtgagtacaaggaacattctgttttggccctctctgttgtgcattgtagatgcctcatcacttcataaatatttattgagtgtttttcttgttaagcactagataaacctacaaaggtaaataagactagagttcctgacctgtcaaggatatcaccacctggtctaccatccatctgtagcaaagtgaccccagcgttcctatgcttacactctcctttttggcagcttggccatgttagttcatgtgtgttagctgttattttttatttttgcttttgccaaaaatctcagtaagctaaacattgggatcagataggtttcattcttagatttcttgatagatttctttggtttaagttatggtttgagtttgtttccctttttcgttagtaaggccacatttttgtgaacatttatttgaattaaatttctgttttctttgatttaagccattttcatgaattttctccagatgcgtgaattgacattagatatcacatttcttttttaatggccattatggtttaatatgttgctattaaaaggttgttttagctgtttttcaactcgtttcatgatctatgtgtaagttcccaaagggagagatcatattttatcttttcccgtaaacgccacagcatataatagagtgccctgtatatggcggttgtcagtaaatgtttgactggattctctgaatggagtaaaacggtttttaaattcttttcatagcaggatagcccaaatggctataaaagaggtcaaaaattctttgtataaatgtttttgacttttggctgaaactattaaattctttataaaataaatcatcgttaaaaagatacccacatttatgttataagccaaactctgttattctggtaactgaaagtttgtgagctttttagatggttaatgggaatgttcagatagatacgactttgtcatctattgtctctgcatttgttaaaatagtaatgctatcactttctttagcctctaagttagttgatatttatttacccttgttaccaatgttcttatgttaaaacattcattcattcaatattaacaccttattgtagctaggtattttaataagtaaattaacttcctgatgcaaggagttggtagcatagtacagtgtagtgtttcacaaatataacctgttgatcctataaggtcaaaactattttcatcatagtaagatgtggttttctgttatcattgttttagtgtttgtactgataatgtggaagcaaacaccaaaacaatgaaaacagaaaaccacatgatgggtaaaactgctgatgcctcagcatgaatcagtgctgtgacaccagtctgtactagtagtcattgtattcttcaccatcacaaacttagttgaaaaaaaaaaaaaaaggcggccgggtgctgtggctcagtcctgtagtgccagcacatgggaagataaggagggaggatgacttgagcccaggcgtttgaaactagcctgggcaacgtaatgagaccctgtctctaaaaaaagaaaattatccaggtgtggtgcttgcctgtagtcccagctacttggggaaactgaggcaggcagattcccttgagcccaggaggtcaaggctatagtgagccatgattgtgccactgcactgcagcctgggtgacagagtgagaccttgtctcaaaaaaaagaagttaacctacagaatgagagaaaatatttataacccacgtatctgataggggactaatatctaaaatgtataaggaactcataatacatatttgtagcaaaccaagtaacccaattaaaaaatggggtaatggacctgaacaggcatttttccaaaggcatacaaataactaacagatatgtgaaaaggtgctcaatatcacttttcagggaaatgcaaatcaaaccacaatgaggtatcacctcacacctgttgttagaatggctattatcaaaaagtaaaatgataacaaatagtggtgaagatgtggagattgggaacctgtgtacactgttggtgggattgcaaattgctatagctgttacaggaaacagtatggaggttcctcaaaaaactaaaactagaactactgtctgatccagcagttctgcttctgcctgtatattcaaaggaaatgcaactactgtcttgaggagatatttgcactgccatgttacgttagagtatatacagaatatacttggtaaggatgtacttcaactggttgaagcagaagtgaatgggtgaacttgagtgtggcctgccactcttgattatttaatatcctgtagcatcggtatgttttataaaacaaattgagagcattagtcatttttagtcagtgggttatgtagagatttgttaagagagcatttattgtgacagtttgagtctgtacaacatccttgcttagaaaccaattaaaatgcctcaaggaatggatacgtatgtagttacttcttccctttctagatcccaaatgttaaagggtattatatagacccaaggaagttgtttggttttaagcacttagccccatgttgaacaacgactctaggcagacatacttgatgagtgaagcaaaaggaggaaaagcaaaagtcaaaaatggattttgattatgggtagtgatcaaggaatggatgatgtgggaacagtgtgtaaggagtatctggagggaacatgaaggggagtaattgtgtcagacaagtttgagagagtcatttatatgacatttcccccttgagattttcccttttatcttgaattttgtattactgaagataataaatgcatatatttagctaatgtgaaacaagtgttttctctggtggattgacttttttttttaacaaagatatgtgtattatatataaaattaatgtggtaaccttttcatcttattctccttagaatccatcagtagaagaattattttgtacactatgtgtgaaagatcaaagaatatggggcagtcaccagttgtttacaacctggtttgcaagtggcataaaaaaatattagtttgtctgctgaataaaattaaacttatttttctctctgtagcatattaattgtattatagtatgccacagccacttccagtgcaatcctcctagtcttggaacagcagccaattccaggaattaagagaattaggttactttgcctagtggcacaaaaaataccaaggtattaaatcattggcttgtctgtttggggcacaatcagaaataaagtttagagataaaagttgatttgcatgctgttcacatttgttcatactttaacaggtatgtttttctatttctctccgatttatataatccttttgaaacagattttcagttgctgttaggtccagaggaacagaatgttaataaaattttaggttaaagactaaattcagaattcaactacagtaacttgatgctactggctgtgacaacattttaatctatctttggaatatttaagcaaatattaaaatatgtggttacctaacatggctatatattaaaatataaatgttatattaccctgtaacattttaaatgatttactaatctattatgtaaagtaatataagaagccagtttagtggtagaaatgttaattttattttaactttagtatttcaaaacaaagatgttatttttgaactcaaagtggtagaagcagagaggaggtgacaaactgagaaccttttgattttgttggggtggaacttggtctgctgttatagctgacattattactgtatctcaatgatttttgagattttgggaaaattgttttaatgtttcactcccaagcgctgaagatactccagaaatctttgccgttctgttcctataacatttgctcttccattttgaagctacaacagtgtaggatattttcagctttctagaattcctgtagaacctctgtattctaaaatctcccaggattaaggaggagaaaaataagcagaaagacatcagaaaaactaatcagtcattaggttctctggcaagtgaaaaatggaataaagataaagaatgtagtggttaatcaagagtaacctgtttataacatagactaggctcaaaacttaaacttgaaacttaacacaataaattaaaccatctttgtaaacagtagaatttaaagagattcccttaaacattaaacattaggaccttctgtggtgtcaccttattcaaactaccactgtgttacctctttttgactcttaaggctgccagacaccctacttgaaggatcctgttggaacctgtggaaataatacttacaagaacgttgcagctaagctggtccgggtgcagtggtgttacaactaatggatcacaaccagtcacggatttctttgttccatctccattcccacttcttcacttgactagccttaaaaaggctcatgcctgtaatcccagcactaagggaggctcagacagaaggatcatttgagcccaggagtttgagatcagcccaggcaacatagcgagacttcatctctactaaaaataaaataaaaaaattagccaggcgtggtggggtgtgcctgtattcccagctacttgggaggctgaggcaggagagtcacttgagtaataatggggtttgaggctgcattaagctaggattgcaccatggcactcaagcctgggcaacagagtgagaccctgtctcaaaaataataatgttgcagctaaaaggtcctaaagcattatgtgggccagaatatcccaaatctagttgtatgtcacatttaacatgggctgggggcagtggctcacgcctataatcccagcactttgggaggcgaggcaggtggatcacttgaggtcaggagttcaagaccagcccggccaatgtgttgaaaccccgtctgtactcaaaatacaaaaattagccgggtgtagtagctggtgccggtaatcccaactactcgggaggctgaggaaggagaattgcttgaacctgggaggccgaggttgcagtgaaccgagatcgtgccattgcactctatcctaggcgacaagagcgaaactccatctcaaaaaaaaccaaaaaactgtatgttcttaatctctaccacagatgtatgcaggtggggctcaataatttttttttttttttagatggagtcttggctctgttgcccaggctggagtacagtggcacgatctcagctcactgcactctccacctcctgggttcaagcagttctcttatctcagcctcccgagtagctgggattacaggcacaggccaccacaactggctaatttttgtatttttagtggagacagggtttcattatgttggccagactggtcttgaactcctgacctcaagtgatccacctgcctcgccttccaaagtgctgggattacaggcatgaaccaccatgcctggccaaggaatctatatcttaacaagtctgtgttaaaatataagtggcagctgggcgcggtggctcacacctgtaatcccagcactttgggaggtcaaggcgggcagatcacgaggttaggagatcgagaccatcctggctaacacggtgaaaccccatctctactaaaaatacaaaaaaattagccagacatggtggcagcctcctgtagtcccagctactcgggaggctgaggcaggagaagggcatgaacctggcaggcggagcttgcagtgagccaagatggcgtcactgcactccagcctgagggacagagcaagactctgtctcaaaaaaaaaagaaaaaaaagtggcacagatcaattataaatcactgcttcaaggccagtgctctcactttgtacattaataatctcaggcccaaataagataagtgatatgtcaacgtatgttcactttggtctttacatggcagctatagtatacggaatattataagctcagatcgtcatagctacataactcctttagttggaagatcacgcgtaaatgcccatcaagagctagcagttctgcatttgactcttgaagaccgtggcatggcagacaacacttcttgagctgtaacaggtggacattaaatccatgacaggaggtagagacggccagattacttgagcccaagagtttgagaccagcctaggcaacatggtgagacctcatctctactgaaaaaggaggataatccaactctcttctacttcacattaatatccttttaatgagcatggtcagatactttggaaagttgtggagataacttcagaaactaaatctgaataaaaacctatgtgtaaacgatcatatagatggctgttagcaaagtggtacttttgtaaactttacagttgacatactatagtatatactacatatatacttatatactacatataatacatagaattatacataatatactatagtatgtcaactatagtatagtatatttgacacgtttaaaatgtacagtttcataggttttaagatacatatatacacaggaagccatcatcacaatcaagatagtgaacataacctaaatctccagaagtccctcatgttcctttgtgatcttgtctcctgccccttcataccgtccatccccagggaaccattgcattctgtcatgagagattagttttgcactttctaaaattttgcataagtggaatcatacagtagggacccttcaggagtggaggagggctggcttatttcagtcagcataattgagattcatccataaagtagcaagtatcaatactttttattatatattgattgtggttatcccacagtttatccattcacttattgatggacatttgaattccagtttttagaaattacaaagctgctaagaacattttagtacaactcttggtatggatagatgctttcttcttgagtaaatacctcggagtggaatggctgaattgtaatggatatgtgtgtttatctttcgaaggaaacaacagttccaggccaggtgcgatggctcatgcctgtcatctcaacactttgggaggctgaggtggttggaccacctgaggtcaggagttcaagaccagcctggccaacatggcaaaactctgtctctactaaaaaatacaggccgggtactgtggctcatgcctgtaatgccagcactttgggaggctggggcaggcaaatcatgaggtcaaaagattgagaccatcctggccaacatggtgaaacctcgtctctactaaaaatacaaaaattagccaggcatggtagtgtgcgcctgtagtcccagccactcgggaggctgaggcagaagaatcacttgaacccgggaggtggaggttgctgtgagccgagatcgcaccactgcagttcagcctggcaacagagtgagactctgtctcaaaaacaaacaaacaaacaaacaaaaaaaaacaaaaagtatttttacgtgtggtggcatgtgcctataatcccagctacttgggaggctgaggcacaagaattgcttgaacctaggaggcggaggttgcagtgagccaagatcatgccactgcaccccgtcctgggtgacagcaagactccatctcaaaaaaaaaaaaaaaaaaagaaaagaaaaaaatagcagttttctaaagtgtttttacctttttatgtttgcactcatactgcagcagatgagattttcagttcctccaaatccttgctaaccctacgaacagtcttgataattttgtcgttctgatatttgtgcagtgggtgcacattgtgattaaggactaatgatgttgagcatcttttcatgtgtttatttgcaaactgtccagtctttgctttggctttgtattcacttaatagtgtcttttgaagagcaaaagttattaattttgaagcccagtgtgtcagtttgttctttaatggatcatgcttttggggttgaatctcaaaaatctttgcctaactaaaggtcatagataatttctgtatgttctcttatagaaatcttacagttttaggcttaatatttaggtttttgcttcattttgagttaatttttatatgatgtgaggtgtaaatcagagtcctttatttttatatggagatatctaacttctagcaccatttgttgaacaattatcctttctctattgaattattttttcagttttgttgaaaatcagttgtctgttgtattctgtttatttgtctttcatgatgcctatactatactctgttgattctgtagctttataattagtattgaagttagatagtgttaatcctccaacttttttttttcaaagttgttttggttattttaggtcctttgcatttctttttctttttttgaaagaggatcttctggccagtcatggtagctcacgcctgtaatcccaacactttgggaggccgaactgggcagatcacttgaggtcaggagttcgagaccagcctggccaaaatggcaaaaccccatctctgtaactaaaaatacaaaaattagccaggcatgatactgtgtgcctgtaatcccagctccttgggaggctgaggcacaagaatcacttgaacccaggaggcggaagttgcagtgagccgagatcacaccactgcactccagccggggtgacggagtgagactgtcttagatagatagatagatagatagatagatagatagatagatagatagatagatagatagacagacaagatagatagactctgtctcagaaggaagggagggagggaaaggagagaaagaaaagaaaagagagaagagaaagaaaagaaaagaagaaaagaaacagggtctccctctattgcccaggctggagtacattggcatgatcatggcttactgcagccttgacctgggcttacttgattctcttacctcagactcttgtgtaggtcaaactataggcattcaccatcacatctaagttttttttaggtatttattcactctgtggtccaggctggtcccaaactcctgggttcaagagatctacttgccttggccttccaaagtgttgacattacagtcatgagccactgcacccagatgcatttctgtatagattttaagtgtagtccgtttcttccagaaagtgtggtggggggtgaattgggattgtgttcaatctgtatatccattgagaattgacatattaaaaatatttagtattccagatcgtgaacacggtatatctgtctatttaggtcttcttttatttctgtcaacaatataactttagtttataaatcttctgtcaaatttatccctgagtgttttatattttttgatgctattgtgaaatgataccagtttaaaattacagtttccagtattactggtatatattgatcttgattcctataactttgctgaaatcacttactagttctagaattttttttcttttttggtagattcttttggatttttaagttgtggaacttatcacctgggaataaaaaaggcagttttacttctttccaatgcagatgacttttttgttttttttttcttgccatattggatggaagggaaccttaagtatagggcgagagtgaacatccttgtcttgttcctgtttttgagggaaagtatacagtctttcattattatgtaaatattagctgtaggttttttgtagataccctttattggtttgaggaaattttctttggtttgctgtttttaccaggagtagatgttggattttgtcaaatgctttttgtgggtctgatcgagataatcacacaattttaatatagtgaattacatgacttgaattttcaaatattaaagtggtcttgtatttctgggttaaatcacattttggtcatgcaatattatttttttaaccctttttgcatttagaaaaaaagctgcagcttgctgccagttctcatgtaatttcacataaacacactctttgaggctgaagcaaatctgattttcagtgtgaaaataaaatataaaaactgttcttggagttatttctaaacagaactaacatcagaatcatctgactcatcagaatcatctgttttggaaaattcagattcatcaaattagtcttcggccaactgagaacaatgttaacatcacctttaggaatgttatgcaggtgagtttataattgcaaatttaattttttaaatagacatagctaatcaggctatcagtttcttcagaaagcttcactggttcatgtgtttggaggacttaagaaaaatctcatctaagttgctgattttattggcacaaagctgtttataatattccctcagttatgtgtagaatctcggctgggtggggtggctcacgcctgtaatcccagcactttgggaggctgaggtgggcggatcacgaggtcaggagttcgagaccagcctggccagcatggtgaaaccccgtctctactaaaaatacaaaaaattagccaggcagggtggtgcacacctgtagtcccaggtactcgggaggctgaggcaggagaattgcttgaacctggcaggcagaggtttgcagtgagccgagatcgcgccactgcactccagcctgggtgacagagcaagactccatctcaaaaactaataataatatgtgtagaatctctagtgataccacttttctcattttttttcctggtatgtctgtcttgagattagtaaattttaatgactttctcaaggaaccaacttttggtttcactgatttttctctatttttttttaactttttaaactttttttatttttaactttttaaaaattacattctttttaatgtttacagtggattttatttgctcttatttttctgttttcttaaggtggaagctcaggttgttgatttgagatcattcttttagtgctatcaatttcccactaagtacttctttagggcatcccacaaattttgctatgttgtgtctttattttctctttgttcaaaatacgttctgatttcctttgtgatttctcctttgacccaggggttatttagaagtgtgttatttaatttctgtacgtaatttgggattgtccagagatctttctgtggttaatttctaatttaatgtattgtgttcaaataaaatactttgtaaaacttcaatccttttaagtttgttgaaatgtattttatagcccagaatatggctctcttgataaatatcctgcgtaagaatgccatttaaaggtcagattttggaaaatttcaaaaaatttctttcagttttttggccctctttggagattggaattatatgtgtactaggctgcttgaagttgtctcacatatcagtgatgctttttatgggttattttttacttttttctctctgttttattatagatagttccttgttttgtcttcaaggtcatttttttcttctgcagtgtctattctgtccaatgtgtttttaataccagatattgtagctttcctttttttttttttcttttttccttttagagatgggatcttgctttgtttccaggctggtcttgaactcctggcctcagcttccatatgtgctgggattataggcatgagccaccatgcctggccaaatattgtaactttcatctctaaagttttattttggtctttctaatatcttccatgtctgtactatttgaatgtaaggaatatagttgtaacaatggttttaatgttcttgtcccctaattttaacatctttttcaagtctgggttagtattaattgatttttctccttacaatgagtcatactttcctgcttttttgcatgccttggaatctttgattagaagccagacattaattttaacttgttttatgctggttatttttatattcctactaatattcttgacctttgttctaggataaaattaaattaccaagaaatggcttaatccttttgggccttgcgtttaagatttgctaggtggaaacaagaatgtttggggctaactaatcctactacacaacccttcttactgctctatgcaacatcatgtaaattgatgagattttgcagtctcactggtggaaatagacactattcccatccctgtgtgaatgcctggtactattctctgtaatccttttgggtgattctttccccagcctcacatgttttctttacacattttgaacactttgccgaatattcagaaatattctcctttggagatctgtgggagtatttctctgtgtagcattctctcctttattactagatctttcaaatttatttgtctttagtcttcctgggttctcatccctttctgctaaactccaggagtttgtcaagagtctacctgggttcttgctgtctgttctggggcctggaaaatctgaaggcaataaactttgggcagtgctagaattcacctagatgtctttcatggattattgtcctgtttcttaatgtctcgtgttttaaacgctttttcatgtgttttgtctattttttgtttattttttgatggtttcaggtgggacgggaaatctgatccctgttaatttatctgagttggaagtggaagtctgctactcactcttgatttctgtgtaataatttgaggtttgacttaatgctttagagcacattagactgtttcacctatccctctaaaggtttatgtatttatatgtcaaaaaggttataaaaacaaaacaaaaaaagcatagttttaaaactgcttattgggaagataagaattcactttacatttacgatctcatattttggcatattcggtatttcctccataacgcctactaaaattaaattatgtaaacaaagtacccaggccaggcgtgctggctcatgcctgtaatcccagtgcttttgagagccgaggcaggaggattgcttgagcccaggagttcaagactagccctagcaacataacaagaccccatctctacaaaaacaaagtacccagtacatatttgaggagtagaaaattagcatctactgaggtttatcaaatacccagccttgggccagatgctggagggacacagccaaatctgacagggacccgccctcaggagcccacattctagtaggggagacagagtcacagccgtaatgacagaaaccagtgcattagataagcaatactttatcttaagtctaattaataatttaattttaaaagttccaggacccttcctacatcccgagacattctaattctctgccgtttgtgtagcaattctttgaactgttgaaagatctcctgacaaattgttactgatattgtgttaagcaataatcttaaccttcccagtaaatgaactggaatgcccaattttaagtttctctatttatgaagaaacaaaatacaggggtcatagtcaggatactgcctatggtacattttaaaatttctgggtctactaggatataatctttcttaacctcttttgagatttgatgtcagttcaagggaagcattccattgatgtcaggaaggcagctatttgttgactgaaattctggtactctggcataagctcgttctaaaaatccacaaatatgttgttaatagaatgggaccatacttttcacttgggggcctacccgctagaggtgagatgtcatccttgagatgtttggaagactttgtgagatttttttttcttttgcaaactagacgtgcgccagcttctctgacctaaatgtagctccagtgggaatttcactatggatactttatcttaagtctaattcccctggtaacccaacattgctggttttagaatttaatagtcttcagaaattttttaagataaatttgctattttctttattatcttttaattacttttataacatggggtttttgttgtgtgtatatactagcattcctttggacacaaagtagactataaagaaaatttctaaattctgaatgcagtttctcattgattttaattattgctatgttccttttgaaaattttttggctggctctggcaacttatgcctgcagtcccacccagcacattttgaggccaaggcaagtggtttgcttgagcccagcagttcaagaccagcctgggtaacatggcgaaaccatgtctctacaaaaaatacaaaagatagggcttggtggcatgcatttgtagtcccagctactcaagaggctgaggctggagggatcgcttgagcccaggaagttgagactgtaatgagctatgattgtgccactgcaatccttggctgcaaagtgagatcctatctcttaaaaaaaaaaaaaattagaaaaagaataaaaaagtctaccctaaccattttatatttaaaacaagtttgttcttttcagtgtccttacttttaaaatagttgaactgatttttctgggaatctttctcaaatacaaccttaaacagaatatatggatgtgtttctgatgtcttagaattattctaatattaattatttggtgccatagacatattgtagttctcagaggctattcatatgtatgagaaatttttcttaattgaaattttccaaagattgctacactcaagagttttttgaattctgtttgtaagctacctaagagtagcaaataggtttcattctcacataccaattccaatcttttgaaacagagtgttgaggagagttctgagagcttttggacttaggaaggataactaagacaggatcagccaaaattgtctgtttgtttgggaaaaggggatagagtgatgggactggtacgcatttttgttctctagggttggtaagaggaatttgggtgtaatttgtgtacatcatgaaaacatgccaatgaaaccaaatggtctgagttcagatgcatttaatccctatattgtctttttcttggatctcattgacacatatttctattctactcatcgacacgtttcttctctaagtctactctaatgacacaatttctgctctaatccacaaatacttggacattctagctcttctcattgtcccaaccttttaaaacaacttcagtaatagcacctttcttaacctctggggtgataaaatggtgctacttccaatgactgtttgaggccttatctatagggtaacacacagccatcaaagtatagatcaaaagctcaaaaggtttaagttcatcagtagaaaaaccagggagtttttttctcctgttctagagaaaaaagctcacagattgcaggactgtagttaactagtatttatacttgtcctgggttgaagcaattgtaatagtatggttgacagtaggtttataaaatacacttttgtagttttgtatgatttttagattttacttggggtaaaattggaagcgacaccttaaaaagaactttgtgggaagaaatgtgtacaattgagtttccctgttaagttcttttacttatttgctctttcattggcccttgtatgtgtagttgttagaagtggggtgaaggtaaattgtgtagtggagagaaccaaggtggcagaattccagctatagcattgtttcttgctggtgagttgttagcttgtttgtgagtgctgttttcatgttctgtcagtttcattaatagacaaaacagtgaaattaatgaaagtctactggcatcttcttttttattttttatttttattttttggttaagatacaggcggaagtgcagtggtgcgatcataagctcactgcagcctcgaattcctgggcttgaggaatcctcctccctcagcctcctgagtagctgggactacaggtgcatgccaccatgcccagctaattttaaaaagttttttttagagatggtgtcttgtcatcttgctcaggctggtctctaactcctaggctcaggcaatcctccctcagcctcccatatttgacatcttcttgaacctctgtttagggactcttcttccctgcagataccattcagtgcctcaaccatagtttttagaggaccttgagttctacaaactagttactaataaaattccaagaccttagcttataatgacttaacatggttaccttttctaatattgcttatatttgagtaagaggaatggatgtttttcagatggaaaaaattattttggtagatgtattcttctgttatttcttaaatcttaccaataagtagcagtttactctattcatgggtgatcttgacctggttgatttttttctatcaaattcattaaataagagaatttttgtacacttggtttaataaatgaggcgagtttttatgggacctgtgtctcttaaagttctaatgtactttcttcagctaccaaattgtcattttaaaaacaaagtgaagatcagaggcaaaattcataagggattatttgcaaattacatgttatttcgtttagattctttatgcacaccttgactaagttttaaaatttgctgggcaggttcaacagctaggaaaatctgttaaaattgtaaatttgttgcttttgttactctaaaattatcatttgtactgttttcttaaaatggtctttagcatcttttataccttcacttttgataattttctgaactttgccggatattttgacattacagactgacttttaaacattcactttccccccattgtcttacgcattaatagaagggaatgtcatctggtgttttgagtgtgcaaaataatatttatggaccattcatagataagttatttttaaaggcatttcttcttaaaaatttgaatatacacggtgtcttgcagtggttcataaagtacttccagcattggtattttaatttgagcaacagtttttgtgtgagcaacgacatgagtgagcaatatgggcattgcattatggacttgattgagcaatgtgggcattccaatagggacttgagtgaacaatgtgggcattccaatagagagacttcagtgagcatcgtgggcattccagttgttacttgagtgagcaatgtgggcattgcaatagggacttgagtgagcagtgtgggcattccagttgtgacttgagtgagcaatgtgggcattgcagtagggacttgagcgagcaacatgggcattgcaatagggacttgagtgagccatgtgggcattccaatagggacttgagtgagcaacgtgggcattccaatagggactttagtgagcaacgtgggcattccaattgtgacttgagtgagcaacgtgggcattccagtagggacttgagtgagcaacgtggccattccaatagggactcgagtgagcaacgtgggcattccaatagggacttgagtgagcaacgtggccattccaatagggactcgagtgaacaacgtgggcattccagttgtgacttgagtgagcaacgtgggcatgcactagggacttgagttagcaatgtcggcattccagtagtgtgacagatattcttttggttggtgtctcattgttcattttgaagatttaacatgttttttctgagttccttctctttcaacctcttatgaccctgcagactgattatgaagtttccattaaccagaataagaaaatgtacttgcagactactgtagttaactgttcatatagcattttatcttatgcatactataaaactgttatatgggtatgtaatacagaacagacaaaataaggaaaacattcttttccaaaggactcaccgtagaattcctttaacagagatctctgatggtatgttttgaaatttaatacctataaaacttcagttagattctgcatttcagaagcaaatctattgtatagagccaaatacaactatatatttttacagcacgtttgtttttttgggggagatcattaaagaatatttaccttctaatcagattaaaaacttttctttgatcttttatgtgttcgatttgttaatggtacagttggtatcagattcttctgattaacagcaactggcctgaatctactataaacttgtgagagaaacttaaaattggcccttgttattacttaataaacctattatttttcttattaatttttttaatgaccatcatgtttactcttctaggcagaaattatggtttattgtgtaatgggaataaacatgatttgtggaattatacctcgttcatatactcactgtatttcttgtgaaagccgtaacatctctaagcatagtttcttcaattgtacaatgtagaaaattactttgtagaattattacaaaaattcgatgagttaggctgggtgtggtggctcacatctgtaattccagcactttgggaggctgaggcgggcagatcagtttaggtcaggagttcgagaccagcctggccgatatggtgaaaccccatctctacgaaaaatacaaaaaattagccaggcatggtggcacctgtaatctcagctccttgggaggctgaggcacgagaatcgcttgaacctgggaggcggaggttgcggtgagctgagatcacaccactgcactccagcctctagtctgggtgacagagcaaggccctgtctcaaaaaagaaaaaaaggaaactgctaaagttccagagtagctgtattttacattcctatcaataccgtgtgagtgcaaagtatgttttttaaaaaaggaaataacatgaatgtccaggaaaaatggagtaattgttgattgtacagctgtatcttggaagactgtgtgagtcatcagaaatgttatgtagtgttttcattaagtagaaaagcagaatctaaaacactattatctcaataaaggcatagaaaatagaagttgttcataatggataatttgaataagaatgttataatataacaagtttatgttgaaggatatttatatctaacttcttatgtcattcctagtagctgatggtacccttcagtagaaaaggagggagagggaatattcttccctaattcttgtttgtgtcactatttaagggtttggagtattcactgtctaggaaaataaattacttttactaagtgtcttgctatgtgctaggtgctttatgggaaagttaccctaacagccttaagaatattcgatcctggccgggcatggtggcacacgtctgtaatcccagcactttgggaggccgaggcaggcagatcacttaaggtcaggagttcaagaccagcctggccaatatggtgaaaccctgtctctactaaaaatacaaaaattagccgggcatggtggtacatgcccgtgattccagctaccagaaggctgaggcacgagaattgcgtgaacccgggaggtggatcgtgccactgcactccaacctggatgacagtgagactgtctcaaagaaaaaaaaaaaaggaatatttgatcctgtggtttattgggtatagtcaaggtacctgatacagcctgtttttcttaccatcctactatgagaatatataaataccttaattatttaaagttcttatcttcattccttttaagcatgcaaaactatatgtataaaccgtatcgcagaatagcacctccaaactgaggactgatgttcattgtttttgttctggcagctctagcttcgattttctgtgattcctaatatttcttcctctgctagctcatctctaatagaagttctctcccattttaggccaggcgtggtggctcatgcctgtaatcccagcactttgggaggccgagataggcgggtcacttgagtccaggagtttgaggccagtctgaccaacatggtgatacccttcctccaaacccctccccgcacaccgcagcccatctctactaaaaatacaaaatattagctgggtgtggtggtgctcgcctgtaatcccatctactcaaggaggctgaggcacgagaatcgattaaacccccgaggaggctgacgctgcagtgagccaaaatcatgctactgtactccagcctggacaacagagtgagactctgtttcagtaaaattttttctcccattttatagtccattgcctcattccccacaaaatgattttgtctcttttattatggtagaattgtctgtcttgcagaccatatgatctgaccagcctttctctcacatactagtatttaagattaaataaattaaaataatttcttagttttgttttgtttaaatactgttgtggtaaaggctgttttttgtcttttatcaaaaatgtaagaggttgaacaacaagaaattagtgtaatggttgaatatggcaatttcatatgcttctgacaaatatttcttaagcctcatttgtttttgtttgtttgtttgtttgtttgttttgttttgtttttgagatggagtcttgctgtcacccaggctggagtccagtggctcgatcttggctcactgcaagtgccgcctcctgggttcatgccattctcctgcctcagcctcaaggagtagctgggactacaggcgcctgccaccatgcctggctaatttttgtatttttagtagagacggggtttcaccgtgttagccaggatggtctcgatctcctgacctcgtgatccgcctgcctcggcctcccaaagtgctgggattacaggcgtgagccaccgcgcccagtctagcctcatttgttaaatacgctttcattaaggtagcctaggaactcagccaccctatagattgttgcttcagtacagaaatgagtcccacatttaaaagaacattttatcactgtttgtggtgttttaatatccagacttttgtggtcttcatgttggaatcaataatatatgtcaatatattttggtatatattaatatgtaattatattttaatatatggaagcatacatcatatattaaaatatatgcataactgaattaaatatatacatttaatgtatatattttaaaaattagtaatgcttctaaatgtcagtgagtgccctcagcttctgacaatgcttaatctaccggtgtctaaacagcattgcagtgttcctgctgcttaaatcatataggattcattttagctaaggctaaattaggggaataactgaagatatatcggaaatggaaaccccaaagagtaatagctatgaattctgtaaatgggaagacagaccagcctttactgtagcagtcaatatatagagataaggtcttacactggtgtttttgtttgtttgtttgtttttttaaactactgatgcctcagtcctacccctggaaatatgagtaaaatggggccaggacaacagaaagttgagagcttctttttgtactggctttaaaagcaaggatctaggccgggtgtggtggcttacgcctgtaatcccagcactttgggaggccagggtgggcagatcacgaggtcaggagtttgagacgagcctggccaacgcagtgaaaccccgtctctactgaaaatacttagctgggtgtggtggcacacacctgtagtcccagctacttgagaggctgagacaggagaattgcttgaacctgggaggtggagtttgcagtgagctgagaccacgccagtgcattccagcctgggtgacagagtgagactcagtctcaataaataaataaataaataaaattaaaaaataaaagcatggagctaggtcagaaatagctacagactgagagtaatcactgtaagtagtgacacaaagactaatctttgtgcagtgtggaaagtacagctgggttgtttctttgattcctcctgccccattgagccatacctacagagagcagctgtgaaaaactatcactttcaacaatgaagaatagtaatatgtcataatggagattatgaagttcagaaaggggtaaatgcagttttggggagggctgagactaagagagaacacaataagacaggcaattaagactgacatgaaagatcagtcacattgataggatatactcttgatatgatataatgagaatggcagtttaccgctgtggttttcttttcccaaaacccataaccacagcctaaccatgagaaagacatcaaacaaatcccaatttgggacattctgtagaatacctaacccagtattccttaaaaacaatgaaagtcagagatactgtcacagccaagaggagcctagggagacatgacaactaagtgtaatgtggtatcctggatagaattctagaacagaaaaaaattaaaaactaaagaaatcatgtatgagcttcagttaataaggtatcaatattgtttcattaattttgtcaaatttaccatactaatgtaagatgtcactattataggggaaactggctgtggtgcacatgagaactcgttgtactatcttcacaatttttctgtaaacctaaaactgttctaaccctaaacctagccagtaatggtgccttggtaattaaaacaccatgctgatgagtatatgatttctagctagctttatgaaccccatgatagaatttggatatgtcagtccaaatttatcactcttagtggaaaatcagggtaggttcacttcattgttaagaatacaacagtaacattattcgcctttgtaacttaaaacacatcccagcgtcacataccatttgtacccccacctcccctctcaaacccattgcttccccactggccgccccctaccccccaccaaaaaaaaaaaaaaaggaaaaggaaagaaaaaaggagaaggtaaaaaggaaggaaagaaggtaaaagagaaagtagaaagagaggaaaggaaggaagaatggaaagaagaaaactcacaatggttggcaaataaacctctatatttcaaaggttattgtgaggataaaactcttatagttatgatataaaagatttaacgcggtgttggtacatgttgttggaataattcacagtcaacataatgagcagtgatacaaagttcaggtgttgtagcagacgtattttgagtttacagatattaaacagtgaaagtaaattttgggtttctgttaagaaacacgtaaaatagccattagagttttgtggatatgtcaggtaaattttgaaggcattttagaaatgtcaacttgctaactctaggtgactaaaataggtaagctttttataaataaggtagattgagaaatttttggatatgaaattaatgatctgtatgatgactgatattttattttgcaaatcagcataatgtttactgtgtctcttcttgttaaagtgttttatttacctttcctgtgtttgactgtctattcttgatattatgtggtcattatttctttgcctctgtcattatgtactgtttgcatcttttccgtagtatcttgatcttcaaaataaccaggcatgctatttacatgaagcagataagcataacccatgtaaattttcattgagtcactgagaggtggtgtgtgttttttcccttttactttaaaatgatttatttatttatttatttttgctggcagccttaataatgttttcataaaatatgatcgatttataagtctgttttacatgcctttccctttttgtcttagtgctttgcttctaagttgcagatgcagtgggtgaacaataccctgtgtggtgtgacaggtaaatttcccaatttacctgccgtaatagtgcgctgtgtaatgccattcaatcatctctgaattttacttgcctgattagttaagtgaagcagattttcaatttaaatgtaacttcatctgcttgattaaaaatgtaacagaacattatctgctgcaaataaatttcagtggaagagatgatttttgcctgtttaaaaataacatctgtttatgttggctggaagcagacgattaatacctctctaatttcgaggtttaccagtccagctcacctgtctctttgcatggatagttgaaattgatggctgtcgagtataaacatttacctgttgatgttgagttgatggatttcttttttaaggataatacagaatcccatcattgggcattcatttatttgctgctcatcaagatgattgacagttttgccaacaacatggaaaaaggatcttccttcatgatgcatatgagaaaaattttacccctcaatgatgagtgccctacagaaaaacatattcttgtagattctttttcatagttggtatttatttgaattttgagtttagagtccataagtataaatttaagtcaagtgcatagtaaattagggtagtacacccctgctggcatttttcatcaagtgattgtatgtataggccataaggacaaggagaaagataggaaaaaccaaaatggttattttttttcccctgcacttagcatagtgttaggcatgtagtagactactcaataaatatttattgaatttgaattaaaaattaggcacagagtatatttgatattctataaatgtaatagactagatgtcattggtttaaatatgtagctgaaaattagagcagaaagaaattacagaatgctaattggtctgtttatgttttttaagtgaaaacttccttttaggagcttattaaaagtagatttttaaacacagaattctcctgtaaacgtcctctagggggaaaaaagacattgcatactgttaattttcctaactggtaagtaaaactgggttaaaaaaatagattcagaaaattctaatgttaataatacagtggtacaatttggtggttttaaaagtatatttagtatatagtaaaacactatttgttttctgaaaattgctgtagtttcacaatctgaaaaaaacgtcttgtctttttgaatgctgtatttactttggtggaatattttgaacatgccacttatttatagaggaataattttgcattcttttggtaacatttttgttgtcctttgttataaagcaaacataaatattggcttgtctgttactgaattgataaattgcaaactcttattttagttgtaatgggttttggccacattgtgtatgatttgagttgaaactatttcaggcaggtatttgaggagattttctttatcaaaatgcttcaaatcacaaatcaacaaaattaatttttgttctcaaatatataggatactttattctaagtgagactatataagatatttaatctctaattagtagatttggtcatttcggatgatatgattgttttatttataaaacaaatatttggagattgttttccaatacatcaggttattccttgatatttagcagaagtttttgccatagtgcttaatgaaaacagctcaaactgttaaaatacatttttggtataagtatatttggtatgttctatgctttaattattaatttgtaattttattttaacaaattactttgtgtagtttttttttagaagcagatcagctcagtgtaagaaacttagaatattgttttgtagctttctttgttatttcgttgtccttcctttttatttgtagtttgcaagggtagatgagatttttttttcagtttcacttgtccagatgatatttaatgtagaatgaataaactcagaagagcagcctttacctaaggaagaaggtatgactacttcaaattgtttcatcacttagtttgacttcagagatttttgctctgtgatttgcactgacttcaaaactttttgcatgtatctcaaaagtgggtgagaacatttatagcagcattattcataataaccaaacttggaaataaacgctatatccatcagttgataaattgacatacaaaatgtggtatattcttaaaatggaatattattcagtcataaaaaggaatgaagtacagattcatgctttaacatacctgagctttgaaaacacgttagtgaaagaaatgagacaccaaaggccacaaaatatgtgattccatttacgtgaaatgtccaaatgggcaaatccatacagacaggaagtagattagtagctgacaggaaggagctgggagaatgtgggaatggaaaggtactgtaatggatgtgggatatatggaagatgttctggattatggttgcacaactttgtgaatgtactagaaaatacttgcacatttcaaaaaggtgatttttctttatttttataaatttttaaaaaaaatttgagatggagtcttgctgtgtcgcccaggctggtcttaaacttctgggctcaagccatcctcccacttcagcttcccaaagtgctgggattcaggcatgagctactgtgcccagcccaaacagatgatttttatggtgtgtgaattatatcaatgtttttaaaaagggagttgaaatatataaattgttggtttatagagatattattactagatgagctagtcattgctaattctttgacatttatgctgtaatctgatgctgtgaagactgaaaatgttgacagggaaataggctgcaagttcgaggctggccttttaatgagttgttaaaaaatacaaaattacagttgtcagtcttgtcttaaaatcttaagaatagcatttcaatttttgttgataatacaggcacatttatctattagcattatttttgcttatttttttacatatcttctaatgattacagttgtatttttttttctttttttctttttttttttgagatgtagtcttgctctgttgcctaggctggatgtagtttcgctctgtcacctaggcgatcttggctcactgcagcctccgcctcccaggttcaagccattctcttgcctcagcctcttgagtagccaggattacaggcacacgccaccacggctggctaatttttgtatttttagtagataaggggtttcacttgtattggtgaggctggtctcaaactcctgaccttaagtgatccgtccacctcagcctcccaaagtgctgggattataggcatgagccaccgcgcctggcccagtcgtagtgatttcaaagatggaacataagacagccttgtggaaaatcagtctgtcttgaaattgtgttgttattttttgaggtttcagtatattcattttagtgtgagagaatgacatcctttaaggtacatggtggatacattgttaaatcgtagtaacatccttctgtgagcctagtgctgggcacatgtttgcaatcccagctactcagcaggctgaggcaggcaagtccctggaagccaggagctcaaggctgtagtgtgctatgattgtacatctgagtagccactgcacttcagcctgggcaccatagtgagacccccaactctaagcagggtcaggggagagaaacagaaaagaaatccttcaggaaatatttaggaagatagaaataattatattaaaatcaatgtaaacatttatgaaatgtaaatatattctatcaaaaattatgttgattaaaaagttttcttggcacttttagattaaaaaccataaatcagcagtagcttatgcaatgttcatgtgcttgaaattagacatctctttatttaatacataacagtacattgtataccgtttgaagctgtgtgaactctcattttgtgactcagaggagagagaataggtacttgaatataaaatattagttcacctttcaaaatcaatccagtgtgaaatattggttgcctgagaggtcagtcatacagaattgtgtgctttattatttgaaatgttatttgttttcagcctggtgcagaaatccttttccttcagttatattttagaaccactgtgtgagtacattactttttaggttttgggcctcatggacattcttagcaacttgttttcacagccctttctttgatgttcatttgaaccatagcgttgttgatattcagagtattttgacctacaaacataaacattttatatggttcaaactaacagttaatttgcttcagtttaccaggcatggatgagtacagtttcaatgctaatagcaaatattttacttattttactttcctgagcactttacatgttttcactgttttcctcctcacatcaacaaccccaatgaattttatctctcatttataaataaagaaataggtgtaaagagataaagtaatatgcccaagtaagtgggaaactcaggatttgaacccaactcctcttgctccagagtctacacgctgaacaacaatgctattccgccctctacccttgatctagtcccctcttggccatctggtagttttgtaaattcaagcatagctccttctatggccttgagcccctcctttccctgcacagtagagaggggttggacttttattggattgtgtttgtattgtaattgtgtgtttttccagatgtgttttctagccacaggaagagatactcaaataagtctttcaacagtatctattatgctgacattcacacttgtttgtgttattttgtacgttttggaagccttctgtagttaagtattagttgagctaattccttactgtttttgtgtcatactttgttatggagcaacgtaatatgtgtatgttgttaactgaatcgatagaaatctaagaatcaacttggtctatatcatctgatgattcaggggctggtttggatcattgataaagtaaattattccctgttttacttaactccttagtggcagttttctagattcccattattggcttgcatcaaaaaaaaaaaaaaaaaggcatttaaaaagttatgccagagctgggagagcaagaggtgctctatgttttactgatggggcctggcaggatcctattcctgctctcctgatctcttatcctgaatcccctgacacctctatttctggaatttttctcttttgtacttggtatcagtaaggaaatacatagtacgaataccctgagagagatttccagctttatttattgatctgactgtctttcagctgataaaatgctattttattacccaagttttaacctctgtctggtgatttgttgttgttgttgttgttgttgttgttgttgaagttcaggctgcatgtgggataggtttgctcaggcatacttcttaggaagtagtcacttgcatgactgtttttgggataactctttgagtatttggagaggtctattgtaacttctgaaaggcattgtttttacgtatgaatgttctaaaattcattctaaatggtcatgaaaagaaaaggattcacattttagaatggcaatagtccctgaggactattatgtcttttagatttcctgtgggtttctaggaatgttagtgtaacttagatttccacctacctgatttctggatgtgcctattggaacttgctgagatctttttttttccttaacatgttgtccccttgacccgtacttcgaaactaaacatattattttatttgcttacacttcaggaggcaattggcagacaccaggccaacagtctctagaggtcgtgggtgccatctacaagtagtcatggttttttattgtattttaaagtccgcaaaagatctcttgctatgttaggtacacatactataggtgatcacctcctatcccttaggagttgtgatcatctaccatcatttggacactcatttaggcagtcttcctgggtgttccatttgatctggtgttaaatgataaggtgaatatcaggttacaatttagagcctttaaataaataagatgatgtattattttgcatataaatgtacactgttcttgtttgctacttaaaggaatgtattagtttctgagggctgctgtaacaaattaccataaactcaatggcttaaaacagcagaaatttcttctctcaagagttctggaggccagaagtctgttggcaagcttggttccttgtagagctctgagggaggcctgtctgtgcctcttttctggtgtctggtgtggctggtaatcttaggcattccttggcttgtgattgcatcactccagtctttacctctgtcttcaggtggctttggtctcaaatttttttcttctttttcttctatggacacctgtcattggtttcagggtccactctaaattcaggataatctcacctcaagatccttaattatatctagagggaccctgtttccaaataaggtcacattcagaagttcttggggttagaatttggatatgtttttgtgggaggggacactatttgatgcactatcaggaatatctgttcattcatgcattttatttatttatttatttatttatttttacaatttcagccaatttgctaagcatcttacattatacagtacatatgttatactttttttctgggacataatattttggagattgtattatttcccatctcattattcagtaaacctgaactctcacactgggattttgtggggttgggggtgtgtggaaaatctgttttattaaacttagtttgctataattttttcagattattaaaaacatgttctaaacatgagtgtatgattatgtttagtttaatattatttattttttagttccttttactttctatcccaccatttgtggatagcatgtaaataaatcttgaaatttggggcaagagaaacgtaagaggttaatccacttctaaggctacatcattttcagagtaactgattccaaggatgagcagaatatatttatttaatagctatgagagatggattttcataaacttttatccaaagtaacaagattctcacattcagtgtaaagggtgttatgaaaatgtaaagttcattaatatgctgtatatttttatccccttgaatgtaatttagagattatatactgtaataggatttatgacattatactgtttaatctttagggtgttacaaacacatcaaggacagttggcagtaactgaagtttgcttgcattttaagaatgcattagtattgctgagtatcatgtactttcctaaaaataaagaaaattatactcttagaatatttacagattcaaatatttttttttccttgcaggccaagaataaaatctttatgaactaacaagatgaattaaagatggaatgattcatttctatggttaggttttaattaatacatgggggatgattttggcactttttcaaagaatttgtttctgtgtatctgaatttgcacctactctgtaacctaactgcgatttataaaatgaaacaatctcttctaatttggcacttgataggtgctttgactttaaaaggcaagtgtatttttctgtcacgaatatcttgtcattctaaaataagtaaaaacaatggattgatgaaacttcttcactgcttttttctttgtgtataacaaatacattgatattttactggcataaaatgtgtattttagttgagtctttaaattattgctcagtgtattttgtttattttaagccattattacttcctttatgttggatttggatagtttagattgtaagcttctaaagggcaaataatacatcttttcaactgtggtcttgactagcagtcccaaacctttttgacaccaaggaccagtttcatggaagaaaatttttccatggacaggggtcgggggatagtttcgagatgaaactgttccacctcagatcatcagacattagattatcataaggagcatacaacctagatccctcgcatgtgcagttcacaatagggttcatgctcctatgagaatctaatgcagcagctgatttgacaggaggcggagctcaggctctaattctgactagcctgccggctgctcacctcctgctgtgtggcccagttcctaacaggccacgaactggtactgattgttccccagagtttggggaccccttgtcttgacagtatcatgcacaggtaggtacttttaagctgtttgatattattgtttctacttcgggagatgggaagataaatggaataaaatgagcaaagtggcagtgccattaaagatctgtggatatctgatttctcacagaattcacagaattacccttcattaaaagatgcaaatggcagttttatgaagtctttttgccctgttttgtgttgggtgttcagtacagatgcaatttttttttttttaaattttcgatacagggttggttgaatccactgttgtggaacccatgggtatgaaggcccgactgtgctgggttaaaaggtcttttctgttagaacttaaaaatactatcctacttccttttgtcctctgtggtttccgatgacaaattctcagttattctaattttgttactttgtgagtaatgcaagtgaaacttaagaatttgaaaatttgagttttcagccattatttactcaaatgctttttctttctccactatactcttcttcccttctggaacttgaggaaatgaatattagacctcttgataactattgtcctgtaagtccttgaggttttttatttttatttttatttttttgttttaagagacagggtctcattctgtctcccagcgtgaagtgcagtggtgtgatcacaactcactgctgcctcaaaattggctcaagcaatcctcctgcctccaccttcagaatagctggaactacagatgtgtgccatcatgcctgactaattttttttatcttattttttatagtgccaagatttcactatgttgccccagtctggtctcgaactcctgggctcaagtgatcctcccacctcagcctcccagagtgctggaattaggtgtgagacaccatgcccagcccctgaggttggtctctcctctcatcttctctccccctacccctccccccttccttccccctcccccctctccccacccctccttattaccctcccccctcacctccccctaccctcccccctcacctcccctaccctccccatctcacctcccttcccttcccccgcccctccccctcctttcccctccccctccccttcctcccctcccctccctctcctcccctatctcacctcccctcccttcccccacccctccccctcccttcctcacccctccccttcctcacccctctcttccccctccctcctttcccctccccctctcttcctcacccctcccttccccctccctcccctccccttcccctcccctctcctcccctcttccctctcccctccccttctctttccccctcctctcccttctcctctcccctccccctcccttctcccctcgcccctcccttctctcctcccctctcccctcccctcccctctctcctcccatctcctcccctctccccactccttcctttcttcatttttttcccatctctcagatttaatattttctataaatctgtcagctatctagcctgtctaatgagattttcattttggttattatatttttcagtttctaaattttgcatttgatttttctttatatcttctattttttgaggtggctttccatctttgttcatccaagagtgtttgcccttgttggaacatttttataatagtggctttaaagtcttggtcagataaatccatcatctgcattatttcagtgttggcatctgttgtttttttctcattgaggttttcctgattcttcatttgtcaaattattttgggctgtatcctggacaatttaagtgtcatattttgagaccttttgtcttggtttaatgctgtgatgaatgttgaattcttttcccccgctgagactgagttttgcacttgttgcccaggctggagtgcaacagcgtggtctcggctcactgcaacctctgcttcctgggctcaagcgattctcctgcgtcagtctcccaagtagctaggattacaggtgcacactaccacacccagctaattttttctatttttagtagagacgcggtttcaccatgttgaccaggctggtctcgaactcctgacctcaggtgatctgcctgccttggcctcccaaagtgctgggattacaggcatgagccaccacgcccagctgatttttttttttaataggcaatttggttgggttcattcaggttgaaagttctaaacagccttctgtaggctgtagttccaatgccagtttcctttacaaaacctttgcagtcttactcagaactgtccagtgtgtgtgccaaacattggactgtctgggaactgagtagttgtctactccatagtttagctctcagagtctgtggtatgttattttaggatcaaccttatgcaggcatagtttggaagggtgagcacaaacttcatggggccactttcctatgcttctccttcttcataatctctctggtactttttggttgcctaatcctcccctctttatacttccagctacagagctggagcttgctttagttactctcttctgctgcacatttcttgcagctgtgcccatactggggccaagtagcaagaagacagagaaaaaaataagcaaaaagaattcttgctaccctcttgatgatgaaggtttgttccctcagagttttagacttctgcagaccccactgctgctgctgtcactgcttccaccaccatcttgtttgctcaggggctgggtatggaggatgttgaaaagaataaaaaaaatgcctagggaattttcttcattctatctaagtattaggagattctgttcctgctcctcaagctagaactagaggcttctcctggagttctctttgtctatccctgagtgcctgcttccagatttcagctgctttgagtctagggcaggagatactaaagggggaaaaatactaaatcatctgtttgatattaatatgaattcttattttattccccagtctgccttaactagctgctttatgcatcatccaggttttctggattcagtggaaaagacaaggtagtgtgtgcttattccatcttacttggaattggaactcctggtatatttggaaatcaacaaaaatgttaaaacgtaagaaacaattgtaactctaatgtatgggtttccccatattctttgttttatgcttcatgttgtttaagaatacatgcattaggctgggcacggtggctcacgcctgtaaatcccagcactttgggaggctgaggcgggtggatcacctgaagtcaggagttcgagaccagcctgaccaacatggaaaaaccctgtctctactaaaaaaaaataccaaattagctgggcgtggtggtgcttgcctgtaatcccagctacttgggtggctgaggtgggagaattgcttgaacccgggaggcggaggttgcggtgagccgagatcgcgccattgcactccagcctgggcatcaagagcaaaactccgtctcaaaaaaaaaaaaaaagaatacatgcattagaacccacacaaggaaactgtcccgtttcagggtacaccttttatgggtgcaactaaatgtgcaaatttagtaaaacattttgggcacttgaagctattgcaacttttgctgcctcagagaagcaggataattaaatttttgcctatggaaaaagtaattttaccttagttttatgtcttttctaatttgtcataagattctaggccaaagatctaataaccattttctaggaagtttctttttgtttgttgtacttatttgaagtgcattaggtttctcttctttttaatcaccagtatattgttttgaaagtatattgaacattttttgtcatattttttctcctttctcttttatatttcttacctttttgtactttttgttttttacactgtatttctttattttagattcttcacccctactctccatgtcccctactcccaccccactaaaatggtggataggatttatgtaggggtgctgctctgagagtttgaactctgattgagagactaatccccacccccgaaggctgtctgcatcagctgtccccctggctaattagaattccaaagggcattaataaccatttaaattaatccgattatacctgcagttgctaaaggtaaggttcaggctgtttaaccctctgttaatgaacgcaaacatgaatcaaaactgggtaggaattttacagtttattttcatttctgcccaaaggaagaaaaccatttcacctgctctttgtagcagtctagtttacaacaatgcaaggaagccttgccattaattcagccttcattaaaagaccaaagctaaattgctccatcttgtgaaaatgcatttgcattgtttgtgaaagtcctttgggggcagagctgtagaaaaccgcctaacagcaaataatcctttagttaaatgcaaaagtgttataaagagctaaaaattctctttctagcaactaatgttgcaatgataatttgacagtagtggtctcccaaggggcattaaacaggtggaaaaagagctaccatttcagaactttagttaaaaaggagtggaaattgaatgaccagtattaagagtcagaagaaagtctatagggttatgtagtccagtttctctcatataggaattttttctccaacatagtggacatggttacctagtttctttgtaaacatctcagtaacagcaagtgttaataaggcagcccatctcataatcagataacttgttattgtcagagaatcctgatctgaaattagtaactattatttttctttcattttaccctttgagccatattgaattatttcagtatagctcattgccctcattcctattccctgacctctccatattttcttctttagatcaggtgtgtattacaggagatttttgaaatgtagaaatatatggaagaataaaatgttcagtaaacatgattgtaagacagcacttttcatacatggttgaagttgaaaaattttaaagcaagaaaaggaccagaagaaatatctttccatgtaattggctatttcttgaagagttattctttttgctgttaatgtgtgtgtcacctatggaaaagtctagattcaataactaagtcagaaaaattggtttgagaaaaagacatctactggaatctgtacggcagtccttcaacaaagatatctattagtcgatagatgtcatccccaacacctgtctacaatgactcatgtcttttcctgattaccacttatagatttttccctttttaaaaaaactttacacaaaatgtaaacttcatacattgggattattctttagtctggatcttttctttgaatgaaataagctttgggatgcttatttagatgttcaatggaacagtgtggagaacagtaattgtgtttgggctaaagaattaatccatttagtcatgggaagcactacttagctttccatagcagctgaattgtggtgcaactttggggctattttaggattttaacctcaaatagaaatgaaagtttatttgtattgatgaacatatgcttttgaataatgagccattgacttgatttcaatgaaagtgaaattgtttttcaattcagttattttatgtttgaacatgaattgaaagctacatctttgtattgctgaaatttaaaaaaaatcaataactttaacattttaacagaaagtgttttaataagcaattattagggtggcttcagaagggtattgtagctttaaaaatttctgacggttattagtacacttttgtactgtgtaaatcagacattggaataaaattacttttattaactaaaattctcctacaataggaaattttactgcattttgacatctagcaggccaaagaaagatgttcagaaagtcttatttctgtctcagaccaataattatcccatattttgtataaaacattctttaaaattgttagtttagatgatcacacaaaagtaacttttccaagggatgtaagttgcctgccactgtactacagtctggcaggttctacagcctggagaaaaatctagtagccttttaaaaaaaaaaaattgtgttaataatagcctgtttatgttgttggattttctgctgtttcatgtacaattttatatgagctaccaattaatgcagtttatatgcagtttctatcctcagcaaggaatgaggtggtaatcctgccctgctcttactacaaaagctgggcacatatctaccaaggaaaaatttgtccgccttcaggaatttctttctccctctttcctaatcagtgcaaatccatcagtcacctgaagtctcatctcctccatgaagcttgtcctgtgtgacccttgtaacctgatatcctcatctttaaaattattatttgaatgcctcatccctttccctcttacagcgttttcattatgattttcaggttcacactcaaactcagacattgctgatgttctttgaactcctctctggcacttaacttgcctatcccacacaattaagcactctgaccaattttgtagttagggtgaagttttcatacaaatgtggatatattgaagacaaactctaaaaaattgggtacttgctatgctaggatagtggcctttaatatattaaagaatatttctctttttgagttagcatttttaatagaaaattagataatggttaaaactcaaattggagtacttgattcctggtgatttaagagatgatacagaggtcctataagagactttagagcttacttacatatcgtaagtggtaggtcaatgtagagttaagtagcaacggccttgcaactcaagagcaagactgttagataatataggtagagaatcaagcaggatgaagcagtgtatttagtatagggaatggaattatttggagtaatggtactgggaaaacatgtctgaacagataatagagagtgtgtggggttaagacagactctagtggcactgggaggattgggatagagcttggtgttgcacagatattgtgccttaagcttaagtgatgtattgatgattttcatggagcatttattctttttaaagggaagatttatttgggtgttgtcctggttaacttcaggaaggcttctgtgtgaaattatgctggaattcgttttaaggatgtaaatcctataaatccacagcttgggtgacaaattgaatctctaacaaatagaaggaatttaagagaaaaatcctgttgtcaaagaatagctgatattacaaacagttattatatatacaaattctctatccaaaggatgtctttgtatgttgttgagatcattgtcactgcttactctcaggtgggtatagcagaacaagaactcagatttcttggattctcttttttctttttttttttttttttgagatggggtctcactctattgcccaggctagagtgcagtggtgtgatctcggctcactgcaacctccaccacccgggttcaagctattctcatgcctcagcctccctagtagctaggattacaggcgtgcaccaccacacctggctaatttttgtattttcagtgaagacggggttttaccatgttagcaaggctggtcttgaactcctgacctcaggagatccgcccacctcagcctcccaaagtgctgggattacagacgtaagccaccgcgtccagccagattctcatattttttgtaacagcagatcccttataagtgcatccctttgcacacctaaatgcctaaatcatattgttgataagtttaattcagcaaataactgttatttagccactagggacgttgcagaagaaactacaaaataaagttttttttgtttattttcttctcatctcctttagatatatgaaaaatgctgctcattagcaatgtttgtgatgtggtcatgcaaaccaatgtgttttgcgtctaatgtagcagtttaatgagtgggaagatgactatcctggggtgaatatgaaatgtggcatggaaaaggaaacaattgcttgtgaatcctggagaatctggtaaagggggaacttaaatatgtcgaggaagggaaaggcattgtaaaccagaagaatagatagggagaacagtttgagcaaattgttttgggaggcatatttaatgtagtgaagacttaatgtagtagtgatttaatgcgaattagctggaagagacactacctacaaagctcataatttagtccaaattctgaggagtaacttatactaggttggtaatggtactactgcaagtaaataaaatattgccaaaataattttgaaattagagtcaccacgatttaatgacttgataaaaatgttaatggagagaagagagattgtaagtttgtgtgattttttaaaataattcaactactgatagcaatagggaagttgaaaggaagggcccagtccactttagttttagatgtgtagagtttgaattttctgcatttgattttggtgaaggaattatgagggtacttcaaaaaataagactagaatgtttgtgtcaggcccagatatataaatatatataaatatttgggcatggaaagaaaatcccaggaatcaaataatgtgccagttttatgattttgacacactcaaacctctgccttttgtttctctgggtcactctgtccagtacaacaataggcttgctatgtattttggatgaacaatgaaagagagtgaactgttctttaaaaagctgtttattatagtgaaactttatctgtagatgcagccactttgccagatctctgatggaactaacaataattttgtctagttaattttaatagtacgtcctttgtcacaggttgttcaaatgaacaaatataacatgatttttatggcaggtaaagaagaatattttaaatggaaggagacctgatgcaaagaaaaaggcattatttttagtggtgcagcgattttgggacttattatagtagaacctattctttatagagattattttgtttgatttttctattttgtttttctttgctatctagctttgttacatagtgaccatttttagcactataaaacttaatgtagtaatcagatttagcagattattatttaaagctgagcatttaaaattaactttttgccctgtgttcatttttgaatttcctgtttttatataaatatttgattaaaaagctttctgtttaataaaattgtgttatgattattttaatgtcgtttgaggacatttaaaaaaccctcccaaaatatctaggatattgttttaatctgtagccttctcagtagaaattaaaaaaattgggggatacacttttttgtgtgaaggataaagctcttgtattaatgacaacattaggtactgggtagtattttagtcattattaaaattattattaaaaattctgttatatattgtaacgtattaaacatttgagtatgtgttgagttcatcatttgaatacatagtgctgttttaagttatttgtgtgttatgaagaaaaggtcactatgttttatttttataaggtggaaaaaacaatccagaatgataatcaaagccaaggtagaggaacttgttaaacactttaaaattagacttccccccacccccagcctctagtgtgatactttgaaggcagctgctacagataaactctggagccccagatggtggttgcctaatcctcatgagaattcatgtcctggaagcagctcttatctctccagacctgacattgtctgtgagcttttgctaaggagggaataatataaacatgctatgcatgagtttcacttcttgaatatgtcaaagacacaggaagttataacaaagtataaaaagaaccgagttcacatttattgaaaatgttgttatttaaagcacttgatgctagcttgtgatgatgagtgatggggtgcagtctggaaggaaaggcacagtgaactgttttttattttggaaacgaaaatgccagtctcagtgttatgatttcagagatgtagatttgtcattaagtgtgcagtacccagaataattcagttatttgatctaatgtaagaatgtaaaacaatccatcctgtaaatgaatgtcctggcttttatttcctatgcaggagtcctctctgtttcgaaagtcaaaacagcaattgcactattctggatttgatgttttgttaaaaaaaaaaagtttccgaaatctgatctgtgagatctgggccagtgacaactataagtggttgtctctttggcatagcagccaaatattctgaagtgaaattgtggatactttatctacttcaggtagtgtctcatttaatatatgagcagggatgttggcactgtcatcatgaataattgttgaatcacccatcacttgatgttatgactgtctataaggaaaaaggggaatttcccatcttataaaatgacaaaatttgtaattaaatgggaaactgtagtgttcctcataacaaagcctaagcctgtctttcaaatctgatacctctttctctaaataacctgttttccaaccactctggccctcttacttgtcctagaatctgtggtgccctgttatgttttcatatcttttttcattttatttcatcattctgcagagcccttcctcaaaaaagcttctattcatcctgtgagatgaatagacccagctaaaatatcacttgttctatggagtctttctcagactgaataattttattttctcccagaatgttacaaccagagtaatctttgtaaactacagatttgatcatgcctcaataaaaaagttttaatggtaattaacatttcatatcaaactcagtgtatcagcctagtggtctctgtcttcatttgtccagccgatcacatcttctctttgtcacagaacaacttgctgttatcccttcctctgagcctactttgtggtcacttttgccctggagtgctcacccgtctgtctattttagtcttcctcatttttaaagatctagagtctatgaggaattaagataatacaaagtggaaagtgttaggtgccaaaagagaaagaattcagttggcatacttatgttgtctttgcctcctctgttcaagtgggaggtcctaatgatagagcttgctccctcaaacttgtgtatattctgcagtctctagtacagtatcttagggaagaggtagaggaggagataaatttgaaagattagtaagaaagaactgagtaaaacctgggtttggttagataggataggtggtagagtgaaggaagaggcatcaaagactcgtgttcaataccttttttgcattgaattaattgatgattgacccttggtgtgtttgtcatattttccttgctctttgaaattcttttgcctaatgtgtgctaaagtagtctgaaacagactgcttaccacctgtatcttttagccttctacccactgagctccttttctattgcttcctatttttgacacatttgccacaccctcctccccacctgtattctctttttggggttctgtttcccatagtaatttaaatggccaatgaaaacatgccccagatgatactatttttcatcatgctctcctgccactttgttttcctgtttaaaagaacaaacagcaaaagaaaaagacacaagctgctagtttgtagcctagctggctctgatttctctaattcttgtctttgctgttctgtcattcttggtttctactgtttctttttcttttttcttttctttcttcttttttttttttttttttcttgagacggagcttcactcttgttgcccaggctggagtgcaatggtgcgatctcagctcgctgcaacctccacctcctgggttcaagcgattctcctgcctcagcctcccgagtagctgggattataggcatacaccaccacgcccagttaattttttgtaattttactagacacagggtttcactatgttggccaggctggtctcgaactcctgacttcaggtgatccacctgcctcggcctcccaaagtgctgggattacaggcgtgagccaccgtgcccagccctactgtttctttttctgtctgtctgtctgtctgtctttctctctgtctgtctgtctttctgtctgtctttctttctgtctttctttctttctttctccttttctctctgttgtccaggctggagtgcagtggcgcgatctcggctcactgcaagctccacctcctgggttcacgccattctcctgcctcagcctcccagtagctgggactacaggcacccgccaccacgcccggctaattttttgtatttttagtagagacggggtttcacggtgttggccaggctggtctcaaactcctgacttcaggtgatccacctgcctcggcctcccaaagtgctgggattacaggcgtgagccactgtgccaggactgtttctttttcttaccgcgctctgctcccatttttgccttcccatttgtgcgccaccattattaaatgctttatattctctcttttgattgggttacacgttcttttattcttcctattcttaatcctttgtgttttctctgttactttgtttttctaatttcctctctctttgttatctttttctgttttcttctccatgttcacttcctttttttattatctttcaactctcctccttttttcactcttcactgtgtatcattaaaaaataaaaacaaacccgaaaacaaaacataagctcttggctgtattcaggcctcattttgtgcttaatttccatgtttcctgttgctttaattagagctgacaccaagttttccccttcatttatgacttttcattgttttcctcatattccttacccataacaaatcttaaaaagctataatcccagctgttctccatcaccatcatgtccaactccatgtgctttctttttccatttttcttccagtgattttatgtatgtgtgtttattaaagtcctaaaatggggaaagtatggctgatgtgcaactgttgagtcctgcaatactggcttttctgcctcctagaagccttggtggtgagggtagaagcgggagccaattcataaaaagagagtgaagagtcaaataagaaatttgagggtgtttatagctgtctgtaaattatgctttgtggaaaatagagttggaagtgtaattgaggaacaggagtagaccagaaatatgaaccattgaaaggctctctgcttaaagatgcttatcttttcttcccttcccctgtgactcatacctactgttcattagaaatgcatgtgttttaactggtcttttttaaaatgaaaatgttctgtaatgttaagtcttcatcacactttgtgtgacttaatcagattgtgaataggaattttaattttgagtgtgagggaaggacagtggagggagagcactaatgggtagaaactctcctgtgtaacaggggctatgggagacaagggtatcattgcatgctcttgtaacttttgttttgaattcattgaattttttaaatgaagaagatattagtgagagtctagtttaatttatttattttataggttaaaaaacgatccagagagatttacttgttcaggtcttacagcttgttagtgattgaaaagggccagttcaatccattgtctttttaatgccatattatttttgtattacagtggcttcctagccattccttgacttgaagtgagaagaaaaggatcaaagagaaaaagagacaaaaagtaatatgtatatgtgcccttccaccttctcattcttttcttcctttattgtcagcatattataatattctggttttccatatctgaagaacagatcctgcttgtacggctaaggagctgttttattgcaagtattagaaaacaaaaatattagagctttattgaggaggaaagtaataatatattttaaaggttttctatgctattttatttgtgttcatcaaaaacacaagatcactttttgtgtagaaaatctgaatgggaagcaaaatctgactggagaatccagtggtccagagttactttaagaagtgaatatgtttaaatagcagggcccaatgacatgcatcctagggcacttaaagatgtggcagataccattgcagaggcactagcaaattaccatgcacaggatgtgaaaagggcagagtaatggtagggcttctaagccaccacttttgttaatctagtgctctttaccacctcccccaaagctatagaaacaaagaagctatacaaaactcatattatctgcattgcactgggctttgaagacaccacttatccagccataccccattttctcaacttacgcatcctaaatgtaaatccaatgtgggttttaagagcttgtataatgtctatggaaaatagagagtagaaatagagcttctattcacaagtgtttcttgaatcccattttttagagtacatttagcatactgacttatttgatcctctaagcaactcagaatgtctctgatataatgcataaaaataaagatagcacagtgtgcaataaaaaagtttacattctttggattcagtttgtattatcaatccagacctttttatttgtttgtttctattatgtaccttgtctgcttccacaaaaggatttgagatagattgggataacatgcatgtacaatagtaggacagctgaagataaagttaaagggtaaacagtcaagtgaggttacctcttctaggaacctgaggtaaaatgattattgtatttagatattaaatttagctctcagctttggcagttaaaaccaaagggaaacataatgaattgtttgttttaattgtttgtttaattaaagagaagcacattacttttaaccttaaatcatggctatttaaatacacatgtattatctctgtaaacttttttgtttgtttttagaggcagggtcttgctctgttgcccaggtggagcttactgtaacctccacctcttgggctcaagtgatcctcctgcctcagtctccccagtagctaggactcagttgtgagccaccatgcccagctaatttttaaatttttttgtagagatggggttttactatgttgcccaggctgatcttgaactcctggactcaagcgatcctcctgccttggccttccacagtgctgggattataggcgtaagccatcacgcccggcccttataaactactttagagtagaaaccatatggatccacgtttgtctccatcacagtttttagcacaagtgaacaaatggttgaatatgatttatttttaggaaagtaacttgttttggcactagaatctaagagaaaatttggcttctggaatcttatgaacaaaatactgagtaatgtaagttattgacaactatttcagccaaagttttacaaaagaagcaaaacagttctttgtatagcccttgcttttgttaaacccacagaaactacagggggcaactaggaagtgcagggtggtatcttgaacaaatgagattctgagtcgatggacccaaatctagtcccatatctgctttggtttctgtgacattggggaagctatataaccttactgaactttacagatttcctcatttgtaaaatagggctaataataattttctcaaaggcattttggtttgtttaaatgaggtaatccaggtacgcaacagtttcttttgagagaaaatatttttctttaaaaaattttttttttactttaagtaccaggatacatgtacagaatgtgtaggtttgttacataggtatacgtgtgccatggtggtttcctgcacctatcaacctgtcatctaggttttaagccccacatgcattagctgtttgtcctgatgctctctctccccttgcccctgcccagtgtgtgttgttccccgccctgtgtttatgtgttctcgttattcaactcccacttatgcatgagaacatgtggtgtttggttttctgtgttcctgtgttagtttactgaggatgatggcttccagcttcatccatgttcctgcagaggacatgatctcattcctttttgtggctgcatagtattccatggtgtatatgtaccacattttctttatccagtctatcattaatggacatttgggttggttccatgtcttttgtattgtgaatagtgttgcagtaaacatatgtgtgcctgcatgtttataacacagtgatttatattccgttgggtatataccgagtaatggaattgctgggtcaaatggtattgctggttctagatccttgagtaattgccacactgtcttcaacaatggttgaactaatttacgctcccactagcaatataaaagcatttgtatttctccatagcctcgccagcatttgttgtttcttgactttttaataatcgccattctgactggcatgagatggtacctcattgtggttttgatttgcatttctctgatgatcagtgatgttgagcttattttcatgtttgtcagccgtgtaaatgtcgtcttttgataagtgtctgttcatattctttgcccactttttgatggggttgtttgtttttttcttgtaaatttgtttaagttctttgtaaattctggatattagacctttgtcagatgggtagattgcaaaaattttctcccattctgtaggttgtctgttcactctgatgatagtttcttttgctctgcagaagctctttactttaattagatcccatatgtcacttttagcttttgttgcaattgcttttggcgatttcatcataaaatctttgcccatgcctatgtcttgaatggtatcacctagattttcttctagggtttttatggttttgtgttttacatttaagtctttaatccatcttgagttaatttttgtatgaagtgtaaagaaggggtccaatttcggttttctgtatatggctagacagttttcccagcaccatttattagatagggaatcctttccccattgcttgtttttgtcaggtttgtcaaagatcagatggttgtagatgtgtggtcttatttctgaggtcactattctgttccactggtctatatgtctgttttggtaccagtaccatgctgttttggttactgtagccttgtagtatagtttgaagttaggtagcatgatgcctccagctttgttctttttgcttaggattgtcttggttatgtgggctctttttttggcttcatatgaattttaaagtagtttttttctgagataaaataattttctgaactaagcatgggcttttcagttaggctgactttggattttgctgtttgatcatgggcaaagcacttaacatgtctgctatggtttgaatgtgtcccccaaaggtcatgtgttagaaatttgatccccaatatggagatgttgggaggtgggatctttaagatatgtttgggtcatgagggctctgccctcatgaatggattaatgcagttattgtgggagcgggttcatgacaacaggaaaagtttaaccccatcttaagtgtgctttagcacctgcacagtatgcaggttaattctcttggcaagaatcttgcccttaactggtttgtttacaacaatgccaacagcgtgcagggtaacattgtagactcttccaggtttgccatggtaacatttgtgaggtgttcctttttgaacagtacctattcccttgatgtctgcagtatcacctttcttgtagcttcacgtgtatgtggccaaaagaacaactcttttctaaaaggcctggagaacattatcaggttcctcccttactagaaaatgagagtgtcccacctgaaaaacaactagtatactttaatacactttaaagtgactacataatatttcacagcttagatgtgtcatggtttatgtcatcttggctctgttgatgggtactttgtaagctccactttttttgagacggagtctcgctcagtcgcccaggttgcaatgcagaggcacaatctcagctcactgcaacctccacctctcaggttcaagcaattctcctgcctcagcctcctgagtagctggaattacaggcacatgcgaccacacctggttaattttttgtatttttagtagagatggggtttcaccatgttggtcaggctgatctcgaactcctgaccttgtgatccacctgccttggcttcccaaagtgctgggattacaggcatcagccaccttgcccagccagctccactttttttatttggtgaggaaagttgaaatcatgcatttgtacaattgtggatttgttggagtttttttttttttctttccgcttagtcagttcctaatttgtacattttgaagccctattcttaggagtattatgatattttggtgaattgaccccttagtcattattaaatgtttctctttattcctgacaacgtcatttgttctaaaatctgctttttctaatattaatataggcagccactcttgctatcttttctgccattttttagttcttttatttttaacagatatatgtctaaaaggtaggttttgtgtggaaagcatgtaggagggttctttccctgatttcaagtagttccttccatccccacacaagagaatagtactaagccagaaaattgatgaaaccaatcttcagctttctttcccctccctctcttcccctcccggctttctccctcccttcccccttccccctctccctctccctcctcctccccacttctctctcattcctcttccctcccgccttcacctttcccgcttcgttttggcagggtctccctctgttgcccaggctggagtgtggtggcgcgatcttggctcagcgcaacctgctggactcaagcaatcctcccacctcagccccccgagtagctgggactacaagtatgtaccaccacatccagctaatttttgcattttttgtagagatgggttttgcccatgttgcccaggctggtctcaaactcccgggctcaagcgatccacttgcctcagcttcctaaagtgttgaggttacaggtgtgagccacgatgctgggcctagctttctatgtggccagtttctctggtatttttctctggaaattgcagcgactttgacctgtgtacattctgtgatctgtccttgacactcaattacgtagatggggtctggtttgactacctcctcccttacaaggtggccaggaaaccttctcaatgtaagattcaacttacctatttcctttctctccaggatcactattctgccatgtctgtgtgtctaaaagtgtttcaggcagaggcagggggatctcttgaggctaggagtttgatatcagcctggataacttagtgaaactgtagtctctccaaaaaaaaaaaaaatcgttggtcatggtggtgtgcaaccgtagtcccagctactggagaggctgagaagggaggatcgcttgaacccaggagtttgaggctacagtgagctatgatcttaccactgtactccagcctggatgacaaagccagactctgtctctaaatgaatgaatgaatacagttgtgtcttcttattgtttagagttgaagtatatgtagtccttgttactccatcataactgaaagtgtaattttgctttcattcttaaatgatatatttggagcatataatctcatttgaaagctttttttagcacttgcaatgtgtatttctactgtgttctggcatttattattttttatgatgtcagtagtcattttttttctatacgttaatgtgtcatttttctctgccttctttcaagattatttctgtatttaaactttctagtagtttgtgatgtgcctggttgtacattttttgtatttttcctggttggagatcaaacttttatttattatttctccagagtttttttttttttttttttgccttgtgttcaagactaaaacttttttcttgcttcattttttccttctggtcattcttgtattcctgtaatacatgtggtaatccgttgctgtgtcctacagtttatgatgctctgtttaaaacaaaaaaaaaatcgattttctgtttgtcggatcggataatttttactgatctatgttcatgcctactaacttttccttctgtcatatccaatctgctatttagcccattcagtgatttttaaaaatatttcagatactatattttctacttctaaattttccattgctttaaaaaaataatttctatttctctggtgtgatttcctatctgtttaatcattgccagcattttttttcaaattaataagttttatttttgatatttatgttcatcgttttatcactttttatgaccgaggtttagtgaatagttttaagtttttgttaagtaaattagtaggccctcctgtactctggccctcctttctgtgttagtggtgttcacatcagttttttaaatgaatgatttggtgctcctggtttctccagtgtattttttgttacggcttctgcttttgtttgtttgttttcagacaaggtcttactctgtcacccaggctggagtgcagtggcatgatcacacatcctcgacctcctgggctcaggtgatcctcccacctcatcccctcgaatagctgagattacaggcgtgcaccaccacacgcggctaatttttgtatttttagtacagatggggtttcaccattgttgcccaggctggtcttgaactcctgagctcaattgatccacctgcctcggcctcccaaagtgttaggatcacagacgtgagccaccactcccggcctattaaagcttctgaaacacagtctactagattgccttcaccaaccctttctcacttctagctttaataggcaggagtgctgcttcagcaaaaagaagggtgagagcaagtttagaaatggcagtgttgaatgaggtgaaatgagaataggtaatgtgtaacagatcatattgagtgatgattatgggctggcagcatctctagtaatcctgagctgctttctggtacttacatctcatgtccacaccagcagcaaaacttgtcactttaagcctttgaaatatacttagaatcagaacctggttacttcttacccatctactctgccatcactttgttccaattcaccattatcatagtttgaactgttggagtggtgtctagatttttgttcttcatttttccaccaagcagctagagaggtccttttaacacataaatcagacaatgtcatttctttgcacacagctcattcatttcatggcaaaaaaggctatatatgatatggttctttatctttctgatcttatctcctaatactatcacctatcaatgctctgcttcagccacattgacttctttttaaaaaattttaaaaaatattaataactttattcttttctgtttttactggggctggcataataaaatacaaccgcaattttttttttttgagatggagtctcactctgttgcccaggctggagtgtagtggtgcgacctcagctcactgcaagctccacctcccaggttcacgccatttgcctgcctcagtctcccgagtagctgggactacaggcgcccacaaccacgcctggctaactttttgtatttttagtagagacggggtttcaccgtgttagccaggatggtctcgatctcctgaccttgtgatctgcccacctcggcctcccacagtgctgggattacaggcatgagccaccacgcctggccattttttttttaaagttccaagtatattcctgtcttagagcttttgcaggtatcgtgccctctgttgtgtatgctttccaacctcaatatttacatggctgtcttcctcaattttttcaatcttgctcaaatatcatcagagagaattcccctcacctgtataaaataacatctttgtctacccttttcattttctctcccccttttcttaatgttttatatgcatatgtatgtatacacatgtgtgtatatatgtatttaatggtttcactctacctgttaaagaagaaccctttttgtttcatttctgcatccccagggcctagaaacagtactcaaatacttcttgaatgcatgactgaataaactggataaatatttgtgtttataagggaaatcagtgggcatatagcagcattaggactctggagaagtgtggagtagttaggtaggggtgtgttctggagagaataagttactggagtggacatgttcatgctaaagattatttgtgggcagattacttgggcagatagtaatacatgaagtcagaagcctttctggattattggtttctctttgaatccaccaaggacagtttttttttctcttcatttgaccccatgatataggattaggtttctttctttttctgtttcttcttcctgtttttttatttatttttatttttttattttttggcttcagagtgagcaagctttctttcaccctttcttggctctctggtttattgtcatagccagtcctttcctgccagcttgattgtcttccctctagtggctggctctcatctccctggcttcttttttgtcaggaagggtgttgtgtatgtgcactttatccctgaatgctaagagaggacttgtcaaactgacagttggtgtgactgctggctgccacttgacacggagaatgacatctaaaagtctgcatttgcagccgtggaccttcaagagactcatagaagaggctgtactttttcagtgagaaataaccacatctatgaacatttagtatttataatattaaaatgtatcctttcactaaactatatttagccctcatactgttcatcctatcttatattactgatctttttcatgtgataaataagattatgtagaaaacaccaagatttttcaggagtagtgtataataatgaacaaggtttatttcatttgtttcttgtgtgcattacatcattcatttccctcccattttgacatctgcaatggctccctgatatctactaaatataactatttaaccagcatctaaggcaattcataatatgccccaacctactttttaaaatcttatttcttagtcccctcacagattttctctaccctattccactggtttctaaacaggttttttttgaagcctcttaggcattcccttggaaaggtaggggtcaagtcaccagatttctatcctcaacctttaggctttaatctcttttgcatattttggtttctttaaaatagggctctataactaaaagaggtttgaaagtcactccatttgtctggtcagatgattagtctctatgtctttcagtctgtctctgcctctttctcctgtacacatactccctagggccttatacttaaacattttcttgtggctttacttttctgtgtagttccttctgccaggaatgctaatgtctccagttgatcattcatatagtgagttttgctggttagctggaacagtgtgacagttttaaacattttatttttatttctaaagaatttccagtaagctgggaattaagtgtttcgcatgatcaaaacgtttagggattaatatatgttttgttaccttatgacattgtatgaacgatggagaaagacagatttttacaaatgttagaaatgtaaagtcttgaattgggtcataattttttcaatgaaggtgtgaagtttaagtttagtgggagagagtgattcagcatacatatggttttacttgtagggttttttggtttgtttgttttggggttttggttttggttttggttttttaataacataagctgtatatgcagccaagatagattacattatacatattatttttcttccatctttatcatcaaatactgagttctctcacagtgctttgattcacactagagatttttttttatttataatgcagataagtagtatgttttgtaatgatagttctcatttctggatacttttaaagcttcagttttcatgtcttagtaataggatgttaattatgtgatattattttatctttaacatttttcactgtagaatattaatatggaaatgttgctcagcagtctgcaaaggactgttgctagtgtaaaacattaagtcatttcgcttagaaaatctgtggctagggccgggcgcggtggctcacgcctgtaatcacagcactttgggaggccaatgtgggcggatcacgaggtcaggagatcgagaccatcctggctaacacggtgaaaccccatctctactaaaaatacaaaaaattagccgagtgtagtggcaggcgcctgtagtcccagctacttgggaggctgaggcgacagaatggcatgaacccggaggcggagcttgcagtgagccgagatggcgccactgcactccagcctgggtgacagagcgagactccgtctcaaaaaaaaaaaaaaaaaaaaaaaaaaaaaaaaaaaaaaagaaaatctttggcaaaatcactggggatgattttacctcccaggatcattttgataatgtctggagacatttttgattgttacaacctagtggcagctggggaggcggaggaggcactactggcattcagtgggtagaggccagagttgttgctaaacatcctgccactaaataaatgtttttgtggcccaaaatgtcagtagtaccaagattgagaaaccctgagccaatcttctaccatacctaaaaaaaaaattttacttagaaatattttaatttgtttgtacaggcatactgatttagtcagccattatcctaatgattcctttaaaaaaatttttggagtgggaaaataaagactttttctactttagaaaagagcagatctttaaaaaaaattgcttttcttaagggtgtaattgtgaaatagcttgctttctttttctctttctctttcttttctttttagttggctatctgaatcattgagatgaactgaaaattagatcttagcaaataattctgccaacagtggaactctaaggctctggtatcagcttaaggcagcccagccttacttcagagtccccatcgaacagatcgttcaccttgttggatgaattgcttctctctcaggattaattaagaaaatgttaatacttttcttcctcttcttgcttccttgacccctaaacacagtgttaacagcttctctacctgtacatcaacaatatatcagtgtatacaccttctgaatccttctatatctttctccatgcttgtccaaagaacacatgcacagtagttttggggtcattgttttttttacagacttctctgagacatacctttttcacttttactatgtaagtttccctggttgatagagggcttgactttttaatagctgtaattatattctatagaatagacagagtggatgttcggaatttactgaactcttcgcttagatattcaactgttttctgttttttaaaaccattttaaacaatattgcaaatacatgtatacttttctgctgaatttttatttaccaataaaattggtttagtaatgtttagtaccaagaaggattaatgaggataaccacaaattatttgagcttcaactttttttgaaagttgtatttgaccaaaaggtccttcctccacacaattttgaagataatgtaattactgctcaacctgacctggatagtgttatttccttgtttaaagggggcaagcaaatagttttagctaaaatgacaatataacagaaaacctgtagttccacaggatgaataaagacagacttagaaattatattggtaaatatgttattttaagaaatattagttaaaatttcaaaagcagatcattcaaggcagcaacagaacccttgttagttgctttattgatacagggatcctaatactgtctgaaaacttttaacaaggtgtcaaattcagaatatgctttttattgttagtaatgtctatttatctgatgattcatacttagtaaatgcataaatattgagtaaatgttttagattcattgatctgcaaggcagatggtataagaatagcctggatacatgaattctaatcctacttgtgctgttgttgactagtaccaatatgccaagttttcacctcctgagagtgcctttcctttccttattgtaaaattgattgtttctaaagtgttttgattataaaaatttctgatttattatcttgcacattgttttaaagaaatggatgataaaatcatatacttatttaatattgcatatttccatttccctggctcagtgcagagtaaatcaacaacattgaaaagctagttgggaatcggagatgatagatagctttttctaagtttttaggtccttaaccaatatttggtatgagattcgctcaatggtgtgtatgtgtgtgtgtgtgtgtgtatttgtgtgttagaattcatcagacaagaaaattaatttctattttagatattttacaaagaatcacttattcctaggattgttccccaagacatctgaaatcttaatttgcatatctatgtggcaaagctttaaatttaagttatccagtagtttaacataaaatcatactgaaacactcattaacacatttgagtatactatgtaagttcagaatataaattacttagtactgagccatgctgcattaagttaatctttatgttgttagattatttttatgttaaggaaacattatcccagattcggtttttctagatacatagaaagggacatactggatgtttttattatgttgaatgaagctgtgcattgaagctattatacttaagaaacatttttatgacagtttagctttttcagctgctttcattatgttgtgttttttagaagtctattcagggtatttttaatgtcttaactaacaatatgatttttgagctatgtttctgtcgtgttgtttctcatcactatatggatagaattagttatatagtaacaatgcctctgtgctcctttaccaccacaaaatacttattttattttaattcttatttattagttgaattatttattacattaatttaattcttattttctttgatgttttatgaagcagagtttattttcataattgtgtctcataattctgtacaataattgttggaggagtatgtttagtgaaaacaaattaaaggtggaagagatactattcttcctcagcattggtaataatgaagctcaatttcaagtcatatacttttttgttatttgggtattgaatatcagtttttgtgaaactaatattgcaacctatacagttgaagaaagagatatttctgatgtaatcttataaatcagggtgtaggaaaataaaaactttattttgtagattaaagctcaccctatgttacattaaattttaataacattgatattctgcttgctttatgaaaccttttattacaaacagttatgaatatgaacatctcatttgactactgatgaacagagggaaaaatctaaattaaaactttaaataccactatttaattacccaaatggctttgactgtgttaaagagtgtctgggattattctgtttttcaatttgttttaatgcttccttggtaaaagctgatggattcccaggcccattgctgtcactgatgaactatataaagataaatgacattatggtaaattccacttaatgacacatttttaattttcagaacacagacattttcaggctagtgaatgaaggctaattacctcaagatcagaacaaaataactcctcatttcgaaagataatagaaaagaaatgttgcagattaatgatgctatttatctttaaaggaaaaaaattttatctttatccagatagcatagctccctaaggagcgtggttataaaatgaatctgaagtcgcaacttaataggttattaaaattgtgagtgcaggctctcctgctttagtctttccataaatttaaattgaaggtctgctttattcaaaaaggagcagcttgtttatgaggccagtgggagcagcacacgttactgacaaaagatgcacttaacttcattctaatgtcttgcttctttatttctctgaatgactgtcacctatttgaaaaagtattttgaaattttgttaccactcttaattgatacctaagtggaagggccatacttagacttgtttaagattaaaataaaaatgaatgctgtaaataaaagctgtaaagcctttactgcacacatataaatcaatttgtaattgatttaattgtgtgtgtatatttttaaacattttaattttgttatataagaggaaaatatcttggcctatgaggggttgattttgtggtcacagttggaatttatgtaggaattgttcaataaatcattattcacagttaaaggattagcaataatccttttgctacactcccacacaactaacaaagtagtgactcagagaatattacttgatcatagaggctttaaactgttcctgacatcctaaactcctgtcttttgctgtaggtaatagaactgttatttctttactaacgaggtcatatagcattttctgtaattttcattcttgtctcttagaaagtacatgaattgcctgtatatggttcatatttctgagccacagaaaaatgtttgtgagcatgaaaggaaatagttgttgcttgcatctgatagaaattttattatattattgtgagacattattttatttatacctttccaattttatttgctctaaatggttagaaaacatatgtttatcttggccatacgcggtggctcacgcctgtaatcctagcactttaggaggccgaggtgggcggatcacttgaggtcaggtgatcgagaccagcctgaccaacatggtgaaaccccatctctactaaaaatacaaaattagctgggcatggtggcacacacctgtattcccagctacttgggaggctgaggcaggagaattgcttgaacctgggaggcagaggttgcagtgagccaagatcacaccattgcactccagcgtgggcaacaagagagagactctgtctcaaaaataaataaataaataaataaaaagtgtatcttatagggagagcattatctcattgcccatggcataatgttgacataaaattttctattaagacatttcttagaacagccagaaaacggaagtctttgtaattttaattgtagtatgcatttgattttatgttaactgttatgaaagcctcttatttttaaaatgttcttaagtagttttgactctgtagattaaggataatttctaataataattattaaatttgaaataagatattcatatttactcaaaactgtaggaaaatactataaaatgcactttatcctctatctcacttttctttttatttaaaatttcaataatattcctacaaggctccctttattctttatttgctacaggtgtatctatcttacagtgacttaaggagagaagctgatgagaattctgaaggttatgttttatagttagaatccttcagtgaaaacacagatgaatattttttcttaatactaaaataatgtgtttatataattaccttatttctaattcttaacagtatccgtgaaaataaaaagaaatgtttcatgcatatgagagaaatttcagcaattatttgtatcttctaaattcatttttaaatgtggcaagcactgtgtctataagcctatatgttatttcacaataatttttggaaattttctgttttagtctatgtgagtcatgtaaaaattataaaaacttttaggaactcaagcagccttcaatcagtgaaagaactgtttagcatgataatacaaaaataaaacctatagtattttggcaccttataaagctcccctttcgcctcaaatttgattaaagtggatacttagaatgtatgcagtacatgttttccacatggttattatccttcagctgaaaaaaaatccgtgtgattattgttagaataatatacactaaaatgttctagagcattaataatattgtgtccatgctcttgtctaatttttcccaattattgctattttaaatttccaacagtatcttgtacttaatcttcatatgtgaggatgagtttattctaaagacatttacacacaacttagagaaaatgtcagagattgtcagggttatattttagagtcagaggtaatcctactctggatatgaagataaatcattttttaaaatgtgccagttttctcttcagtaatgatgatcttgaatgaatattctgtttggaaattctctgcttatggcctatcagtagttattcctctggatatatactttggaaattctattttaaagcatgtcattaattctttagacttaatcatcttctagttctttttgctggactctgatattaaaatttagcagtagcctatgaaaaatcgtatggaaaagagacaaatttagggccattaaattcctaattatggtttcataacaaggatcacgagctatttactgtttacctccgtgacagttctggaattttgttttgattgtcaagtagcagatagatctaagtataaagattcttgaaagggcaaaaaaaaaatctttgtggattcaaatcctcaaatccaactacaattaaataataaggccttatcagaagttatgaagcataataaagtgctttgtctttccacttgattccttactgactccccaagttaactattatgggttcatggttaaggcacacaatcaggagtgaagttctaagttttaattttagcactggctcaagttttcataatgtatataaattcattcccccctgtgtttattttcttacctgtaaaacttaggggtttaaatgcattcaaattgtgtcctgggccaggcgtggtggctcacgcctgtaatcccccagtgctttgggaggccaaggctgacagataacttgaggtcaggagttcgagaccagcttggccaacatggtgaaaccctgtctctactaaaaatacaaaaattagctgggcgtggtggcgcgcacttgtagtcccagctactcaggaggctgaagcaggagaatcgcttgaacctgggagatagaggttgcagtgagccgagattgcgccactgcactccagcctgggtgacggagcgagactcctccaaaaataaaaataaaacgaattgtatcctgcagagctttagagatgggaaagaaggtgttagagaggggaacgtctagtgggcagctctgtaactctgcagtcttttttctccttccctgcttaactagagcaacatttttttttttttttttttttgagattgggattctcacttgagccagagaggcggaggttgcagtgagccaagattgcaccactgtgctccagcctggtgacagagcaagattccatcccccctaaaaaagaaaaaagattgggattctgcttaaggtttgagaaaaatgttctttaaaaatgaaaactaaaaacaaacagaaaacaaaagttttaaaaccacttccagaatgggccaggaattgtcaaactctggcccacaggccacatctggcccaatgcccaattttttgtaatgaatgtttctttggacaaagccacgctcattcatgtacatattgtccattatgcagcagagttagtagttgtgacagagactatatgacaagcagaggtcaaaatatttatctagcactttgccaaaaaagtttgctaactcctgcactaggtactcgctcactaattttatacctgaaaattaattccttgagatggcttaacttctgctatatgcacttctccttcttagactgcacactaattcatggctaattctttttgttttaatgcattattaaggattaatcttcagggattatgtttaaccatttagcctctgtatttcctggcactcttttaagaattattttgtgcttattatttttcctaagggatataaaaataaatattgaataggaaatggttcatagcccatagccagttggattggtaaaattaatgcatctgaaatgattataggacattttaagatataatgtggtatatttagaatcatgtgagtccaaaagtttaaattgtgtaagtctaaaagtaagtttaggaggagttcagagaaaatcagtgtggctggaatagtctatttagcttttcttattttattttttgatgaaatgtaacttgaactggtctctgaagactaggcagaatttgaatagatatcaaggacgtcaggacattccttgggtgaggaaggtttagtgaagggtggtgaaggttattgagtccatgggagaagtgaaaatgaggtgtggtattaataaggaaagaaagggttgattaccagatgaaagagtttgatgtggaaaatacttgtaaatcactttatgtttctgagtaaggaagtaatgaaacatacgtacaagtaatcagtaagacttgttagacagctgttgttcagtactatgctcagtgtttgagaagctatgtaggatatatattgtgatcatgtgttttcagggatcttatattctgattagactgttaagattggtggtcagtcaaaatggaagggcatcggccaggcgtggtggctcatgcctgtaatcccagcactttgggaggccgaggcgggcagattacttgaggtcaggagttctagaccagcctggccaacatggtgaaaccccatctctaccaaaaatataaaaaattagccaggtatggtggtgcatgtctgtaatcccagctacttgggaggctgaggcaggagaataacctgaacccgggaggcgaaagttgcagtgagctgagatcgtgccactgcgcttcagcctgggtgacagaataagactccgtctcaaaaagtaaaaaggaagggcatcacatgatattgccaaatgtgagtgattgatagatagtactgtgggagtttgaaagagcgagaaattactgagagctgttggaatcatgaaaaatttcttgtagggctagcatttttgctgggccttgagggataaggaagactcgtgaaggtatagtttatataagcagacagaagggtattgtgggcagggataatgaagtgagcaaaggtatggagataaaacattgttttatatgaagaacaatgaggagagaagtctgatttgttcaaaattgattgaaagatacagtgataaagctcaaaagtaaggaattctgggggcaattttgtgaagaccgaatgcaagttggctaagtgggatttctttgttctcttgaacttttccaaaattttttccccacacaagtagtagagttgtctcttcaagcagaatgttgctaaataacctccatgtgtaaaagagacaaacgcggcgttgccttaatcaacttgggttgaagaatgtggagcttaccaggttccaccagtgtagccacagaggcacatcagtagcacccttattgccctgaggaacagtttgaagaattttgcactaagccttaagaagctgttaaaagttttagggcaggcctagagaaatactggtaacatgattaatccactggtatgcaggatagagtgggaggaaacatgggataagaaaacgattatagtattagagatttaaggacctgagtaaggatggtgttagtaagaatagaaaaggagaaagaagaatggcctttcaaagggaaagatccataatgtagcagctattataaatgacatcaccatggttaaatatttgaataaacaatggctatggataatcatgtagaacactggaaatagagaaaatattaatagcaaagaatatttaaggcaaggatagtatgtagagacaaagtgtggaacattttaaggcaggaatagtcaatattgaattccacagagactatggaatctaattttgatttgaggcattggttggtgagtgcacagtttctaaatatacaataatatggtttctctgaattgagcatgatagtaactagattaagatgagtaagatttgaatagagaaagtaaactcaagaaaaagtcaaagaaaaaaatgatggctctgttgattaaatacagggaatgaatgggaggaacatgaaatacgagtactaaaaatgatcttagtggattttttaaaaagtttttttttgtaaactaaaggtatggaaactagtggagtatgtaaatgtgaaaccagtagttattcatttactcaaatatgttgtgtttgctctgtgtaaggcattgtgctaggttctataaaagattcataaagattcattttcaatagcaaaaaaaacagaaccttggaataaacttaacaggaaatgtgtggagtttatgaaaaatactataaaaatgaacagagggatagtaagggagagttgatcagatggaagagcatacattttaagtggatgaagagacattattgagatgccagctttccacaaaataatcgataaccttgggggattgttttatggcttgacataatgatcttaatatttgtctgaaaaattactgggagattggcatagaaaattaaaaaaaaaaacaaatggtgacgtgtcctgccagatattaaatttgatgataagcttataacagttaagataacatagaacaggccaagggataaacagaccagaataacagagtgtgtgtgtgtgtgtgtgtgtgtgtgtgtgtgtgtgtgtgtgtgtgtgttttcaagtataaagaagagtgtagtacattatacaggtgagatttttaatttggggaaaggatggattagttagtaagtgatattggagaaaagttacatttctgctccatactatacatcaaaataaattctagataatttaaaatttgctattaatattaaatgaaactataaagtactagaaggaaatgtgagtgaattattttatatttcaagaggacttcctaagtatgacataaaaagttagaaactatagttaccaatatgacaagaatgttcaagaaactggtaggacttaactacatctgcatgaacaccttttgaatgtgaacaatcattaaaaacaaaattgagaggaaacagcaaaaaacccacaaactatgtgattaataaaagggcttttagtctaattgtataaagtacccttaatctaattacataaaatagtctaagaaaccagtaaagaaacgctctagtggggaatgtgggccaagcataagaattagtggttcctagaagaaggaacataaggaaaatgtttaccatcactactaataaaaatctaagtgccatttaaatctgttaagatggcagatcatgataaaatgagcattcgtatacatatatatatgtgtgtatgtatgtatgtatatggctatgagttttagtgactttcttgctgaaaggcaattgggccatagttaccaaaagtcttaaatgtggctactgtgggcacactgcctatgaggtagccctgctacgcaaggaacagtttaaaaaaaaaagtcttaaatgtaatagatacttgtatttgaatgtttacagtaggattattcacaatatccaaaaggtggaaacaacccgtgtctattaaaagatgcatagaaaaccataatgtggtatctacatacaactgaatgttactcagccattaaatgtaatgaaaatctaatacatggtacaacatggatgaaccttgaaaactttgtgttaagtgcagtaagcctgacataaagggacaaattttgtatgagctcacataaatgaaatatcttgaataggcagattaataggtaaagaaatatatgaaaggttactgggggttgggtgggagaaagaagttgggggaggttacttaaagggtagtttctccttggtggtgataaaagtgttttgaaaatagtaacaatggttgcacaacattgtgagtataattaatgatactgagttgtacattttaaaacggttaagatgacaaatcttacgttttatatattttaccacagtaaaagagaaaaatgacaaaaaataatgtcacgtttcacttacaggaatttgttctaaggaataatagagtgtatgtaaggtctttactacagagttggaaacaacccagatgtttaatagtaatgaattgtttgctgtggtatagtctataaccattgacagtgactgaacaaatatttaatagaatattatgatttaacaagtgaaaatataggtagtaaaacagcatgcacccatttttcatttaaaaaaatttatgcctaaaaaagacaatgttctattaaaaattgaagtggtcttctttgggtgataggattacagaggtttatcaaatgcttgtttataccctgaaaatgtaaaacttaggttctggttcttttttatttttattcttttaaggtaaaaggagatttttgtctttaaatattaataaaggggtcacaaacagtatattaattttttaaaaggaaaaaactttttataattgattataccgcttgcgagagtttgagatactcttaagaattcaggttaaacttacaaaatcatttttaatacagagatcaatgaaaaattatccaaagacattagctccatgtactggtaattgttaccaaaagccttaaagtgtacaattttttaaaatcagtgtggcaactatcccaggaattggaagtctgtgtttcttcccctaagattcaggtcatgtgtgtatatgtgtgtattttaatttttaaagaacataggagtaatgtagactcctacttctagccatgacagagtcccagggactgaatttacactcctgcttcaaactagaaaagcagtctacaaaataaaataattgtttatagacattggataataaccagtataggacactaatcttagaagggaaataaagtgacttctgtagctcttcccaccttattgcctagagacagttttggtacagggaaggcagacatactgagatcttgggcaggtggcatcacactacattgaagagatagattttgaagtacaaggaggccaaggtgtctagaatttgtggataaaattactagagagtagtgagatgcatcaggacagaagtgatgagatccacaaatctccacaaaactcaatgaacctcttgagagtctgagcgaatactcatctgtgcatgtgtgacaagaaattacccaaggctgaagaaagaataactggaaaggagcaggtgtagcgatccgtggagctcatgcgaaacatttacacctatacatttctctcttagcagggctttcactgcattccatgttttggcagtaaagctgaagaacatttaagccagaccaatcaggaattcagagaaagaataattcattttatccctggattattattgaattattttattcctattgtgaataattctataaacattcaagtacagaattgaagaccaatcaggaataaaatgaaagaagacataaattaccatcattagtaatgcaaggaggaacatcacacagatcctaaattttatggaaaatcaataaattcaataacttagatgaaatggacaaattccttgaaagttaaaattaagaagaaatagataacctaaatggtcttattaaagaaggtgaattgttagattaaaatcttccagtagagaaacatccaagtccagatagcattagtagtatattatatcacactttaaagaaggaataataccaattctttacaaactcttccagaatatataaggtaacacttccaaactaattttataagatttgtattactattacacaaaacccaggcaagatactaccagaaagctacagatctagatccttcatgaatatagacacaaaaaattattaacaaaatattaggaaatgaattatgtaatatattaaaagattaatatgtcatgatcaagtgaagttcattctaggaagaaaggttggtttaacgtgaaaattaagcaacattatttactgtattaacagactaacaggaaaaaaatgttttcctcaatagatgcagataaagcattttacaaagtttatcacctgttcatgatagattaaaacaataaacaaaagtcttgcaaactaggagtacaaggggcactttcttaatccaattcaaggaccttttaaaaaacctgcaactagtgactgaatgctctcactttaaaactgggaagaagacaagacagtcccttctcagatacatttctacattgtactggaagtcaattgtctggaagtcattgtactgccagtgcaataaggcaataaaaagaagctgaaggcagacgaaatggaaagaaaaatattaaatcatctttagttgcagttgacataaaaatctagttagaaaattggagagaatctcaaataagctactggcactaataagtttagcaaaattttttgtaagaaacaaggtcagtattcaacaactaattatatttctgtatactagcaacaaacaattggaacttgaatttttaaatatgccattttcacagtatcaaaaaatgtgaaatattaatagtaatcatagcaaaaatgtataacacttttgcagtgaacactataaggcaatgcagagaaaaagaatctaaataaatggagagttatatcatgttcatggatgagactttatatttttaaggttgcaattttttccagatgtatctatttattcagtgcaatatcagtcaaaattccagcaggctttaaaaaaaacttaagttgaattttctaaattgattataaaatgtatttgcaaatgcaaaaggatctagaatacaatgattaaaaccgcaggatagtattgtgaagattagtatgtagatgtatgggacagaaaagaatctagtagatttacataaagataccaaacatttcagttgggaaaggacaagcttttcagcaaattggtgctggaccagtctatagccatatgccaaaaatgaaccatatctcttccatcacacaacatacagtaattaacttgggacatactacagatttaaatgtaagaattatatgaaaattctaaaagaaaacaggatattggctaggcacggtggctcatgcctgtaatcccagcactttgagacaccgaggcgggtggatcacgagctcaggagatcgagaccattctggctaacaaggtgaaaccctgtctctactaaaaatccaaaaattagctgggcttgggtggtgggcgcctgtagtcccagctactcatgaggctgaggcaggagaatggcgtgaacctgggggcggagcttgcagtgagccgagattgcggcactgcactccagcctgggcgacagagcgagactccgtctcaaaaaaaaaaaaaaaaaaccaggatatctgaataccttgggttatatattttaatatttgatacaaaaggcacaagctataaaaagaaaaatataaaatttggacttaatcaaaatttaaaatatgtagacttcaaaggatactttaataagctgaaaatgcaagccacagacctggaaaaaatatttgcgaaggatttatgtctagaatatgcaaagaactcttacaactcaataataatgagatgaacaatccaagtaaacatgggcaaaagatttatagatatactaaaggagatatacaaatggcaaatataagctaatgaaaagatcaaaatcattagttattaggaaaatgaaacttaaaaccacaatgagatactgctcttgtccactagaataggtcataattgaaaagatcaaccatttcaaatatatggagaatgtcaagtaacaagaacttgtatacattgatagtcataatgaagaattacacagactggaagagtcttttctaaatatataccttaccatccaacccaggagttccattcccaggtatttacccaagagaactgaaaacatgtccacaaagtgacttgaacctgtatattcctactagctgtatttataattgcataaaaacttgaaataacctgaatgttcgtcacctagtaaactgataagcaaatgttgatttatcaatttaaaggaacaaattactgatgcattccacaacatggaggagtctctaattcctttttctttctttttctcttttcttttcttttttttgagacagtcttgctctgttgcccaggctgagtgcagtggggcacgacacagctcactctgcctcccaggttcaagagattcttgtgcctcagcctcctgagtatctgggattactggtgcacaccaccacacccagctaaatttttggaattttagtagagacagggttttgccatgttagccaagctagtctcaaattcctggcctcaagtgatccacctgcgtcggactctcaaagtgctgggattacaggcatgaaccacagtgcccggcctctaattctttatactaagttattgaagtcagatacagtggactatgtactgtattaatcttttcctatgactattctataaacgacaaaactaatgacaaatcagatcagtggttaccaggtttaaatggaagaaattttattatgaaaaagcatgaaggaaccctttggaggcatgaaaatgttctgtaccttaattgtgtagatattacattataaattactttatgcatttgatttttcaaaatttattgtaaagttctgtaaattataaaggtgattttatttatttatttttttttttgagacagggtctcactctgtcacctaggctggagtgcagtggcacagtcgtggctaactgcagcctcgaactcctaggctcaagtagttctcccacctcagcctcctgaggcaagcaacaccatgcctagctaatttatttttattcttgtttttatctgtagagacagcatttcagttttgcccagactggtcttaaactcaagtgatcctcctgccatgccttcccaaagtgctgtgattactggtgtgagcccctgtttctggcctgatttttaaaatctgatgagaaaatatattgatataagaaaatatgaatttttatatgaatataaacatgaatgcttatatgaatatattcatataagaaaatatatttctgcatacttctacccaatcacgatagttcaattataatatgtgaaaaagagggaacttttttttttttttttttgagacagagtctcactctgtcgcctgggctaaagtgcagtggcgcaatctcagctcactgcaacctctgcctcccaggttcaagcagttctcctgcctcagcctctcgagtagctgggactataggcgcctgccaccatgcccggctaattttttgtattttagtagagaaagggtttcaccgtgttgccaggctggtctcgaactcctgagctcaagcaatctgccctccttggcctcccaaagtgttaggattacaggtgtgagccatcgcgcccagcatgtattttaatatattacattgataatttaatattacattgattaatggctcacagcttctttgtataaatggctcaaaaagccaacaacaggggagtagttaattcaggtacattcaaacaataaaatgctatataagaattaaacatcaacatttttctatgaataaaatgggcaactttttacagtatagtcatatgtcacttactgacagggatacattccaagaaatgtgtagttaggtgattttatcattgtgtgaacatcatggagtatacttaaatctagatggcatagcctcatgcacacctaggccatatgatatcctattgctcctagggtatgaacttgtacggcatgttattgtactaaatactgtaggaacttgtaacacagtggtaaatatttgtgtatctaaacatagaaaaagtgcagtaaaaaatatggcataaaagataaaagtggtatacttgtatagagcacttactatgaatggagcttttagaaccagaagttgctctggtcaggcagtgagtaagtgttgagtaaatgtgaaaatttacattactgtaaattttataagcactgtacacttaggctacactaaatttattaacttttttctttaataatagattaaactatgccagttacaacatttgtatcaactttttactttttaaactttttgattcctataatactcagcataaaatacactttgtgtagctatgcaaaaataatttgtttgtatccttattctataagcttttttctaaagatttttaatttagttgtttgtttgctttttaaacatttttgttaaaacctcatacacagaagcacacattagcctaggcctaataggatcaggatcgttaatatcgctgtcttccacctccaaatcttgtcctctggaaggtcttcagggacaaaaacacacacagaacagtcatctcctgtggtaaaaatgacttctggaattcctctgagggacctgttttactgttaacttttttaaaaagtaagtagaaggagtacacattaaaataacaataaaaagtatagtaaataaataaaccagaaacagtcgtttattatcaagtattatgtactgtgcataattgtattgctagacttttaatgactggcagtgcggtaggtttgtttacacaaacatgaccccaaacctgtgagtaatgcattgttaaaacataacagtgactacaccatcactaggtgataggaattttatgggacagctgccatatacttgttttgttattgacatggtgtgtgatcatatattgaattgggaagaaaggacataacagcaagatctcacttttgttgggaaaaaatgtgggatggggcattattttatgaatgtatatatagaaaagatattaaatatcaagtgtttattggagttaggttggtagcagcttttctttttttaaaataataaaatatattttgaattttctactcaatattttttctctccattggaatataagcaccatgagaataggaatttttgtttctcctctgttgcgatattgcagatcctagaacagtattccataaatatgtgtataatgaattaatttttttatctagctggacctcagactagattttttttcattgatttgtttttgttttaattacatagttgtgattactggaactttatggttctatgtggtggaataagttctctttgttagtcatatttaaattactctagacttttttttacaccacttacaaacgtccttttgggtttttttgttttgtttgtttgtttggtttttgagacagcctcactaggacacccgggctggattgcagtggtgtgatctctctcggctcactgcaatcatttgaatctctccagggttcaagcaattctcctgcgtcagcctccccagcagttgggactacagggtgtgcaccaccataccccactaattttttctatttttagtagagacagggttttgccatgttggccaggctggtcttgaactcctgacctcaagtgatccacccgcctcagcctcccaaagtattgagattacaggcatgagccaccgcgcctggccataaacgtctttggggctttaattggaattgcactagttacgtatattaatttggcatctttcaattagaagtttaagacattagaatgaattatttagatattccatatctttcagtaaacttcatggctttttaaatatcagctggcgtattacttattaaatatatttctagatgttttaattttgttggtgttgctatcgagatctgatatactttgtgttttatatttgttcctggttaataggtaagctgttgttttgtatatttttttattaagccaccttcctgaaaattatacatagtatttaaaaaatttataactcaacattaagttgattaatgaaaaccaaacctttataccttaaacgatacataattttgtggtagaggaagtggctgtttttctccattttttttcaccctaattgttgaaagcttcctatcacaatggtcaagtatttatcatttaaaactgagcagactctcaatactttgggggcacatttcacctaccccaaggcattaggcagaaatgctgaggaagctggaagacttagtactctgttctttggtcagcaagtgatagttgacctataattaattaatagaagaaggaagtactctcagtgttttgggtcttttatcaaacaggtatgttattcttaggatcttttcactgttactccctttctgctattctaaaatataatcctggagtctcttctttttgttgctggttgtcacatttctgcaaacagcaatgtattgtgttaatagttatttcattacagacatttctgcgttttggtttacatgtgttcttgccttatttttcttaaattatttaaaggagaggagtatgttttgtgcagaattgtgttgatcagacgtgtactaagcagttactgtgtacagtgcagcagtgaaagggaatgataatactgagcacttatgtgccagttctgaacagtatcgatgcggaaaccaagaatctgaaagaataggtgtcttgtcaaaatttaggaagctatggaatgtccatttgattctaaattctatagtcttaagccctggctacacattagaatcatctggaatatttaacaaatctcatagttttattgtactccccctcaccctcacctttcatctagccaggaaattgatttctacagatagggcctaagcatctgggtgtgtgggagagacatataattttttaaagctgttacatgattctaatttgctgccttggtgaagaacaggagtcagcaaactatgccccataggccaaatccaaccaatctcctgtttttgtactgccttggagctaagaagggctttaacttttttaaatgactgggaaaaaaatcatgacatgaaaattctatgaaattcaaatttcactgtctgtaaatcaagtttcgttgcaaccaaagcctttggtaaatttttgttgacatgtcaagaaataattgttgagcaactttttcatcacatacacataaagagataaagaaatatttgggctcagtcccttcaaattgcaaatcatttcttccctttctgtttgttctttcgatgaaagtgtaaatatatttttttataactcttaatattggagaggagaaattgctaggcctaattcagtaatcatttgaacatgtaaggtcctaggggtttgtgtcttcgtgttttatattgaccaatattaattcacatgagacagtattcccaggttggtggtgttggcttaagggtttaaagtaacatcgccattctatttcatttccaaatcaaatgttaatggattcctataggtaaggtatcccaaggaaatacttattttcaaagtacagatgctccttaacttacagtgaggttatatttctaaaagcccattgcatgtagaaaatattttaagtcaaaaatttatttaataagccatacccaccagacattatagcttagcctagcatatcttaagcttgttcttgtttttatttgtattattttattttagtcttaacttgtaaggataggaattaaaataataccaaatgctgtcattttcctcagcaaattttaggcatatgacctgggaaattgtgaactactttctcttttggcttttggacttcctgttgggttttgggtataatatgcttataaagatagatttttattaattgtgattggacttcttactgagagcactttctgaaaatgttaattttcttaattgcataccagtgttaaataatgagatcacaactatttttgaacaattagaggttatgttctctttaagaactgattctgtagtctctatccataaatctttcctcaccttgtttagtggtaaggtcaagtaaccattaagtagactgaaatatccccagatcaggcattcattcaccatcttttagtattgcagtggagccacagaattactaggaatggcagagaatggcactacatgaaggaatgacaggagactgacagggtcaagagaaaatgatggagggttttagaaacccaaaccaaaggaaagaaagaaaaaagaaggtaaggaagtggggattagagggtgttttttggtggttgtttttgttttgttttgagacggagtcttactgtgtctcccaggctggagtgcagtggcacgatctcggctcactgcaacttacacctcatgggatcaagcgattctcctgccgcagcctcctgagtagctgggactacaggcgcctgccaccacgcccggctaatatttgtatttttagtagagacagggtttcactatgttggccagggtttcactatgttggccaggcttgaactcctgacctcaggtgatccacccgccttggcctcccagagtgctagaattacaggcatcagccaccacgcccggccaggatagggatttattgactcacttaggcatttatctgttctcagcatagctggatcattctagatctattctagaggtccaagcattaacactagctcatcctgtttctcagatctattgttctctgtgctgactggcttcattcgtaggccttctgtagtaagaggaaaatggctttgggtacttttgacttccatgtccttaacacctatgtctcagacagagatagtatcttttttgataattctggttaaagcacaagaagttctttcattggttcagcttggattattcctggtccaatcagtggggtctgatgtttggattggatgggtgtgaatggtgtacccacctccctaatggggatgcagtgaagtatagggtggttaaccatcccttatcaccatccataccctatggatagattttctgataagaaacacagaagaaaggaaatgatgctaaagagagtaaatagttaactgttaaaagaccaaaacctagtacttgtgtcatctaatagagaatcctatgtacattgtacacttccttttttttagaaaaattaaaataattttaaatagtctttgtgaaagcttcaaagattcttccaggccttatgtgtttgtcctttcagcttttcattataactttatgaaaatattttagccactcttttaacaatttattgaatgtctgctatgtcgttttacctgcagtgtcatttaatcttttctcaagttgataatttaaaaaataactttctaagttttatttttatttgattatgtacaatatattcaattcatatttgtggggtacagtatgatgtttcaatacatgtatacactgtataatgatcaaatcagggtagtagtgtatccatcacctcaaacatttatcatttctttctggcaagtacattcaaaatgttacattcaaaatcctcttttctggttattgtgaaaaatatacaatgtagtattattgttaattgtaatcactgtacttgtactgtgcaacagaaaactagaacttattcctcctatccatctgttcttttatacctattgactaacctctctccatccagtctttggccagtctctggtaaccactattctaccctgtacatctgtgagagctgcttttttaaactccgtatatgggagaaatcatgtggtatttgtcttactgtgtctggcttatttcatttaatataatgtcctccaggcttatccatgtagccaaaaaggacaggattttattctttcttttctttcctttctttccttcctttccttccttcctttctttccttccttccttctttttctcccttcccctctcccctcccttcccctcccccctcccctcccctcccctcccctcccttcccttcccttcccttcccttccctgtcctttttttcttttctttcaagacaagtctcactctgtcgccaggctggagtgcagtgacacaatattggctcattgcaacctccgactccctgttcaggcaattctcctgcctcagcctcccgagcagctgggattacaggcacacaccaccatgcccagctaatttttgtgtttttagtagagacagggttttaccatgttggccaggatggtctccatctcctgacctcgtgatccacccaccttggcctcccaaagtgctgggattacaggtgtgagccaccgcacctggcccttattctttttttaatggctgaatagtattcattgtgtatctatatcacattttctttgtctgttcctctgttggtgggcagatagattgattctatatcttggctaatgtgagtagtgctacaataaacagtgcagatatctctgacatactgatttcattgtctttggataaataactcaatgggattgctggatcatatggtagctctacttctagttttttgaggaacctccacactgttttccataatggctgtactaatttacattctcatcagcattgtataagggttcccatttctccacatctatgccagcatttgttttttgtcatgatactggccattcttataggtgtgagatgatacattattgtgggaagataactttattgtatagaactagatttctagacaatttatggaaactgatgaagaccatgttatattttaaaatatattttaaccaaggctcacagggtatttctctaccttttttttttttatctgaagtgctatcagattttttttttgctctgttgcccaggctggagtgcagtggcgctgtctcggctcactgcaagctccgcctcctgcgttcacgccattctcctgcctcagcctcccgagtagctgggactacaggcgcccgccaccacgcccggctaatttttttttgtatttttagcagagacagggtttcaccgtgttagccaggatgatctcgatcttctgacctcgtgatccgcccgtctcagcctcccaaagtgctgggattgcaggcgtgagccactgcacccggccagtgctctcagatttttaattcctatgcatagcatacagtaaacctcatctggaagtcccatacacggcacagtgcaggctgctcaatttttctgccttggaaggatgaaaagctaagttgaaaaatcattttatcagtttcactccagttgttacattttggctttagaaatatccttcatctcctgcatctcataatctcctgcctttgaggttgtgtcatagatattatatcacccaagtgctttcaatttgaacttcttcaagaggggtgcctatgtctcagaagtttcccgtaggtcctattttacagttattatttcagttccttctacgctagcttgttgaagaaagttctctaaccaaaggcaattctaattgcctttgaaaccagtactagtcaagctgtacagtagttttatgaagactgagcactcaacctggagttccttaaaaagaagacacaacaggaaggcccaagatacccttttgcccttcaaaatgaactgccagtgcccctgctttcatgccttgagtgaacatattccattagaacaagactgtacttttggttttacttaagaataactctctgagaaatgtgttgtttagcaatattcctttcaaattcacaagcgctaattgaaattactctctatgctatctttctagcaagacttaaggtttcatgaatagatagtgatcctcttctcatgtttcagggttctgtcttcatactctgttctccttcctttcctccatgtctttccccttgactgtatcacttaaaaagctattctttaaaattagtgatattgcttctaatttatatatttcatctccttaaccgtactgtaaacctctctgagtcaggaagtatatgtcttgtatttattttgtattttcacacaatggtcacttagttcaaataattcataaatttttggcatctaggttagaatggcacaaaataaggcatagttcttgtcttcaaagtgcttttaacctttagaagagatgtgacatgcaagtttaatatgcaagagttattaaagagagcacaatcagtttctcctcaggaaaacagtggggacagatggtattaagagccatgccttagtagcactggattattgggatattttaatgtgtgtatttgctggatcacagcattataaaggagacatttaaagaaaacactaatgatcgtaatcccttctatgtataattcttggtggtgggcaaaactcattcccgttgttatttcattttcgtttcattaccctttgaatcaacggatcacatttattatgaacatataaaaatctcacctatttagctttcagagttttgttttgtttttcctaattgccttgatgatcagaaaacagaaatatcagagtcttgacctctctctgccatgatcttttgtgttgagtttagcactcttgaagaaaggagagatttgtttatagcatctgccctgacaagtcagtactgattctctatcctggttaaccagatttattagtgactttcttataatactattgtaacattacttttgctttccttctccacctcatgcaaagagaaatgaagtaggaactttttgcttgtttgacatattcctgatttttttgtaggtttctctgaggtgatgtagcttttttggacagtacacctgctatgatatgtaatagtttgtactgttttgctaagtgatttttcttcctttaacagaagtatattttaactgtttggtttcttttttctttgtgttccaatattctttgaggagaatagaaaatggaagaagaaaccttagtaaataagttttttttgtgttaccgagaaactgtttaataataaatgtttcccgatccacttgatgtccacttttttaaaaaatggcctttattgaaggcaaaatttggtttcgattttgcttagatgaaattgcattattttgctattattcaggagactgtttctcacctggttgatcatttcaactgtttctttctgtgcttcaaatcatgagaatcccatttgccccaccgcagacttggcatgtcgaataaatgtgatggcagcaattaacatcacgattgcaatgaaaatgtaaaaaggaaatagttgcaaagttgtagtagggaaaacaaaagctggaaaagcagctttttataaataattatgaaattattttcatttttcctacataggattgaaaagtaaacaaattctctggttattttacatgttgattgtttctgccatatagcttaggactctatatagttgtggttagttttgtttttacattttaagaacaacacaataaattggagtcatcagtgttctacatagatgaaaagaaatttattattagaaaaagccaaaggacttaaaatgttcccttacttacacataaatttaagtatattttttcctagctagtaggtcattgtgttattattgtgtgttgcagaaagtatttcacttaaatttgaaaataattattaactggctagtgtttcattttttatttaaaagaacattatctaaatatttatataaagcaaagcagtcattcttttcatcctaagtgtttactagttttcattgtttaatattgattttcctttttgttggtattagattcttattacaatgcgtttgctctttgccctgtgatgttgctttgttggcttgttcatctacgttgtagacctagatgaccttcatgttctagtcctttgagttttttactaggctgaaacaaaagaaagcgattggttgctagtaaaagaactgaacaaaggcagacagggagggttttaagcatgggatactgccttagaaaacagcaggtatatctcagctcggtctatgaaaaccagcttctataaggctaggccaccacactgtcatttttttattattggccatcccttagtctctgtacactgttgaaaaagtgatgattcatcacaggatagttagaaataattggcctgttcaaaccctttacagttggggaagttggttttctacatcatataaacctgatgtccattatgcatgtatatttgggacacagtctgccttttaactgcactgtgctttacctgtatgtttaattcaggatgagattggttcctaaagcttttaaacaaagactttttctttttgctgtttttatcttttaatatcaatattgaatgaaaacatatgggaaccattcagagatgttcagtagacattaaaataaaaaggaaaatgtttgacagtttccctgggtaagctgcgaggcatttatgtagcaaaatgatgtattaaaagccaattattagaataatgatcaacataaaacctgggctttatacatcattagaaggttgtctgttgtggttgagggtttggggcagtatacatttgagtctgaatactcctccttataagtgactcattttgtgaagagaatacagaaaaatcttcaaaaactttacttacctttcccatgattggtgttcgttttttgttcaggtcctgtttttctcatagtaaaataactcagtatatatttttggctttagattgttactaatttaatctagtttctcagaatattaaatttatatttatatgttttatgtgccattaagtattgttagagaatttgtatagaggttaataaaagagagttgcccaaattctaactacattaatctgatatttaattagttgtgtgttagaaggaagataaatcaaattttacttatacctattaataatggttactgggtgaattctggtaaggtattatgtaaaggccagagaaaataaaatattgatgtttaaaaagtttgtggataagaaatcttttatttttcttgccacttaagattaaaccaaaagataatttttttaccctcactgaataaactcatttaaatagggaaaatctgaccgcatttcatccttcaattcctaagataaaggaaaagaagcagcaggagtagcaaaggttgggatagagatggcatactttacgtcatttctttcaaaagggatggaattaaacaaaaaattttttttctagctaaaaggccatcattttgtgtttgttattgttaagaagccacccaactacgattaaaaacatttaatatgcaataaaatattgacgtaaaagaaatagccaagagatagatatttgttaatgtggatatactttcagatttttaataatactattgaaattttataaagtattgaataaaatttcacttttaaaaaataaaaattcatttaacaataatttctgagatttatctaggcctcttaccacacttggacctctcatttaatcaaaggattgatatacacaataagtgtgcacattacaataaggtatctgggtcaaagatatttttcttgttttttattttgatgtttatttaagaattttgcttataatatgccaaacctttagctatttagataagtcccagtcatacctaaaatttttacttagagctgagtatttggtgtggtattgacctgggtaatgagcgtataacaaaatgttataaatgaaaagctatttctgacttaaactcttgattcttctacattagtgctagtaaaatttatgtattcttagttccaagtagtggaattttatacattttataatgccatagcaaagcacgattggaaatgagaagtgctgtctcttagaagttctctcatatttcagctaaaacatactcagcaaaaaagatatgtaaattaaaagaaaatctccaatttcctattctgagtaaagctttgatttttgctgattcaggaagtaaggttgacattggagcttctcatttcatctggaataatcactttttccttttgaaaagtctttcattttagcagcagtatcttctaaaacactccattttgcatggatgaacctgtttttctctagataacacagaaaatacaactatcataaatggtaacctgctttctatagtatagctttcctgagtgcccagtgagatactaaagtgccaggctgttcattctggagatttcactgatttttctagctgcatccctattctaaccccccaaataactcccaaaagaggaattttataacttccaaattgactgctgtaataaaatgtttatcccctaagtcagtagtggctcatcagcttaggatcattcagaatatataattccagttcttcttgaaacattgcaccatttttttctgttaaaataggttttggtttatcttagtgatgctgatattttctcagattttccattagtattttttctcccatctgaataataatctgaataaataatgaactggcttttgttataggggtaggtgcatagagcatccaatagcattccaaatatttggctgccaaataaggaaatcataactgcttatttgtattaaattagtattaaataaaatgattaacattttaaaatgttttggtataatctacatgcaatccgttaaaatttccaaactaatgtcagattctttattgcttggctttctgccaaatgatgttcaaaggaaattgagtttttctctagcatctaaggtaaatggaaatgtatgtgatgtttagctttgactagagagttacaaatggatccatggagttttggttatataatttatatgctatatgtatgagggcacttccttgcttcccatgatacttgggatggtgctgtcagtggagcaaatgtatgcttatgccatcttgtccataatatgtatttctgttgctatttgaactattaatgctatgtaataccaagtacttatatcagaaatttgtactctatgtagatagtgcttttgaacttctttctgatagtacatattcctgtattaatacaataaagccaagctgacaggatgacatagtgaagctcttattaaaaatgtgttctaattgttgctgagatactattggaaatctagagcttgctgcctcaagttattttaaattgtgtattttatatttacattttacatttacatattttatctattaagaattgcttttaaattaaaagctttacatacgcttaaacaaaagtatgaaagtatatttgaacttcaggaagcaattctttgtatcagcaccctgaatggttttgtattaaggaaagccagattcagtgacaagtttgaccctcacatctggaattgccattagagaaaagcaatcatctgagtcatatgtgtatacttacctatgacataagaagcacatttatttttcttctttttttaaaagcatatttctttcattttagaaaaccaaaatgcccagattattatgattaacatttaagttttttggctaaaacatagttaagaattatggcaggaaatacagaattatttctgagcaaagtttatgacatccaaattaatacagcttttaaaggaatcgatggataagccatttgaaatttatatatatttgttttatgttgatgtcatagatctaccgtgtaaaatttaaacattatgaaaacagattttaaatatttagtaaagccttctctggaaaatgctaaacctttgttttaaaattatatctgtagatatctggtcactaatactgtgaaattatttcagcattgagtattgccggctacaagtgctttggaaactctttagctgttcatttttggcaaaatcttactttttgaaaagaccttattttagaggagatatcaatattgctttctcagtttttcaaactaccattttgtaatttattagtaaattgtaagtgccacagaaaccactgtgcagtattcaaggtccttgcattcagggttaaaactgagtttatatacacacatactaaactcttacaaagccagggaacaactattcaaactgcactgtggactatgctagaggagttagcatgctttctttgcagacatggttgatttgaatacaacaacaaaaaattgtccagactgccaactgaaacccttgaaaacacttttcaatctgtagatacaactgtatcagcaaaatgttgatcaaagttcaagtggaaacattaactagtctagctagccttctggtgttttcattggttaattcacaaagagcatcgcacagtggatttttacgtagtagtaacaatttgctgtaaaattgtatggtctgaggatatgaccgtagagtttgtcttctgtgtctccaaacttactatcctgtacatcttgactcattttattcatttttcacttcattaaacaataaggatttaccttaaattaagcatttttttggtatgtttattgtctcctagtggtcctttgtaatgccatatggttgctgcccagctcgacttacaaacttactctttttgcttctcatactagccattttgcaagcctgagctgctttgtggtacaggtcaagtacttatggagtaaagttaagtgaatttttattgtgcaggaatgtcttcgtttaaagaaaaaaaaaaaaagaaagaaagaagaaaaagactgccccagcccttgttttttaaatagaaacattttttattttagagcaacttggatttcctactgaatataccatagtatagtgagggttatattttgttttaggcagaatggtttttaaaatagcccaattaattacataaatggaagttaatttattttataaaacagtttattttaaaatagcttatccatatgagttatttaaaagggaactaactcttaatgtttttaaatatgatttgatttataataaacttcctggaagtgagggaggcctttaatcttcatgtattaagagagggtgaataataatgaattatttttgccaagacagttttttcctgttaaaacccaagtaatcctgccattttcacatttttccttttgttctaaaaagaagtggtaaatgttttgcactgtttgttggctatggctgtgtcatgagggttctaccatgattgatcagtgagggccactgtgtatttttcatatatattcactgtggaatagaatccagtgttgaatttttttttaagtcagtagtgaagaatggtggagagcatttgttccattgaataatttataatagctaatttccccataagaagcctaccaaaacatgatagatatatctcacttggaagaaaagttgtctgtaaagtgaatcaaatcctattttaatatatcatatgagtatataaacccctttttctcactgattttatgggatcaaagtggaaattattcttgtagaaaatgacttggtttttaagacaaatcaaatttttagaaaagactgattttcaaatacagtaatatgtatgtcagattctgagtgcaaagtagataaatattttagatagataaaattttatatttggcataaattgagtaactttaaagataaactttattttttatttttatgttttgaacacagttatagtcagtagtttcagattttcatcctctccttgaaatgtttcaatagaaaggatatgtaactcttctttaatgttcaatattctagtactttaaagaagaagctatttttaaaaattaaaagactgaaataaaagaaaggaatttccatttaaacagttgaaattgtgattttaaaatatactagcaaattattagataagcaaataatttcttagaagccatataacagtaaactaaattcaatccaacaaactattgttgagcacctacctgtgcagagtggacaatgttaagcagtagaaatgtgttattgcctaagagtaactagttcgtagcctaagagagagtcagacacataaatggatacttacaatacaaagtgtaagtaccttgatagatgaaaatataggacatcatggggacgtctaggactctgaattcacttttgggaaatcaggtaagacttctttactccaagacttctttcctccagaagtcttatctgatttcccaaaactgaattaggacctgaagaataattaaaataagctaaacagaggaaggcctggaagagagagagtgttgttgcaggttcagagaatagcaggtatatagccctattgctattgcttaagagatttatgtataatttggtgtggctggaccataggttttaaaggtaatggagaatagtgagacattagtctggattggtaaagtgagaccagattatgaagggatttataagaacgatcagaaaaatcaagaatatctcaaagatatttttagtaagatagtgacaggatcatatttacaatttacaagtcagtttggcagaaggcaaagaatagcaggggttgggcagatgatggcaagatcaaacttaaagagactgattcctttctaaaatagatgagaggtcatggtactgttcttctggatagtgaatactagaggagaatcaagtttgaaagtggacaaataatagtttgtttttaacatttgatttgaggtgcttgtggatgatctaatttgaggtgtccagaaaggaactggatatatgaatatagagccaagctcaagagagaatgaagctagatatatagattaggaaggtaatcagcatgagaatgttaactgaacccacaggagtccacaagggtcttcagggctctccatctttagcatcagcgtatgataatgattttgttacctaattcattatgtttcaaatgtgaatgcattgtgaaatatttaatgtactataccagtataggatattataaactataatgaagagtgcatttactaaacacattgctataaaactggtgtagtaaactctgggccagtgtggaccatcatttggggcaggaaaaagaatcatgtattttttccccttttctaaattgacatattaaaagttgtacgtatttaacatgtacaacatgatgttttgaaatatgtgcagttggctctcggtatctacagattcaactaaccatgggtggaaaatatatttgcaagtcaactttttgtatcgatgggttctacaggactgattgcaggagcatccatagattttggtagctgaggcatcttggaaccttggaacctctggatactgtgggacgactgtatatattgtgaaatggctaaattgagatgattaccatatgtattacctcacatacctgttttttgtgatgagaacacttaaaacctactctcttagcaatttttaagaatacagtgtatcgttaactgtactcaccatgttgtacaacagatatctttaacttattcttcctatctaactgaaattttgttatctttgacagatacctccccaaccccctctccaccaaactcctggtaaccaccattttattctctacttctgtgagttcaaattttttagataacgtatataagtggacataaatgtactttgtggatttttatattctgtcacttagcctttcacacctcacttcacagctttgtgaaggagaggtaggtatttttattgctgtttccagtttaaaaatgtagtgatatcaagtaactttcctgaagtctcttgttgctcactgttgagtgacaaaataaaactttgaagagggacctgggtagagagagaaatgagcaaaaaaccatttcaatgagagatcagtgaccttactgcatttaagtgttcttagacaggaattacaccatttttcaaatgtattgtttatttaaaacttgaataccccatctgtaactctgttctaggtgatgtggtatcagtaccagaatgttgtactgtttctgaaaattattttcagtatagcagttaaggacattaaggcttcaaagccattggtccagttttgataagaaatgaagttggaagttgggtgtagtggctcacacctttaatttcagcactttgggaagggccaaggtaggagaattgcattagcccaggagtttgaaaccagcctgggcaacacagggagaccccatctctagaaaaataaaaaataaaaacaattagctgggcatggtggcatgtgcctatagtcccaactaagtagttctctgctaagcccgggaagtcaaggctgcagtgagccatgattgcaccactgtgttctagcctggaagacaaagtgagaccctgtctcaaaaaaagtaaaagtaaaaataataataataataataataaagctggaaatcaaggatatattttcatcatctcttcacttgacaccaagacaagtcacaaacctgaagagtattgcctatttattcctatttattagaaaacaaaaaaaaagttgtttttcaactcttttatctaggtatgaatgtgttaaaaattatttttagtgttttatatataagccagcataaatgatagtagaatacatttgtataatgctttaatatttacatactttgacatattttctcatacaacccttacagttctcagaggaggtagtcagaacaggtattaacctaattttatttttgaacaaacaggttcagaaggtaaagtcagtttgtttcagagctagaacttttcctattataccaccctgcttctagatgtgcaatctgtttaagaattaaagtaatttaaaatggtaaattaaaatgatgttattgcagttattttaatttcctgcctggagcgtttcagtagtagtggttcctgtattatctgggaagttaaaccaaatgttcttttatactcttttagactctacaacttcagttaatccagatttcctacccaataacattgtttgggagccagggatctctggttgcccaacccttctaagtacttagaagctcttagaaagaatgttcagtgaaaggcagtgaaaaggcctgttttggatacctactgcctatagctgaaacctgttaggtgccttcatgtgaatccctgaagacaccatgatgaaattgataagcatgtcataattcaagtaaaaacttattatgagtgctagatgatagccatatactgaatactttcctgattttactgcttttgccattgctcatctatctgtagctggaatgctttgtctcatatcagactgccagaactaaattccaccagccttcaaagccagcccaactgataactatttttgtaaagctttccctacttactctaacaagtaatgatgtaaaattcttagaacaatctgtcatagtctcaatgcagatgtcacatgtaactttgttattaatattttagttacttgtggatatctcatatcttctttggtttctttgttatagaacattgtcttcccataaacttgaatattgtccctttcccttagaaaagggaaatgtgggagaggtggggagatggttacatcaacccaatttttgcttcttaaaatgggcttttgttgatgtgagtctatggtcccatttattgttgtgacaatatcttggtagtgggaattactgggtatgttggagaacctcagaagggagaatggtcatgttctccagtgccgtatctgaatatctgaatcctgctctggaacacagttcttattctcaacacttgatcctattctctttatcaaacatagtttttacctcgttctctgtaagagccaattcccagccccataaagccaggaaatccagcaataaagaattgttcccagcagcatgttttgtacttatattttcttcttcttccttttttttttttttttttttatttgttgttgtttagacagcgtcttgccctgtcgccacgctggagtccactgcaacctccgcatcctgggttcaagcaattctcctgcctcagcctcccaagtagctgggactacgggtgcgtgccaccacacccagctaatttttgtatctttagtagagatggggttcaccatgttggccagggtggtctcaatctgttgacctcttgatctgccctcctcggcctcccaaaatgctgggattacaggcatgagccaccgcgcccagccagtacatagattttctaaagtgttcaacactcttatcaattcagattccaccataatttatatgatcaatcaagcactgctttgtttctctgtaggtctcctggaatacaacatagtcagagatgtgtagagtatggtccttctgggtttgccaaattttgtgctgaaggaaaatgatggctccaccgctcttcctgcctaactcgtagaaaggcagcatggtattgtgatagaaacatgagctttgaagataagcagtcagattctgattcctgttcttctaatagtccagccttgtaaagatcacttatcctcatagttagcaagacttcctcatttaaaaaattctttcctcatagggttgttgtgaagactaagtgaattaagttctgtgaaaaaatctagcacagtgtttagcacatgaatagttttctccatatatgtggcctctctcctgggatgatcaccttgtcccagtttgtccagggtttccctagttttatcacagaaagtctcatgtgtactaggaatcaatctctctctttctctctcttttttttttttttttttgagatggagtttttgctctgttgtccagattggagagcagtggtgcaatctcagcgcactgcaacctccgcctcctggattcaagcaattttcctgcctcagcctcccaagtagctgggattacagatgcctgccaccacacccagctaatttttgtatttttagtagaggcgaggtttcaccatgttgtccagactgatctcgaactcttgacctcaggtgatccgtctgcctctgcctcctgaagtactaggattacaggcgtgagccaccacgcctggcctctcttctctctctctcacttgacttttctaggcttattggccattccttgaataaggtacagtcaagttttactttagacttttaagtagctcagaatagagttccttagcttgttggtttttacttatttttttcattaatgtttcaaggtatattatgaggttgcattatttaattgctttgttgattgagccaggcagatctttcatttattagctggcctgatatcagggcaggaaagcttatgagttactttgtaaagtgatggttttattaaaggtggtaattttgatcagctgacctattggtgggttctgattactttacagaagtggatggtattgacaagcctccatctacttggaagttttaaaatgtgttctttttattaaaaggacttcatcctgtgaaactagtttcttcaaattgaagttctctcagtctaggcatgatgagttacaaaaatgattgtttgtagtattttggaattggtttccacctttatataaactcaaatgtcaatttaatgtgttcagtaagccaagcaacctttctaatgaaacaagtataattatgatttatttatatttttatttcatttctcatttttttcagcaatctttcctgtcctcaactatgtttcctttttaatttaaaaaaatcaagtagaaaacaaatatctggcttttttgtcaatgtcatggtcttatgtcaagatcttgaaaggtatctctccaaattattgttctgctatagttatttctatcaaagaagtcctcttgtatagctatttgttgaattgtgtacctactgaattagtcaaagctctagctaaaaccatttttttctttacctctcccctcccccaaaacttgcttttgttatgtattggcttgctaatccttgtgttgagcagtatcagacatcacctttcttgggggcagttagtccactcttccgctttctttgtcagagggctcccttaataggagaagtcaacagggaggacaaaaaggattgaaagttgtatttaatcagggtcagagaggtggtgttcagagtgacgggcccacaggcaggctggccttttatgcttgccgacgcagatggtcccagagcattcagctaagtgaagagaaagctgcccagtgaaagctattgtagggtagcatcgttacagttgagaaaggttgccaggggtaactagagagtatcaccagtatcgtgtgatcactaggctgtgccattgaaaatgttagactgaggattgtattgggtcccttggcatcttgatgttcatatgtaagcagtattagcttacattagtgtttttaatttagttttttctgttttcttccctttgttctttccctgccttttttaatatataaaacatagacttattttaattcacaattttgtaaaaccttctgaaaacataccattatttaataatatatctcttataggctttatggtttggtataaactataccaaatttttgtgaataaattggatttatgaaaatgaggtgtaatatttctcgtttaaacagctctaagttgattttccattgctctgaaactgccctagtatatcccaagatgggtagtttgtttttctttgtgattttaagtaacttattttaaaatatgttagtatttacctgaaaacagtagatagcattgagtgcagggttgtgaccaagaactcccaaatatttatgaaatctatcttcaatttttgcctaaggcaaaagtaaaaatatgcatcccaaatgagccagaaccaaaatagtgtaacaatcattggtctcaatttaatatacttaatatactttgaatatgattttaatatgccagttttggaattc

SEQ ID NO: 54 - DNA, 189252 bp, Homo sapiens
gaattcttttatttttcttgccacttaagattaaaccaaaagataatttttttaccctcactgaataaactcatttaaatagggaaaatctgaccgcatttcatccttcaattcctaagataaaggaaaagaagcagcaggagtagcaaaggttgggatagagatggcatactttacgtcatttctttcaaaagggatggaattaaacaaaaaattttttttctagctaaaaggccatcattttgtgtttgttattgttaagaagccacccaactacgattaaaaacatttaatatgcaataaaatattgacgtaaaagaaatagccaagagatagatatttgttaatgtggatatactttcagatttttaataatactattgaaattttataaagtattgaataaaatttcacttttaaaaaataaaaattcatttaacaataatttctgagatttatctaggcctcttaccacacttggacctctcatttaatcaaaggattgatatacacaataagtgtgcacattacaataaggtatctgggtcaaagatatttttcttgttttttattttgatgtttatttaagaattttgcttataatatgccaaacctttagctatttagataagtcccagtcatacctaaaatttttacttagagctgagtatttggtgtggtattgacctgggtaatgagcgtataacaaaatgttataaatgaaaagctatttctgacttaaactcttgattcttctacattagtgctagtaaaatttatgtattcttagttccaagtagtggaattttatacattttataatgccatagcaaagcacgattggaaatgagaagtgctgtctcttagaagttctctcatatttcagctaaaacatactcagcaaaaaagatatgtaaattaaaagaaaatctccaatttcctattctgagtaaagctttgatttttgctgattcaggaagtaaggttgacattggagcttctcatttcatctggaataatcactttttccttttgaaaagtctttcattttagcagcagtatcttctaaaacactccattttgcatggatgaacctgtttttctctagataacacagaaaatacaactatcataaatggtaacctgctttctatagtatagctttcctgagtgcccagtgagatactaaagtgccaggctgttcattctggagatttcactgatttttctagctgcatccctattctaaccccccaaataactcccaaaagaggaattttataacttccaaattgactgctgtaataaaatgtttatcccctaagtcagtagtggctcatcagcttaggatcattcagaatatataattccagttcttcttgaaacattgcaccatttttttctgttaaaataggttttggtttatcttagtgatgctgatattttctcagattttccattagtattttttctcccatctgaataataatctgaataaataatgaactggcttttgttataggggtaggtgcatagagcatccaatagcattccaaatatttggctgccaaataaggaaatcataactgcttatttgtattaaattagtattaaataaaatgattaacattttaaaatgttttggtataatctacatgcaatccgttaaaatttccaaactaatgtcagattctttattgcttggctttctgccaaatgatgttcaaaggaaattgagtttttctctagcatctaaggtaaatggaaatgtatgtgatgtttagctttgactagagagttacaaatggatccatggagttttggttatataatttatatgctatatgtatgagggcacttccttgcttcccatgatacttgggatggtgctgtcagtggagcaaatgtatgcttatgccatcttgtccataatatgtatttctgttgctatttgaactattaatgctatgtaataccaagtacttatatcagaaatttgtactctatgtagatagtgcttttgaacttctttctgatagtacatattcctgtattaatacaataaagccaagctgacaggatgacatagtgaagctcttattaaaaatgtgttctaattgttgctgagatactattggaaatctagagcttgctgcctcaagttattttaaattgtgtattttatatttacattttacatttacatattttatctattaagaattgcttttaaattaaaagctttacatacgcttaaacaaaagtatgaaagtatatttgaacttcaggaagcaattctttgtatcagcaccctgaatggttttgtattaaggaaagccagattcagtgacaagtttgaccctcacatctggaattgccattagagaaaagcaatcatctgagtcatatgtgtatacttacctatgacataagaagcacatttatttttcttctttttttaaaagcatatttctttcattttagaaaaccaaaatgcccagattattatgattaacatttaagttttttggctaaaacatagttaagaattatggcaggaaatacagaattatttctgagcaaagtttatgacatccaaattaatacagcttttaaaggaatcgatggataagccatttgaaatttatatatatttgttttatgttgatgtcatagatctaccgtgtaaaatttaaacattatgaaaacagattttaaatatttagtaaagccttctctggaaaatgctaaacctttgttttaaaattatatctgtagatatctggtcactaatactgtgaaattatttcagcattgagtattgccggctacaagtgctttggaaactctttagctgttcatttttggcaaaatcttactttttgaaaagaccttattttagaggagatatcaatattgctttctcagtttttcaaactaccattttgtaatttattagtaaattgtaagtgccacagaaaccactgtgcagtattcaaggtccttgcattcagggttaaaactgagtttatatacacacatactaaactcttacaaagccagggaacaactattcaaactgcactgtggactatgctagaggagttagcatgctttctttgcagacatggttgatttgaatacaacaacaaaaaattgtccagactgccaactgaaacccttgaaaacacttttcaatctgtagatacaactgtatcagcaaaatgttgatcaaagttcaagtggaaacattaactagtctagctagccttctggtgttttcattggttaattcacaaagagcatcgcacagtggatttttacgtagtagtaacaatttgctgtaaaattgtatggtctgaggatatgaccgtagagtttgtcttctgtgtctccaaacttactatcctgtacatcttgactcattttattcatttttcacttcattaaacaataaggatttaccttaaattaagcatttttttggtatgtttattgtctcctagtggtcctttgtaatgccatatggttgctgcccagctcgacttacaaacttactctttttgcttctcatactagccattttgcaagcctgagctgctttgtggtacaggtcaagtacttatggagtaaagttaagtgaatttttattgtgcaggaatgtcttcgtttaaagaaaaaaaaaaaaagaaagaaagaagaaaaagactgccccagcccttgttttttaaatagaaacattttttattttagagcaacttggatttcctactgaatataccatagtatagtgagggttatattttgttttaggcagaatggtttttaaaatagcccaattaattacataaatggaagttaatttattttataaaacagtttattttaaaatagcttatccatatgagttatttaaaagggaactaactcttaatgtttttaaatatgatttgatttataataaacttcctggaagtgagggaggcctttaatcttcatgtattaagagagggtgaataataatgaattatttttgccaagacagttttttcctgttaaaacccaagtaatcctgccattttcacatttttccttttgttctaaaaagaagtggtaaatgttttgcactgtttgttggctatggctgtgtcatgagggttctaccatgattgatcagtgagggccactgtgtatttttcatatatattcactgtggaatagaatccagtgttgaatttttttttaagtcagtagtgaagaatggtggagagcatttgttccattgaataatttataatagctaatttccccataagaagcctaccaaaacatgatagatatatctcacttggaagaaaagttgtctgtaaagtgaatcaaatcctattttaatatatcatatgagtatataaacccctttttctcactgattttatgggatcaaagtggaaattattcttgtagaaaatgacttggtttttaagacaaatcaaatttttagaaaagactgattttcaaatacagtaatatgtatgtcagattctgagtgcaaagtagataaatattttagatagataaaattttatatttggcataaattgagtaactttaaagataaactttattttttatttttatgttttgaacacagttatagtcagtagtttcagattttcatcctctccttgaaatgtttcaatagaaaggatatgtaactcttctttaatgttcaatattctagtactttaaagaagaagctatttttaaaaattaaaagactgaaataaaagaaaggaatttccatttaaacagttgaaattgtgattttaaaatatactagcaaattattagataagcaaataatttcttagaagccatataacagtaaactaaattcaatccaacaaactattgttgagcacctacctgtgcagagtggacaatgttaagcagtagaaatgtgttattgcctaagagtaactagttcgtagcctaagagagagtcagacacataaatggatacttacaatacaaagtgtaagtaccttgatagatgaaaatataggacatcatggggacgtctaggactctgaattcacttttgggaaatcaggtaagacttctttactccaagacttctttcctccagaagtcttatctgatttcccaaaactgaattaggacctgaagaataattaaaataagctaaacagaggaaggcctggaagagagagagtgttgttgcaggttcagagaatagcaggtatatagccctattgctattgcttaagagatttatgtataatttggtgtggctggaccataggttttaaaggtaatggagaatagtgagacattagtctggattggtaaagtgagaccagattatgaagggatttataagaacgatcagaaaaatcaagaatatctcaaagatatttttagtaagatagtgacaggatcatatttacaatttacaagtcagtttggcagaaggcaaagaatagcaggggttgggcagatgatggcaagatcaaacttaaagagactgattcctttctaaaatagatgagaggtcatggtactgttcttctggatagtgaatactagaggagaatcaagtttgaaagtggacaaataatagtttgtttttaacatttgatttgaggtgcttgtggatgatctaatttgaggtgtccagaaaggaactggatatatgaatatagagccaagctcaagagagaatgaagctagatatatagattaggaaggtaatcagcatgagaatgttaactgaacccacaggagtccacaagggtcttcagggctctccatctttagcatcagcgtatgataatgattttgttacctaattcattatgtttcaaatgtgaatgcattgtgaaatatttaatgtactataccagtataggatattataaactataatgaagagtgcatttactaaacacattgctataaaactggtgtagtaaactctgggccagtgtggaccatcatttggggcaggaaaaagaatcatgtattttttccccttttctaaattgacatattaaaagttgtacgtatttaacatgtacaacatgatgttttgaaatatgtgcagttggctctcggtatctacagattcaactaaccatgggtggaaaatatatttgcaagtcaactttttgtatcgatgggttctacaggactgattgcaggagcatccatagattttggtagctgaggcatcttggaaccttggaacctctggatactgtgggacgactgtatatattgtgaaatggctaaattgagatgattaccatatgtattacctcacatacctgttttttgtgatgagaacacttaaaacctactctcttagcaatttttaagaatacagtgtatcgttaactgtactcaccatgttgtacaacagatatctttaacttattcttcctatctaactgaaattttgttatctttgacagatacctccccaaccccctctccaccaaactcctggtaaccaccattttattctctacttctgtgagttcaaattttttagataacgtatataagtggacataaatgtactttgtggatttttatattctgtcacttagcctttcacacctcacttcacagctttgtgaaggagaggtaggtatttttattgctgtttccagtttaaaaatgtagtgatatcaagtaactttcctgaagtctcttgttgctcactgttgagtgacaaaataaaactttgaagagggacctgggtagagagagaaatgagcaaaaaaccatttcaatgagagatcagtgaccttactgcatttaagtgttcttagacaggaattacaccatttttcaaatgtattgtttatttaaaacttgaataccccatctgtaactctgttctaggtgatgtggtatcagtaccagaatgttgtactgtttctgaaaattattttcagtatagcagttaaggacattaaggcttcaaagccattggtccagttttgataagaaatgaagttggaagttgggtgtagtggctcacacctttaatttcagcactttgggaagggccaaggtaggagaattgcattagcccaggagtttgaaaccagcctgggcaacacagggagaccccatctctagaaaaataaaaaataaaaacaattagctgggcatggtggcatgtgcctatagtcccaactaagtagttctctgctaagcccgggaagtcaaggctgcagtgagccatgattgcaccactgtgttctagcctggaagacaaagtgagaccctgtctcaaaaaaagtaaaagtaaaaataataataataataataataaagctggaaatcaaggatatattttcatcatctcttcacttgacaccaagacaagtcacaaacctgaagagtattgcctatttattcctatttattagaaaacaaaaaaaaagttgtttttcaactcttttatctaggtatgaatgtgttaaaaattatttttagtgttttatatataagccagcataaatgatagtagaatacatttgtataatgctttaatatttacatactttgacatattttctcatacaacccttacagttctcagaggaggtagtcagaacaggtattaacctaattttatttttgaacaaacaggttcagaaggtaaagtcagtttgtttcagagctagaacttttcctattataccaccctgcttctagatgtgcaatctgtttaagaattaaagtaatttaaaatggtaaattaaaatgatgttattgcagttattttaatttcctgcctggagcgtttcagtagtagtggttcctgtattatctgggaagttaaaccaaatgttcttttatactcttttagactctacaacttcagttaatccagatttcctacccaataacattgtttgggagccagggatctctggttgcccaacccttctaagtacttagaagctcttagaaagaatgttcagtgaaaggcagtgaaaaggcctgttttggatacctactgcctatagctgaaacctgttaggtgccttcatgtgaatccctgaagacaccatgatgaaattgataagcatgtcataattcaagtaaaaacttattatgagtgctagatgatagccatatactgaatactttcctgattttactgcttttgccattgctcatctatctgtagctggaatgctttgtctcatatcagactgccagaactaaattccaccagccttcaaagccagcccaactgataactatttttgtaaagctttccctacttactctaacaagtaatgatgtaaaattcttagaacaatctgtcatagtctcaatgcagatgtcacatgtaactttgttattaatattttagttacttgtggatatctcatatcttctttggtttctttgttatagaacattgtcttcccataaacttgaatattgtccctttcccttagaaaagggaaatgtgggagaggtggggagatggttacatcaacccaatttttgcttcttaaaatgggcttttgttgatgtgagtctatggtcccatttattgttgtgacaatatcttggtagtgggaattactgggtatgttggagaacctcagaagggagaatggtcatgttctccagtgccgtatctgaatatctgaatcctgctctggaacacagttcttattctcaacacttgatcctattctctttatcaaacatagtttttacctcgttctctgtaagagccaattcccagccccataaagccaggaaatccagcaataaagaattgttcccagcagcatgttttgtacttatattttcttcttcttccttttttttttttttttttttatttgttgttgtttagacagcgtcttgccctgtcgccacgctggagtccactgcaacctccgcatcctgggttcaagcaattctcctgcctcagcctcccaagtagctgggactacgggtgcgtgccaccacacccagctaatttttgtatctttagtagagatggggttcaccatgttggccagggtggtctcaatctgttgacctcttgatctgccctcctcggcctcccaaaatgctgggattacaggcatgagccaccgcgcccagccagtacatagattttctaaagtgttcaacactcttatcaattcagattccaccataatttatatgatcaatcaagcactgctttgtttctctgtaggtctcctggaatacaacatagtcagagatgtgtagagtatggtccttctgggtttgccaaattttgtgctgaaggaaaatgatggctccaccgctcttcctgcctaactcgtagaaaggcagcatggtattgtgatagaaacatgagctttgaagataagcagtcagattctgattcctgttcttctaatagtccagccttgtaaagatcacttatcctcatagttagcaagacttcctcatttaaaaaattctttcctcatagggttgttgtgaagactaagtgaattaagttctgtgaaaaaatctagcacagtgtttagcacatgaatagttttctccatatatgtggcctctctcctgggatgatcaccttgtcccagtttgtccagggtttccctagttttatcacagaaagtctcatgtgtactaggaatcaatctctctctttctctctcttttttttttttttttttgagatggagtttttgctctgttgtccagattggagagcagtggtgcaatctcagcgcactgcaacctccgcctcctggattcaagcaattttcctgcctcagcctcccaagtagctgggattacagatgcctgccaccacacccagctaatttttgtatttttagtagaggcgaggtttcaccatgttgtccagactgatctcgaactcttgacctcaggtgatccgtctgcctctgcctcctgaagtactaggattacaggcgtgagccaccacgcctggcctctcttctctctctctcacttgacttttctaggcttattggccattccttgaataaggtacagtcaagttttactttagacttttaagtagctcagaatagagttccttagcttgttggtttttacttatttttttcattaatgtttcaaggtatattatgaggttgcattatttaattgctttgttgattgagccaggcagatctttcatttattagctggcctgatatcagggcaggaaagcttatgagttactttgtaaagtgatggttttattaaaggtggtaattttgatcagctgacctattggtgggttctgattactttacagaagtggatggtattgacaagcctccatctacttggaagttttaaaatgtgttctttttattaaaaggacttcatcctgtgaaactagtttcttcaaattgaagttctctcagtctaggcatgatgagttacaaaaatgattgtttgtagtattttggaattggtttccacctttatataaactcaaatgtcaatttaatgtgttcagtaagccaagcaacctttctaatgaaacaagtataattatgatttatttatatttttatttcatttctcatttttttcagcaatctttcctgtcctcaactatgtttcctttttaatttaaaaaaatcaagtagaaaacaaatatctggcttttttgtcaatgtcatggtcttatgtcaagatcttgaaaggtatctctccaaattattgttctgctatagttatttctatcaaagaagtcctcttgtatagctatttgttgaattgtgtacctactgaattagtcaaagctctagctaaaaccatttttttctttacctctcccctcccccaaaacttgcttttgttatgtattggcttgctaatccttgtgttgagcagtatcagacatcacctttcttgggggcagttagtccactcttccgctttctttgtcagagggctcccttaataggagaagtcaacagggaggacaaaaaggattgaaagttgtatttaatcagggtcagagaggtggtgttcagagtgacgggcccacaggcaggctggccttttatgcttgccgacgcagatggtcccagagcattcagctaagtgaagagaaagctgcccagtgaaagctattgtagggtagcatcgttacagttgagaaaggttgccaggggtaactagagagtatcaccagtatcgtgtgatcactaggctgtgccattgaaaatgttagactgaggattgtattgggtcccttggcatcttgatgttcatatgtaagcagtattagcttacattagtgtttttaatttagttttttctgttttcttccctttgttctttccctgccttttttaatatataaaacatagacttattttaattcacaattttgtaaaaccttctgaaaacataccattatttaataatatatctcttataggctttatggtttggtataaactataccaaatttttgtgaataaattggatttatgaaaatgaggtgtaatatttctcgtttaaacagctctaagttgattttccattgctctgaaactgccctagtatatcccaagatgggtagtttgtttttctttgtgattttaagtaacttattttaaaatatgttagtatttacctgaaaacagtagatagcattgagtgcagggttgtgaccaagaactcccaaatatttatgaaatctatcttcaatttttgcctaaggcaaaagtaaaaatatgcatcccaaatgagccagaaccaaaatagtgtaacaatcattggtctcaatttaatatacttaatatactttgaatatgattttaatatgccagttttggaattccttaatttcatcccttctattgtcccccggatattttaagaaattacttatagtcacatacaaaatgtaaacacagtagtctcctgccgtcactagaggaaaacacatagagatttctattcaatgtaaaagtgaaatttgaagtgtaactaacgttcaaggtgaaatgataataactttgcaaattattgttttaacttagattaccagtcaacccaatttaagtcacccttacgtcagtcagagctgattttgacttaatactgctttctcacctgttgagagaacattaagtgaggacaaacatagtaccatcctgtaataccaacattggtatttgagagctaatcatctccaatgttattattttgtgttagaggtaacttttagaaattggtgaatttcaagtggagccaggctttaaaatgccttctgagacccccacttaatagttctgactctaaattaatttcacacctttattgaaaaatctcaaatttatgttaaaatgagctgtttgtttccttcctttcattaaaatacagctgagtcattttcatttaaaacaactcatattcccataaataagaacatttgtcacaaaaagttaatgaatctggtaaaatttagaactaagattctaaaaggtctatagatacggcaagaaaactgttttttggaaaattgaatttttattaaaaaatcaacacaatgtgatttccctttatttcctgaagaataataattagattatgctattcttttatcatcatagtttttttttaaaggaaaatcataatatgatcatctaaaagacttagggaaaaaaatacatctgtatcacttatggtgaggttggcttaccaggatttatgaataaagattgtagtgtcaatgcaaattttaattacattgcttctttaatgaatcttgataagtctaagacattgaagttatagcattttatggttattatttttattttaccgatccactttttctttatctatgtacatgatacagatgtgactgaaacacatggtaaaccgaatgaccttgaagaagaaaagaacaaatttccatttcatgtattttcatttaaattgaccacgtgacacacacagtgggaccagggagattcacataaaaaaaaatttacattaaacttcagcagagacttcctatcactttggtctttgattcattacaggtaacatgaatatgagagggaatggtacatatttagtagttatcacatgtcatcacaacatagattaaaaaacaaaaccgtttttatgattcacaagtatagatatgaatgttacctccttgatacagtttaaagttgactctttaaagatagtccttttatacaattaaaccatcctatcaacatatattttaagtatataaattattatatatgcacttataattttatactggaaattaggagctagtaaactaatttcagttttgccagttgtttaaatttttctttaacgtgaaccaaaacctttttcgattccattattatgttagtaatagtaatatatgagtgttaccagaacattaatgattggaatatttagcaaaacccattaatgatggtgtgagttaaggactatccctatatttcaggtatatggcagttatggtgagaacgtacaaccagaataatcacaatttatttgttacagtgaattccattttacgaagaactggcaggttttttaatctgaacaatattcataccaactaacatacttaagaggtactcagatgcttgctgaataaatgtagtttaagataatacttttgaaagttggctgacataagaaaaatggtaatctttaatgggaaattgcagcctttggtgtttatttacaaagagttgggaactttttaaatgctgttaaccctttatattggtttgaatctcatctgggataattgagaaggctcattgtcattttgaggatcccagactcccacaaaaaaaaagatgagagtggggtgttgactagagagctccaagtgataaaatctaggaaagaacactaaaaaaaggcgtcagaaggtttgggtttaagcccgctaatatgtgtttattacttacctataaaaagattacttatctataaaaaggtgatctctacctactttaagaattactacattcatgaaattagagtaagtatgtgaaagtacatacgagttgagtattccttatccaaaatgcttgggaccagaaatgttttagattttggattttttcaaattttgagatatttgtgttatatacttaaagtggagcataacatttcctttgagtgccatgttaatgctcaaaaagtttcttttttttttttttttggatttttgaattagggatactcaacctgttcttggaaatctgtaacatatggtatgcatgtaaattgatggttcaaataatcactaatactactcacattgctgccactgctgatgccttataactagtatcagaagagcctcttgggatgtttatactgtagtctacccttatctttagggaatacattccagcattcccagtggatgtctaaaactgcagatagtactgaaccctgtatgcattgttttttcctatacatacatacatccctatgataaagtttaaattataaattaggcacaataagagaacaacaagatagaacaattataacagtatagcataatgtcagttaatgtgaatgtggcactgtactcacccttcttgtgttgatgtgaaattatgagatgaagtaaggtgaataatgtaggcattgtaagcattgtgatgtagtattaggctactactgaccttgaacacaagcattgtgataccttaacagttaatctgataacccagatggctactaggtgacttacaggtagataaggtatatagcatggatacactggacaaaggcatgattcacatcctcatggggacagtgcaagatttcatcatgctactcagaatggcgtgcagtttaaaacttaagaattgtttatttctggaattttcatataatatttttggactacagctgactacgggtaactgaaactgtggaacatgaacccaccgataatggaaggctactgtattttaatatttgccaacactgagcatttgaaatgagctactttggcaggaaagattataaataattgagtagatatcaatggatgagcatcatagtgctctatcagccctttgggagaccatgagtaacctatcatttggttttagctctttgtcttgattcactttatcaaaatgggactatagatgacttgtggtaggttctagagtgcaagaaatgagaaaataagtgaatgagctttgcccagccacagattcttaacagtgctgagggaattgtcctgaggtctttgcaaaatcctaaattaatgattatcactataacagatttttctttacttctttccatgtaacatgtattttcttccaacagatatttttaattgacttcttcagatcaacattagtaggtgacgttttaataagcattctacattgtttccagcatttacctgatgaaattaggataaaatgccatttctgactggttactagcttccaaacagcagccttgtagaacctgccattcagattcatgagtcagcagaatttataaattatgataggtcatggatctttgtttttttccccagattgtcaaaaacacatgccaagtgttgtgcagctttatgtactctttctttatatactagccaacagcctacaatggtagttctcatcgtgtggtctgtgtacctctgggagtccctggttcctttcagtgtccctttcttcaaggtcaaatctgtgttgctagtaatactaagaagttatttacctttttcaatgtgttgacatttccactgatgataaggagtaaggagtaaaagttctggctccttagaatgaatgaaggcaattacatgaaaccttactaataatattctatatgttatttctacatgcctgtagtttttttaaaaagctagttagtttcacttaggaatgttcttgaagcaataaaaataattttattaagcctcaatactctagtacatgtctttgaatattctgtatgatgaaacgggaagtactgtacacacaaaataaaactcggtgaaccagtattttccacatgacccattcattatgttacaaaattatgcatgagtgaaaatttcatttactgtccaagagagaccaattttagattttacattgtaactaacttttaggaaactatcacctgttaattttggcctagtgtaaaagaacagtttccataggtatggtaaaaagcaattgaattactgttttctttttcaactgcataactgtgtaatgccagataatcttcataccataggggaaaaatactttttttcaaccctcatagattcttcattggatatggatacctataacaaaagacagaagtttattgacatgtatattttatatatacatgggagacacccatggaattagtagttttcaaggtggctttgaatagagcattttcaacaaagaacagtaagtttttagagaatacaagactgaggaaaaggactttgaatctgtagccgtagtaaattttggaagggcaaatcaatatggcgggtagaggctagttggtgaagcttattaacacagattcttttccaggctaaagttgtcttcagtggttaacctttgtttctcctagtagagaggtgggcaggataccttttgtctttgcaaatctatgtcttgatttaggcaagtggaaggcagagaggtttcttgcatctgctccttcaaaactaccttcagtagaacaatccttcctattttggggtagcatattctggtttcccagaacatacttcagtcaaaacaacatatcacagcagattaaatacagagccagatatgacaactcaactattttctagtaagccagatatggaaagacatttgaaaatacaaaacaatgccactcttctcatttcggaaaatagatttttcatagaagtttcacttttatttattttttatttttaaattagtggagaactatttaatttttttttttttagttttaatgtctagtatgggagatactaatagtaacagaccaaataaacaaaggctctttgaggctctcaatttttaagaatataaagggatcctgagacttaaaaatttgaaaactgctaagctctctctcactgtgtgactcgcctgctcgccctttgccttctgccatgattctaagtttcctgagccctcactagaagctaagcagatgctggtgccatgcttcttttgtatatagcctgctgaagagtgaaccaaataaaccctcttttctttataaatttcacagcctcaggtatttatagcaacacagagattaaaatcttattagggcaaggggtatagctggtcctaaaattgtaagattaggaactatactttgtattctagttcataagtataaaagccctggatgagaaattgatctgaggaaagctttattgcaaattaaaggactcaggagaatagatatcgctgggcaatggaggatatctcatcataccccccttgagcagtttgcttttatcatgactttgagcactatcctttatgtctctgttcctcaatttctccagttataaaataggaccatttttacatcagcgcctcctctccctgtcttacaggggtttgacaaggatcaaatgagttgctttaaagagaacatgtgagataagatatctcctcacagtaggtttccaggatcctgtccaggatgatcacagtcagcatggggttaatacacagattcaagaggcatatcaaaggagatctgataagatttagtgactggatgaatacagggaataaacagaaattagttaaaaattattctaaggagccagatgctgtggctcatgcctgtaatcctagctctttgggaggctgaggcgggcagattacttcagcctaggagatcgagagcaacctgggcaacatggtgggacccagctctacaaaaaatacaaaaattggcgtggcacatgccggtagtcccagctagctccttgggaggctgaggtgggaggatcgcttgagcctgtgaggttgaggctgcagtgagccgtgattgttcgtgccactgcactttagcctgggtgagagagcgagatcctgtctcttaaaaaaaaaaaaaaaaaaaaaaaaaaaagtttgttctgagggcttaattgtcaatattttagtaacaaattggaggaattggagagaaaagcaaaaaatagatatttaaaaacccaggcttttaagatcaggattgtaggattgtagcacagaagttaaagaaaagtggccagaaaaataattaaggacaaaacaggtagggcatggatggctgtttaaggttggctttcaggaagcagaggagttttgtaagacaataggcaagcatcgaaaagaaacttggattattataacatgtagcagaaaaaatgaaaaacaaaacaaaaaaaacttgggttagcgtctaatggtcggggctggttatacaatttgtgggatacagtgtgaatgaaaatgaaatgcaggcctttgttcaaaaagcaaggggaaaagtacagttaagagtgctaatgtttaaagcttttttcctttgggaagaaaaacatggtagagttaatagcaataaataagtaaacacaaattcaaaattatgtttgtgggtatcatgcttttataaaagatagtaaataaataataccttatcactgtgaaatcttgattaatcatgactttctggctcttttttctgcaaattcattttagtcatcaaaatttatacttttataaagtttcatttttaatttatataattggaagtaatgtcaattatgtttggcaaatgcaagattacaaatattttttgataatttttgattttgaggacaggccttgtactgatgccactgttaagaacattttataggctgtgacaacattaggataaatttctgataaattatttcaaaatctaaatttagaacatctagagctaatttttagaacaatttttctaaaagctttaactctacaaatcagttctgtgtatagatttaattctaagtgtagatttatacaggggtatttaaatattctttctgctatttcttgtaacttggaagttgtacaacttccaagaaaccaaatgacttcatgacttgtatataattcagaatgtctgtttgtgcatcctacctcatatcttcaggtatgaagatatggaaacattaaatttaaaataatccttctcattaacagttggttcttcattaaaacagttggttctcatacaaaaatattgttcttttcaaccaaatgtgacaatctttatattcaatttctctttctaaagctattgctatttggtttgcaatgttgcagtggtttataaaactggagattataaatgccttgatgaattctgatatatttttggtgccatgacttggatactttgcaataatatgctgacaaaggttttactctctgagcaccaacacttcctgtcctggtccttaggctggagagttaatatttgcgcatatactgttaggataggttccaggaagaggagtactttggctttccactgtatatccccagtgctgagccgctctttcatggggctgctgccatcattgccattgccaatctgggctcagtcctggccactgccttgagtgccctgtgttgtccacgtctgtcccaggtattcacatttgggcccaggcagccagtccagctgcttagtgcatatgctgacacttgacatatttcctctgttctgtgctccattgtcccactggtcttcatctacaaagtacaagttcaaagtcattaacaagttcaagatggcgacaaaggaccgttcaactaaatagaggccccttttgagagcaagcccatgtgtgactgcacaagttacatacctggtaagcttactctgcccatttatattgccgaagtactaagactactaaactgcctttaaattgctctgttcaggacttccctaagatgaactatttgaccttaatgggacctatatagttgttaggggcagagacatggtagttttcatgcaggtattcagtgagtttgttttaaaacatgctaccttcttagtaagacttgatactcctctaggagccttatggaagctgaactccctggcagccaggactgtagctattgaatctgactggggttctaagaggaaggcttttgaaatggagttcagacaaactgctctatcaaaatactcttgttgatttagtttgctgtgttttattctatatctttcttttaattaccacttggatttttattatttctgatctttttttgtttgttcgtttgttttttggttgaaggaaagggatcatagattattatttagctctcaccactggctgcttgatatggatggcctactgtttatcaatgccgataaccagagttttggtggttgttgataccatatatgtcccccttaatcttgtaatcttgtacctatgtgagagacatttttaaagaagaaaatcaagaaaaatgtctcatagcctcatttgtcatttttttcttctttaagacgtcaacagattttttttagaggaagtttctctaactaaatgtcttttgtcctctgtaaaatggacaagagttgaaacaagcaatgtatatgaaaggtaaagacgtcaaagtcaacacacagaccccagattgcactcagccacttctttgcttcccacagcatttctatgctgtaaaatgctgtcttcaatgaactagaattggagttactgtttgatcctcctcttatcctcttaaccttggccaaagatatttacattatcacttcctaactgatgtgccacatctattgcaaaaataagttgtggtgagcaagatactgattccttgtgttctcagggtggcctggcaggagcttctgggtcagttgtctgaaggtgccctgctccatttgccctaatgtgctctataaacacctttccttgaacactgtgacatgaaaaaggcttggaagtactactttaaacttcaaatgaaaaactcacaaggaagtgaaattccgtaattaagcaattaccttttaaccatttatgtaatcagtattgcttttgttctttttcagtttttttctcctaattttagtcaaggtaaacatctaagcagcaagtaatatactgatgaaaataaattttgagatttgtaatctagtaatttgtcttctgagtcttgtgttaataggaaccagaggtcttagtaaatgagaactatgattctgggtgcttaaattgttttatccgcacactcattgcgtgaaagatttcagcctataaggaagaaattatgtcagtctagagtctcctcattgtagaaaagttcccatttttatacttttgatgataacaaagcagctccattggattgtggttgacaatagcaatctgtatgtttttgctagcaacatacagatcataagtagaacatatttcagagttacacatgatccaagagaaagtgtgccgaattttgaacttggttggtagaaaaaggtgatttttttttttttggtaaagagatttttttagataaactctaagaaagtagttatttacagaaagtacactgaagtataaaaagatagtaaacatagtcataatgactatagttgctagctatatattcagtttatctgagggggcaggaactttagcatcatcttgttttatgaactctaatttacttatcaataatttttcttactagttacttgttgcaataacttatactattatacttcatgtgtggttttgatttcttaatggcagtatcttctttattagttgactatgggaaatatacaagtatagtgtccccttgtttgcaaagaaagggattcgcgtcttcacagtttactcacagctgcagtggtgagctgccctctcctggtcatctatgccttccagaactcccggtggataccagggaaaatcatacattttgccaaataaatggatgttttaatcatctttgatcttaacattattttgtgacactgtagtataaagctctgctgtagctccttacttttcatgtcttaaaagacattgttgacagaaaagatgggtcatcttttttctcccacgttcttgtaggcattctatccacctgagatttttgccccattacttcagtcttaatggacaaattttgtgccacccttgtttactaaattcttgagatttacttagaagatgtttcttagtttgtctatccactttgggaaaaagagattttcagaactgtcttaaataagtggattacccaagatgttcttttcatagaagattttttgttacatattttcttaaaaatgagcatcagattttctctactgttaataattcatgttgtacatgagtttactggtgattcttcttaaaaccagtgcttatgtttttatttttttaattctctattcttcaattcctatttcttataagcccatccttattttagactctagacttggggacctatgggattcgcatcagttatggtgcttaacaaaactttaataccagaattttagaatcttactttcttgttgaaagtagcagtttatcccagccttttcctattatataccttatattttgtatatactcttacattttctatatacccttatattttgtatttttaaaatggaaggaatgaaaaaaaaacctgtggtttttatcgtatttcccatttatatttgtaccttgctactagttgctatttctattaagattcctagaaaactttttatgacatgttgtttctaaagttcatatatattgtagtaactcagtataactcattatttactaaggaagcatactaatattgcatatcctctttaaaatcctacagttaagaacaaaagactagaagacatcaggccttttcatttattagtcattttaccttttagacaattttatgtaattatttttcacgtggcaaatttcattgtacactacacacatacgtttgcagaaggggtgcaaagttttggatacatggaaatttcttcttgagttagctagaatttcttttcctttttcaagttaagacagaaaacccagccaatcaattcagttttgatagattttaaaaccctaatcaatactttaaaattacttatgaagcaaattattaagagtaacttctaaacgtagaaaacatgaaaatcacatccaaattgtagaaagaagttatttacaacaaggtcagggcgtgtgccacttcttcctccagccaagacctttcctgaacttggtgatcatggataaacgagtgcccaagagtctttaatttgatatatgcattacatttctaagatcttaaactaatactatctctttgcttgtctttggtgttgagattgtttaaacctttcaagacctgattttgaatccttgctgtcatttactagttgtgtgacagacttgcccacttctcctttataatgtggaggtaatattcctacaatggatgcttgtgaaaattaaacattaataagaatattaaaatgcattttgtaagccaataaatggcatacaaatgtaaatagtacttataaaataaaatgcgtttaattttttaaaaatatatgacattcccaaaacggaaaaaggtattacagtgtctgttaaaccagacttaatggaatacttgatttttcttctcataatcaaccaattacattaatgtatcaaacctgtgtactgatgaagatattttaaatagtctttttttttgtggagggcagagaattgtgtaacttttatgtatcccactgccttttttattgtgtattgtgaacacaccacagcagaatttaaatagttaaatatttgttgcctcattaaattgtggcttcctaacttaacttcagattgcagaggactagaaaagtaggcatttaatatattattttattttacgagttttcttgatacataattggttttggatatatttcctcctaagtacagagctagcaccataaattacaagcagtaaccagatctttttatatgcctcactttatattgcttaggcaaccttctgtatgctgttttctctagtcctctccatagcagttaaacctgaactctcatcagagaagtaaaaatttcctgtaaaatgagttgttaaaagctatatgtttgaagtgtaagagcaggcccttctaatgtttaggagttagcttgtgaaaaaacaagcttttatctatgtgttcttgcatttcagtctgtatttctgaatttatgtatgtgtgtggcagtgtagggtagatgataaattttgtagcctaggaaacctgtatcccatcaggagagaaaacagatgttcttcctcctggttaagaactacatctatccatttagcaattatgaatctcttccctaggtaatactctttgagaaaggaatctttcagcagacaggatcaagaagcacatgattcattttttacattatgggaatgaatccttttacatttgccttctcctttttcatgctttcagtttaaataaaagtaagtagacgttccagtttaaatcacgttccagtttaaataccttacaggatgaaaggtattctttacttcctaggatcctaggattcctagtaaagggattctttcttacttcctaggatcagcgaattggagacactgtcagagatcacgaaagaaagttcgtcattcctcccatccccaatccagttcaaccaacttgtttctagccatgtttttatttaatagtttctgattttagcttgttttgattgaaattatattatccaagtcttgtttatgtttctctgaaagtggccaaatactgtttgttctacttaagtagtatttgcatctttttctgtcctcatgctaccactgtagttgaaacccttatctcttaccaaaacataatctgtcatctcgttgcttctctaaatttcttccatattgctgttggactgatcttcctaaaatagaggtctcatcatggctttctgttttccagcgaccattttcctttttcaaaggtatcctattgcctttaaaattgaggatagtgtgtttagcctagaattgacacccctcagtgttggccctagtctgtttttttcaggctgtatgccatagcactccttcacatgagccaaactggatggttcaggctttgatacttcactacctcttttctcatcctcaaatcagtctctgtctttgtgatacccatcttctcttccttcatcccctccccaaatccctgcatgttgaattcctacttcttcctcaagatcttagcataatgccacttctacttcttctttaaggtcagacatagaaagaaaagagtaggaactgtatttactgtatcaatatggtaaaaacaacactttaattccttttttaaactaaaatgatttaacctacttcatttatatagttcatccaaaaaaacagaatgaccttcccaaatgcaaatgcttaatatgtaaagtttagttaccatattaaagaagattctgcacaccatgccacttaggtatcaagaaatgatggtatggccaaaatgggcaaaggaagaatgaactattacagacaaaactatgaaactcagaggagctcatagtacaactgtaaatttatttgtttttttaaatttagggatgtgtaaagagctataaagttcttgacaggatttgataaatcatcagggaaagtagttaatgctttagggtaaaacattttaaaatacagctttaaaaatatataaaaatagagctttacactcctgttattaatttttaattgtctctttatgatgctaagcatgttggcactagactcagttttaaaaatgtctaccagcttggcatggtggctcatgcttgtaatcccagtactttgggaggctgaggtgggaggatcacctgagcccaggagtttgagaccagcctaggcaatatagcaagactccatctctacaaaaaacagaaaaattaaccaggtatagtggtacacacctgtaatcttagctacttggggggctaaggttggaggatagcttgagccgggatgatcaaggctgtagtgagcaatgattgcatcactgcactccagcctgggcaatggagcaagactctgtctcaaaaaacaaagtctaacagtgatgtatatgttataccagtgttatttggaagataacttgagacttttcccatgcatactgaatttttgggaaataaatttaagtttttctgtataaatggtcaaaaaaatgttatattgagagagagagaggtatactatccggaatacagtctgtgggatatgcctgtacaattaatttatccattcaggcccagtttcaaaggctttggaagatgggttgcaaagtttattaatcctcatcatttcttggctaagataattagtataatataaaaagtctttgattctctattctgatgacctgttttgatccttagagacagaactaaggattaaggtgagatgaatcttcttagtttactagccaaaacagtatactcagccctagaacagaattctctgtcgcttgtatttagcattccctcttgctgaaagtgttcttctctttttatatttatgatttctattaatgaaattgcatctctgtctcccatttggtggtgggggggagacaggggagaagaacagggccttgctctgtctcttagcctggaatgaagtggcatgatcacagctcacttcagcctcgacctcgacctcccaagctcaagtgatcctcccacctcagcctcctgggtagctgggactaccatgcacggctaattttttctttttttttttttttttttttgagacagagtctcgctctgtcacccaggctggagtgccgtggcatgatctcggctcactgcaagctccgcctcccagcttcacgccagtctcctgcctcagcctcccgagtagctgggactacaggtgcctgccaccacgcctggctaattttttgtatttttagtagagatggggtttcaccgtgttagccaggatggtctcgatctcctgaccttgtgatccacccgcctcggcctcccagagtgctgagattacaggcgtgagccaccgcgcccggcctaattttttcattttttatagagacagggtcgcaccatgttgcccagcctggtcttgaactcctgggctcgagggatcctctcaccttgacctgagattacaggtgtgagccattgggcccagcctgcattttcttgaagttgaagatttcctctgtgatcacatcaacccaagattctctttctctaagccctattagcatttcttataatgccattcaagtaccatcactaacttgattggaagttcctcagagcagggactgtgtttcagattttttgttccccacagtgcttaacacagagcctaatacaaaacaaattctgtgtgaattttttgtgaaagctcttggtatctctaatgtgctctcaaaaccaactactattataagataattagattttactcactaccagatttctctacctggccaataaggtttgcagaagttccagacctatcaggtgtttatttgcaaagaaacaaagtagtaaacttcaaaagtcatgaatgtactcttgagccctgtcctcacagaaaaaaaaaaaaataagcaaaatttctatttttttttttgagacagagtctcgctctgttgcccaggctggagtgcagtggcgcgatctgggctcacttcaagctccacatcccaagttcacaccattctcctgcctcagcctcccaagtagctgggactacaggcgcccgccaccatgcccagctaattttttgtatttttagtagagacggggtttcaccgtgttagccaggatggtctcgatctcctgaacttgtgatccgcccacctcggcctcccaaagtgctgggattacaggcgtgagccaccgcgcccggccgcaaaatttctactctttccgaggggctaatgctgttctcagctgtgaaactttattgttgtcaattctggcatttaattctgaatagggtgccatcaccttcactactctattcatgtggtctttcaacaaatgtattgaatactactgtatgctatgttagggataagaagtgacccagactgctataagggaaagataaaacagtagtatgagagtgtataatattctaacgtagtatggaggccaaggaaggcttttatggtgacgtttaagctgaaatccaaaagaattaactagtcgaaatggtgaggcaaagagtgttttgatccaaggaaataacatgtgcaccctatctactagaagggatgaattatttgcttgctgtcctgaaggtaggccattgtggcttgaaagagtgtgagagagagcatgtagggcaagatgaggctggaagagtaagtaaagatcagaaatttcaggcattgtaggccatgttaaggttttgaacgttatttttagagcagttgctaatgaagtatatgaagcaggggttataggagcagatttccattgttaaaagatagctatgcttcagaaaagagaatggtgagagggcctgtagtacctgcagaaataccagttaagaggctactgggaggctgaggcaggaggatcacttgagcccaggagtttagcctgggcaacgtagtgagatctcatctctactaaaaattttaaaaattaactgagtgttgcagtgcgtgcctatagtcccagctaccagggaggctgaggcaggaggatcgcttgaactggggagatcgagactgcagtaagccatgattgtaccactgcattccaacctgagcaacagagtgagactctgtctcaaaaaaaaaaaaaaaaaaaaaaaaaaaacaaaagaagttctaggcatgatatgataatgttgttatcttaggttagtgaggtgacagtgaagaaagattataactgaattataattttttaaagtaaaatcaacagaacttggtatggaactatttatgggagatgaggaagagaaaaacaactcctagatttctgattgtgccctgcgtatgctaaggaaatactcagaagggaccagttttaggaagtgcatttgaggcacctaggccagttgaatttgagtggtcaggtcaagagttttatatctgtgaatcacaagcatagataggcaggctaacttagggtttcagttatctgaggaaaatagagggctttgttgttttatttggtagccattagctatgtgtgtatctggtctgaattgagatgtgttatagtctaaagactgaaaaaaggctgtaaagcatgttattaataatattttacattgattacatgttaaaatattttagctatattgtgctacataaaatatattattaaaattaattttacttgtttaacgtgactactagaaaatttaaaattaccaatctcacattagtggcttgcattacatttctgttgggcagtgctggtatagaaaagcaagcttaggattgggccttgagatatcccaatactgaatgtctacatattatcagagtcaagttcttggcattttcgtgtgaaaagactcagatacactacatacacataaagtcttagcattgaaaagacctcctaggaggctgggcgcggtggctcatgcctgtaatcacagcactttgggaggctgaggcaggtggatcacctgaagtccggggttcaaaaccagcctggccaacatggtgaaaccctgtctctactaaaaatacaaaattagctgggcacatttctgtaatcccaactacttgggaggctgaggcaggagaatcgcttgaacctgggaggtggaggttgcagtgagccaagatcgcgtcactgcactccagcctgggcaacaagagcgaaactttgtctcaaaaaaaaaaaaaagaaaagaaaaagacctcctagggaattttaatgtttcaaaataagaatttttcttttcccacaatctcctctttaaagaggccatcattgaaagtagtttccagcaataataaaaaaaaaaaatagtagtagaagaggaggagccattactttcatttctgttcattctgaagaaacagagatgactctttctgtataactcaaattcttaaaagaaacccttgatatatagtgtcaattatatgaactctacctcagggtacctaaaaaaagaatgtttggttacccgaatgagggggaggttttcctttagagagaagtattggtgccaacaaatgaaaaaggaatagtttgaacaccacattttgcaactcctaatgaaataatggatttaaagaattatcgatggctgcttatttgacaaaaagagacacctgacattgtgccacttcagagaacacagtgcttacctagaagtattctttccaaaatttaaaaaatgatctaatctacatataatcaggcttctagatccaactacaagtttataggaaatataaagactatctcatgaaaatacaatcagcaaaatccagaatgtgttaaactctacaggatatcacttcatttctttaacaaataattgcatggaaaagagggaggtggactgaagggaagaaatatggaagggggaaactacagattcagggacttagtttattacaatggacctttttgggatcttataaagcatatatatttatcaggtaattatagaaatttgaacactgatgaacatctgattagttattgttggtttttaaatatatgatattgtattatggttacatttaaaagagtccttatttatcatttgtttgtttgtttgttgagacatagtcttgcactgttgcccaggctagagtgcagtggcacaatctcggctcactgcaacctccgccctccaggttcaagcaattctcatgtctcagcctcctgagtagctgggactgtgggggtgcgccaacatgcctggctaatttttgtatttttaggagagtcgaggtttcaccatgttggccaggctggtctcaaactcctgaccccaagtgatctgcccgcctcagcctcccaaattgctgggattatatgcgtgagtcactgcgcccggccattatttatcttttagacatagcatgctgaaatttttgcagataaaatgttttgcttaacaatagttcagtagaggacaagggtaagtgggtagggatacagatgaaataagattggctgtgaattaagaattgttaaagctggaactttgggagtttattatactattttttcaactttcatatgtttgaagttttccaaaatagtgaatgagtaagaacacacacagacattatacagaggggaagtgtcattaatgattttatctactatacctttttgtatcagaagatctggagaagaaacagaaatattaaagtttatttccatgaataatccctttactttcataaatatctgctgggcctggtgatttgaccagtaaatgggatttatctttttgtgtagccaataaattggctctttaatcttttctcattcacgttaactttctcttaccctgtaaagtgtgttgaatttaatgtttattattcctatgagttggggaattggtataaaatacatacataaaacgtgtaagaaaaattataaattgaacacctatgtaaccatcacccgggtcaagaaataggaccctttacatgtttcaaagctgtgtggtaaaaaaaaaaaaaaaaaaaaaaagaaagaaaggacctgggcagtactgctgacgcacatcccttctccaccacatacttcattcctcccctctttcatatatatgtgaatattcatcaccctaatatttatggaaatcaatcacttctttgctttttattttttctcttctcttaacggtatagtttgtcttccctctcgtgttcttcatacttttactgtatattcatgtatgtataatattattttgcacatttgcagacttaattagcactattccgtacgtattcttctaaacttatctgcactctgcatcccatagggtttcctttatactgatatgtgtagctgtaattcattccttttttaactactgtatagtattctattgtatgattgcaccaccaatgtattcgttctcttactgatggacatttaaatttttggaagttttttgcagttataaacaaagctgctaaggatattcttgtgcatatctcttggtgcatgtatatgagagtttcagtagagcaggggttggcaaactggcccacaggccaactgcctctgtttttataaataaaacttttaaacagttattctcatttgtgtatatattgtctgtggctgttttcggcccataatggtagagttgtgtagttggcaacagagacattatggcacacaagcctaaaatatttactacatggccctttaagaaaaagtgtcctggctgggcgcggtggctcacacctgtaatcccagcactttgggaggccgaggtgggcagatcacaaggtcaggagattgagaccatcctggctaacacagtgaaaccctgtctctactaaaaatacaaaaaattagccaggcatggtggcgggtgcctgtagtcccagctactcaggaggccgaggcaggagaatggcgtgaacctgggaggtggagcttgcagtgagctgagatcgcgccactgcactccagcctgggcaacagagcgagactccgtctcgaaaagaaaagaaaaagaaagggtgtcctgacacctactcttagagtgtatagcttggagtagaattattagatctcctcagcaagggtaatcatcaactgtactggacttggcaaagtatcctgcaggaattattatatgaattcttacctcctggtcaatatttggtggtgttaaaattttgttttgcattcatatctcactatttatattgctgtttctctgattactagtcaggctgaacacagtttcaaatgtttattgaatcttgcatatttttctgttgattgcctgttcatattttttgcccatattccctatgtgttttttttctcagagatatgtgggaattttttttatatgttccagatatgaacactttgttggtcatatgcattaccaatatttcctcccaacctgtggcttgtcctttaagttttcttagtgatgtcttctaaaaaaccagaacactttttattggaaataatttcaaattttaaaaagttgcaaaaataaaaatggtactcttaacccattttctgtttagaaaaaaacaaatacagcttgctgccagtgcatttttcatcaggacaaatgagaaattggcatacctgtgtagcctttatccagtcacttattatttacattttactccattagctttataatcatttgtgtgcttgctcactcttcatgtatatgtatgtgtatatttgaatatgcatatacacacaattctgaaccatttgagattagagcacatatattatgcttggctttcatgagtgtatagtgatataattttatgaaaattaccatatctaatttcttttttttttttttttttttttttttgagatggagtcttgctctgttgctcaggcaggagcacagtggtgtgatcttggcccactgcagcctccacctcccaggtttaagtgattctcctgcctcagcctcctaagtagctggagtcacaggtgcgtgccaccatgcccggctaatttttgtaatttagtagagatggggtttcactatgttggccaggctggtcttgaactcctgacctcaagtgatctgcctgcctcagcctcccaaagtgttgggattacaggcatgagccaccatgcccagcctctaatttcttaatggttcctcttcctgtttaaaagtttttaatgttaatgtagttatttactcaatcttttcctttatggtctgtatcttttaaattctttcccatatctgagttttaaaaatatttgctgtattttctcatatgattgttaaaatcttgctttccatatttaggaatgtaatctactttgttttttttttatatagtgagagatgaataccaattttgttttatcccattgtcccagcaccatttattgaataaattgtttcctttgtttatagtgacacctatatggtgtatcaagtttatgcatgcaggtcgttgggctacgtgattgactgttcatgtacttagatcacactgtcttaaaaattagagctttatactaattattgatatctgcctggcaagtctttctagcatgttcttctcaaatttaacatttactttgataaatagttacatagcaacaattcatgtaatcatcacatactcaaaatacaagatattaccagcatagtgaaacccatgctctcaggatgttgcacccttgcagtaaccttctccttctcccaacagttgggccttatcctgacttttgtggcagtacttccttgattttctttgtagttttgtcactgataacttctcctaatctatattgtctagttttccttttttttttttttttttgagctttatattcatggatgcatccaggagatataattttgtatacatcaggcttccttaataaaacattataaagctgtggttcatttttttgttttttagttgatgtgggatattttattttgtgactataccagagtttattcactctgctctaagtgagcattttggctattgttaaccagtgtttctcttaatatgcatgttttgggttaatttcaggtaatacatgtaggagtagaattgtttttccctatggtatgtttatcttccactttaacatggaatggcagactcttttttcttttctttttttgttttttgaaacggagtttcactcttgtcacccaggctggattgcaatggcgtgatctcagctcactgtaacctccgcctcccaggttcaagcgattctcctgtctcagcgtcccaagtagctgagattacaggcacccaccaccatgcctggctaattttttttatttttatttttagtagacacggagtttcaccatgttggccaaagctggtcttgaactcctgacctcaggtgatccgcctgcctcagcctcccaaagtgctgggattacaggcgtgagccactgtgcccagctggcaaactcttttttcaaagtagttttatcaatttacattataaccaacaatgtatgagagttcccattgtctgcatccttgcgaacacatgatattgttagtattcttaattctgttttggtagggggatagtagtattttattttggctttagtatgcatttaccagatgactaaatgaagtcaaatacctttcatgtgtttattgatcacttagatatcctcttttgtgaatgacctatttaagtcgtgctggagtttctacttctttggcttaataacttgaaggggttatttatgtattctagacatgcgttctttatatgttggacagatatctccttccacattgtggcttgccttttcactctcttaatggtgtttttttgttttattttgtttcttgatgaacagaagtactttatttcaatgtagtcaaaagttatcaaatttgaattcatgctcaatcattacttacctactatgtgaccatggccagcttcgagcttcagtttacttatctgtaaataggtggtaataatatccatgtcattgggtaattgagaagattaaataagataaagcacttattatagagctttttacctagcagtccctcaatagatgttaattgccttcctcatcatttagggtgctcattttcatactgtcttttgggaaattgggtagtattcatgagctatttgcaaatgaatgttttggaaattagaatctcatataattatcctaggaatttagaagattgcctaaaatagtaaatcataattaatttgcccagagaactaaaatgtaatattttctctgatgtagaggatttacactgaatatgggatccttgtataataaaactcatgactggagtatcttatccaggaaatgagaagagataataaaaaatagtctaacccttctacatgcatcatattttaaaccaagagtagttctctttgcctccaagagaaaacaaggtttattaaatagtgaaaaattgctaatcactccagcccaaagtaccttctctctcctaggaacatttagtgcctattgatgattttcattttcccatatttcatcattcaacaataatttgtaggacatctcttactatgcttactatgcaccaagtatagactcattctttgtgtgaatggagctaagaatgaagagtggaagattttgtaaaaaagattttaattataacaccatgccaaaaaatttcaaagttctgctactggtaatggcggaattgttcataatgtaccaattttcccacaggtaattctactctggatgaagcttatactataaatatttagtacataaaatctaaatgtttatatacacacacataattgaaagcacactttaatgcttcaaaacataatctggccagacctggatggctcatgcgtattatcccagcatttagggctgttcagacaggaagattgcttgaggccaggagttcaagaccagcctgggcaacatagtgagacccccccatctctgaaataaaataaataaaataaaataataaaataaactatctgaaggcactggagaccaaaccaaagtgggcagaaactcacaggaagtcaacatttagaataaagaaaaagcatttgatgactttagttttagtattttatgcttgagggcagttactaatggctacaccatgggggtgattagaactcggaaatcccaattcttactgatttggggaatcagaaaatagaggctactatagcacctggaaagtgaagggaaattctcagagggacatcccaagttctgcatataaatgattgtcaaatatttgatccttgaacaaaacgtgaacattcttcagaggaacataatggaatccatagcctctaaaaagtatcattcacaagatgtagaatacaatccaaaattaccagatataaataaaaagaaactggaaactttgatgtatactcaagaaaaggcaaccaagggacactatgggatgacccagatatagtaattagaaaatcaaaaaaaaaaagtttttttgtttgtgtgtgtgtgtgtgtgtgtgttttgttttgttttgttttgttttgttttgaggcaggagtctcactgtgtcacccaggctggagtgcagtgaccatttacaggcataatcttaactcactgcagcctcgagctcctagactctggtggtcctttcacttcagcctgccaagtagctcggactgtaggtgggtgccaacacaactgactgacaaggattttaaagctgttattagttatgactatgctcaaggatataaaatggcatacaataaaataaatatgaaacttgctggagaaataaaactataaaagagaactaaatggaaattttagaactgaaaaatgtaatatctgtaataaaaattcactgtgtgaccttaataacagattgaaaatatcagtgaacttgaagatccaaatcactcaatctgaaaaacagaaagaaaactttaaaaataaattcaaaagagcagtgccccagtgactcattgaacaatattaagacctaatatgtgtcattggagtcccagaagaagagaaggaaactggggccaaaaatatatttaaagagataatgggagagaattccccacatttagtgaaagatgtaattgtacatattgaagagattcatagccaaattgatgaaaactaatgataacaataaaaatcttataaatagtaacagaaaggaataataataaaactgagagttgacttattagaaacaatggaggccaaatgcagtagaacaccatctttaaagtgcttagggaaggagagctttggggaaagctgggaatcaagaattctacatccggcagaaatatcccacaggaatgaatgccacatgaagattattttagattttaaaagtgagaaaggaccagatgcggtagctcacacctgtaatcccagcattttgggaggccacacggcaggtggatcacttgaagccaggagttttgagaccaacctgcctgaaaccctgtctctattaaaaaaattaaatttaaaagagaaagaatttgttgccagctaccctccactagtagaaatgctgaagtaaattctttgggatgaagggaaatgatataccaagtcaaactcctgttttcaaaaaggaatgaagggaaaacttgtcttattttatcctctttatttgtttcaaatgtatatgatgttgaaagcaaaaaaaaaaaagtaacattgggtgatttatatgtagatataatacatatggcaactatatcagaaaggactgggatgggcaggtaaatagaatcatttggtgacaagttttttacatttttcataaattgtatgatattaactctgaaatgttaatatctgaaaatgtaaaggtatatttcagttcttagaacagacacttaaaaaaaaaagacaaaaaaacataaggacataaacctaaaatgcaatagagaaattatattggaatcttaaaaatattaaattactccaaaggacgaaaggacggacagagtaataaaaagcagtaattgaaagatctaaatgtggacatattgataattacatctggccaggtccagtggcttatgcctgtaatcctagcactttgggaggccaaggcaggaggatcctttaagcccaagagtttgagacaagcccaggcaacatagcaagaccttatctctataaattaaaatatatatatatatattagaaaaacataattacatgaattgtgtatatacagaacactccaattaaaaggctaaaaataagcatgtgaaagctggagtagtcatattaatcaggtaagtaaactttgagactaggaatagtagtaacagaggtaaacaaggatgtttcccaccgggtgcggtggcttaagcctgtaatcccagcactttgggaggccgaggcgggcggatcacgaggtcaggagatcgaggccatcctggctaacacagtgaaaccctgtctctactaaaaatacaaaaaattagccggtcctggcgtcaggcactacttaggaggctgaggcaggagaatggcgcgaacccgggaggcggagcttgcagtgagctaagatcccactactgcactctagcctgggcaacagtgcgagactccgtctcaaaaaaaaaaagggatgtttcagaaagataaaagggtcaagtaaacaacgaaggtactggaatcagaccttcaaaatagataaaaacaaaatttgacgggattaaaggatctcctcatcatagagaagtccacaaccataattggaagtttgaatacctgtctcaataattgacagaagtagtagattaaaactaccagtaaggacatagaagatcagagtaatactgtatgtaataccacccaccttgacataattggcatttatagaacacaaaatccaataattatagaatatgcattcttttccagtatacattcagcaagatagaccatatatatggtggaccataaaataagcttcaaaagattgaaatcttagactttgttctttgatcataatagaattagaaatcaataacaaaaaatctggaaagttctctgatcacaatagaattagaaatctatagcaaaaaaaaaaaaatctggaaagtccccaaatattgggaaattaaataatatactactaaattaaaaattcattaaacttttttttgttactgcttgattagctaattgttacagatgattctctgattttctctctgtctctctctctctctttctttctctttgtctttctttcttgagacagagtcttgctttgtcacccaggttggaatgtagaggcacaatcatgtctcactgtagccttggcctcccagactcaggtctttttttatcctcttaatttgtttcaaatgtatatgatgttgaaagcaaaaaaaaagtaataatgtgtgatttatatgtagatgtaatacatatggcaactatatcagaaaggactgggataggcaggtaaatagagtcatatggttacaagtttcttaacatttttcataaattgtatgatactaactctaagtagagttaatatctactagagctaatatctactcccatgtatagttcctaaggtccctcctgcttcagcctcctgagtagctgggaccacaggcgtacatcactatggccagctaatttttaaattatttgtagagacagtgtctccctatattgcccaggctggtctcaaactcctgggctcaagtgatcctcctgcctcggcctcccacagtgctgggattacaggcatgagccaccacacctgccctctaatattcttttattaaaaagagagaaaaatacacaaatagaagagattgtgacatagaggtgaaattctctcagttttgtgtgtgttttcctcttgagtttttctcccatatttaggaaaagatgaattataaactctttatgtgcaacttctttaaatatagcatatatgagtctccacttcgtatatagtgtcaagctggtacacaaaacagattctcagaaaataaactaagaaaatattcctcaagtctctataaatacatattttatcacatgtgattgtactatatcaatctcattttgaatctcattttgagagatgcacttacactgtttggtatggcgttttgtattacaggaatgcttttcaggactagcagttgctaagggaaggaaatgcttaagcttgtctgtaaacattaacttcagcatatacacattaataatggcttccccacctgtaaccaacctacttacctggcaggttttatttcctaggctaaggatttttgagaactctatcataaaacagctgaattatgacctcctttggtttttacaatatgcaaatacagctaaatactcgttaatattctgcatttaaattcttcttcttaataaagacatgcactttattcctgctcccacgtatggttcctaaggtcccagagttcagacttccttacaatttttaattctcttctatcttaaaccttttgagagctgagcaataagcttttcattttcttcagaatcagctccagtctcaggattttgaggccatgtcagtagagtaagaatgtaccctccatgttttctatcaaaaataaaatattaacttgtttaatagtttcagttttgccagatgaaaataattctggtgatggctgcaaaacaatttgaatgtacttaataccactgaactgtacacttaagaatggtaaagatggtaaatattatgttttctatatttcaccatgattttttaaaagtttaaacaaggccgggcatggtggctcacgcctgtaatcccagcactttgggaggccgagacaggcggatcactaggtcaaggagatcaagaccatcctggctaacacagtgaaaccccgtctctactaaaaatacacaaaaattagccaggcgtggtggtgggtgcctgtagtcccagctactcaggaggctggggcaggaaaatggcatgaacctgggaggcagagcttgcagtgagccaagatcctgccactgcattccagcctgggagacagagtgagactctgtctcaaaaaaaaaaaaaaaaaaaaaagtttaaacaagacaggaggatcacctgagcccaggagttcaagaccagcctgggcaacaaaatgagatcccatctttacaaaaaaaatttaaaaatcagcagggtgtgattgtgtgctcctgtggccccagctacatggaagcatcagtgagccatgtttttgccactgcactccagcctggctctggcttaaaaaaaaggcggggggagtgagggggtaagaaaagagtcaagaagacctgaatcttttttttttttttttttttttaatgaaaatggcatttgttccagaggcaagagtagcctccaaattagtagaatgccagatggagatgtggggtggggtgggatggggagaaaggtgttgaagcaactcaatcatgctactactaatagttcctcttgggttgagacttaggatggtattaaattcaattgttttcttttctgttgtttttatacccgtgtgtgctcttgatattatattgagttggcgtagttgcttgcagtcagtagataagaatagtaatgggataatatgtatgaaaaatattgacagcacaatacttttctctttcatggagttcagacataatttgggagaaataaagataggtagtcaatgtctatccagcacatcctaaaatttatgttcattgttgtagaaaaatgtatataatctaagttcccatagtttcaggagaaaacaaattgtaaattaaactttctgtatttttgctccataccccaagattttacatatctacatctaactatagcctcttcaagtactcctattgtttgaaaacagaaaactttaaaatggaaaagtgggctcctccttttgtcctttcttacttgaattttctattttgaaaagaataataggggagaatttcacagggctctaatttatttgacccctctttttcctgttttcctattatgactttaataatatacttttatttgaaaatatttctaagagtcacttttttggggagaagaattagtatgcagttttgttataggcacctcagttagatcatagtaataatggtgatataagagaaaaacaattctgactcttataaaattatcagaagggaaattttccagtttattaaaacagaaaggacagttggtttggtttagtcatcaaaataaactctgactaactagattcccaagttctatattgtgcttgaattttccattgggaatgaaacattccactgccctttttactgtttaacttaagctgctgtgaacactcagagaatggccctgtggctgagctgcttattttttttttttaatctattcattttatactttcagacagatttttccctggggtgaaacaaaggttaactgaaatttcctctgttgtgtacctgaacgaatcagcagttcgagaaggaaatcccattgatgggccaagagagtgacaggctctatttaaagaattcccccgactgtgtggtagaccagccatgccatgaatttaactgttcctgtggtccccatacttgtacccaccaaaaaaaaagagagagagagagaaagcgactttgttctgcaaacgttggcctaagctttgaaaaccatgagccattgagttttgtgaattcaagttagacagtaacagaggccaagactctaagcgaacaatatctgaaaaggaagtacacaaaaacaggtagaaactgtttaactgttttatttctctgtgtatatacatatttatgtgtgtttatacacacaaaaaaataccttttttgcattttatgtagccagtcctaattacatttgatcaatagtgtttgttaaatttttttaaatatgtaacaaatatgaaggtttttcttgtttttacagcttttttgctccataaaagtatcctggtttttatcaggacatattatatgtattggaaatgaaagtcagcacggtgtgagtttaaatggttaaaaaaaaaatggatttttatattacctctgcaggagcttctgttaggaccagctcatgtattttgtattttttctgtataagggaaactgctttaaatatgaaaagatggtatcttaagttggattaaacatccgtaattcatgtgtatttaacctcaggacttgtgagccttgttgaaaaatccagctttaaaccttccctgtaggcctcaatagtgcatactgcattgggattataaatagtcagtctgtttctggagtgtaggttagtatgtattcccaggaggcatgaactatttacatttctaacaaatgtttcacatatgttgctgattcatatttctatgtacaaatttaggctttaatttttttaatttccttttttattagaagttttgttataaaaagtttcttaagtgtttcattctttctagcatgggtggcttaaggagattggaggggagcgtttcatttatttatatagagattttgatgttttgaaagacaatagaattaatagagaaaattgtccagatatccagcgcttggatttttgtttgagaagtttgaggaagcagatgccatttgagttggtttctatggaaaaatttatcttagagatgatgtagggctatatttatgttcacaaatgagaaattgaagctgagagaaagagaaaatgtttaatacataattactcaatatgtcttggaagaacctaggtttttattcatacctggtgtttctttataaactgcctctcttttatcttgagatggtattttcgaaattatttctctttctcattttcttctaccatttcctgacattttcttgtcttttgttctattcttcttcgtctcttatttttctatattggttgtactgtaaataggttgctagcaacacaccttaggagcaggcttttggggaatgggtctaagtattccatttggcctataataggctatattgttgttttggaatataattttgaaaaaatcaaatttatatttatcctgctagttgatcaagctataaatcaatcaatacttactagttgctgcttatataaatagaagagttaaccagtgactcagacagatgacaattgactattaaagatttttttaaattggcatatgtttaggaaaatcacttgtttcttcaaaatttattcattaagcagtattttttgagcacttactatgtgacaaacaccacacaggtgatagagatacaacagagaggaagatggaactggttcctgtctccttacatcctggtgtaattatataataaaagttaaccacaagtagaaacttggggcattatttttgtaaaatctcagtcaagtttctctctacatagaagactagtataacttcagataccatcattcatatccatatcagaatatagtcctatgttaaaagtagaaagatgcaattttaaacatgttttcccattagtaattgtcatgtggtacatgatgaaatgaaattgttgaaatgagtaccagtaattttattattagagaaagtcagaacactattaataaaataatttagggagattatatagcatattggttaagagcatggtttggatgtaaacatgggtttgagccctctagtctgccactgagaagatttttggtattaaatcaattattattcatatttttatgaattcataaacctcacctgttctcatctgtgaaataaaattgtaatacctacctttataagattgttatgagagttaaattagaaatacaggctgggcatagtggcttatgcctataattccagcactttgggaggccagggtggatcacttgaaatcaggagcttgagaccagcctgggcaacatggtggaaccccatctctactaaaaacacaaaaattagctaggtgtgcttgaattctcagctactcgggaggccaaggcacaagaatttgcttgagtccgggagtctgaggctgcagtgagccaagatcacaccactacactccagcctaggcaaatgagtgagaccctgtctcaaaaaaaaagaaagaaggaaagaaaagaaaaatacataaatgtttaacttagtacctggcacagaataagctctttatatgtattagctgtttttatgtcctatattctttttttattaatttaatcttgattctctttttccctccctccctcccccccgttcccgccctccctccctgcttccctcggtccctccctcccccttccctccctccctccccccctcccccttccctccctccctccccctcccccttccctccctccctcccctcccacctccctccctccctccccccttccctccctccctccccctcccccctccctccctccctccctcccccctccttccctccctccctccctccctcccttccttcctctctgctgttgttgaaacagagcctctctctttcatccaggctgaagtgcagtggtgtaattactgcccactgcaacctctgcctcccgggctctagcagtcctactgcctcagcctcccaagtagctaggactacaggcatgagccaccatgcccagccatgattttctttctctagaaaagtctgttagtggggatttgaacattctttttgtattatacatattttctttgaggtgtcatacattaaaatcaatttcttcaaaaatcaggatgagcatttgtacaaaagtatacagtcaactaggatgaggttttttaaaagttgttttccttttaacataaagttgtatgtaataatttccaatccctcgtgccttcttgcttcctttctggcaatctcaacttcaaatcagtaatacttattataggtacattggtacctataataacaaagcgactttgttctgcaaacgttggcctaagctttgaaaaccatgagccattgagttttatgaattcaagttagacggtaacagaggccaagactctaagcaagcaatatctgaaaaggaagtacacaaaaacaggtagaaactgtttaactgttttatttctctgtgtgtatacatatttatgtgtttttacacacaaaaaagtaccttttttgcattttatgtagctagtcctaattactattatatacttattataggtacatttatgtagctagtcctaattacatttgatcaatggtgttaaattttttttaaatatgtaacaaatgtgaaggtttttcttgtttttacagcttttttgctccataaaagtattctggtttttatcaggacatattatatgtattagaaatgaaagtcaacacagtgtgagtttaaatggttaaaaaaaaaaaacatttaaccatttggacttaaagaccttctgtcaatattctgtctagaggctgggtgcagtggctcatgcctgtaatccaagcagtttggaaggctgaggtaggtggatggcttgagcccaaaaatttgagaccagcctgggcatcatagcaaaaccccatataacacaaaaatataaaaaattagccaagcatggtggtacacacctgtggtcccagctactcgggaggctgaggtgggaggattgcttgagcccaggaggttgagcctgcaatgaggcatgattgcaccactacactccagcctgggtgacattgtgagaccttgtctcaaaaaaaaaaaaaaatctatctatctatctatatagatagatagatagatttttttataggtagatagatttttttttttttctggagctaaattgaaacccaagtagctttgggggcttgttatccatctaatatacaaattcttccttctataccaagtcatgtcttgccataatagaaggtagaacttttaaggagatagggtaccacattatggtgaatgaatatttcttttgtggtcaaaatcatcaaacatttgtctatatttactgcccctgaattctctccttcagttctctttttaatccagccaggtttttgcatcaccattccatccaaacttctcttaataggatcaccagtgactttcctaataaattcaagggtcagttctcagtctttttcttacctgccctattggtggcatttaccataatcgataacacctcttctttgatagatacattgtgtttagttggttacggggcactgacctattcccccaccaagtttcctctcacctcactggttactcctaaattcttgctcatgttctatcctttctctacactcaaacccttggtactctcacccagtcctgttctaaataccatctccatgccataattgacaaattttatttccggttcagatctgtctctgaaacttaagactcataatccagtatccaatggcatactccacatcttcatttgaatattttaatactattgctaatccagcctgtccaaactaaattcatctttccctcaaaacatgttcctctgcattttttagttgcagtaattatcattttagttgctgaggccaaaaacctggtagtcatcttttactgtgttcttcttttactttttttttttttttctgaggtggagtctcgctctgtcgcccaggctggagtgcagtggtgtggtctcgggtcactgcaacctctgcctcccgggttcaagcaattctcctgcatcagcctcccaagtagctgggattacaggcgcctgccaccacacctggctaattttttgtatttttagtagagacagtgtttcaccatgttggcccggctggtctcgaactactgacttcgtgatctgcccgcctcggcctcccaaagtgctgggattacaggcatgagtcaccacgcctggcctcttttactttcatatccagttcttcaacaaatcttattagctttacctccagattatattcagaattcctctacttctcagcatacccactactccaccctggtcagaggtactatcttttttggactgaattattgcagtaacattctaactgatctccttgcttctatacttgcccttcccatctattttttcttctcagtggagtgattctttgagttataagtcaaatcatattactcttacgagtttttgtttcactcagagtaaaagtcaaaatccttataatggcctacaaagcccttcataaactaatacctctgtactcttatcttcacattcccttcattttctgcactctagccatactggcctgtctccggttccttaaacacatcaggaatatttttgccttaagaactttgctttggctgtgcctactgcctagaatgctcttaccgcagaagtacatggctaattcttccatctcctttaagttgttgcttaaatgtcagtgaagggtattctgtctaccctatgtaaaattataacccgtacccaatttccattaccctgctctactttttcttttttccaaagctcttatgcctctctaatgtacatcatttacatatttaatatgtttggtttttaattgtttcactttcccactagacgataagttctatcaaggaaagcaatgtctattttgttcattgatatgtatatcccaagcatctagaatagtgcttgcaaatgatagtaactgagttaatatttgttgaataataaacgaatggtaaatattgggaataattgtaatgtttagtttaaccctgaatataccgtcaggtttattggacccaattttagtttgaaaatttttttttattttgagtgtttctaactatttgtaagaattgaggccaggtgcagtggctcatgcctgtaatcccagcacttttggagaccaaggcgggtgaatcacttaagcccaggagttcaagaccagcctgggcaacgtagcaaatccccatctgtacaaaaaatactaaagttagccaagtgtggtggcatgtcgcagtagtaccagctacttggagggctgagatgggaggattgtttgcacccgggaggcggatggaggttgcagtgagttgagatggggctgttgtactccagccagagcgacagagtgagactctgtctccaaaaaaaaggaattgatagtacatactttgattctttcttaaacgtcttccaaagactagagaagagttttacttttcttcacaataaaactaattctgtttcagaattactgtgtgggtacattggacccttttataaatctaagatacttcatggcctcctgccatatcttgaaaaactatactgtttcatcatcctaggaataattttatcattacttattcattatttccagttgtactgaaaaagactaaattattaattttttaaaaaaacagaagaatgatgaaattgcctagaaggataatgcaggagtgacatgaatcatcactgttacatcatccttcacttttattattgtgctgcctaaagtattgcattatctttcaagaatgtgcagtagaagtctggagacacactgtctttataatcttctttcactttcattgaacaaggctgagaattcacaattttatattttccacacaaaatggcaaataggaaattgacaaaacatgttttcacaatttttagatgaatcagaagatgaatgcaaagaaacacgtagtctaggtactagaacctaatgatgtaatgaacttcatcttttaagtaattctcagactacgatttttcagtggatattggtagatgttttttctaaaactcaagaactgataagtgaatgatgtatttctgtgtaaaaaaaaaaagcagagtattctcatagttactcattcaacagaacattgttcatcacacaatatatgacaggaatctgaatcatcctgctttgataaggacatgtgattttttttatattttatgatatttgtgcatctaaatttacttcatctggtttctatcaaatgggcaaatgctgtagacaggtatatatgcaggggcgattagaaggaaatagatgatatagaaatgaaaaattttttttcaattgatcattctgattgttgcttatgaatctaaaagtgaaaatgttttacagtttttttgtttttgtttttgtttttttgagatggaattttgctttttgagatggagttttctcttgttgcccaggctggagtgcaatggtgcaatcttggctcaccgcaaccttcacctcctgggttccagtgattctcctgcctcagcctcccgagtagctaggattacaggcatgtgccaccatacccggctaattttgtatttttagtagagacgtggtttctccatgttggtcaggctggtctcgaactcccgacctcaggtgatccgcctgccttggcctcccaaactgctgggattacaggcgtgagccactgcgcctggccatgttttacagttattaagcaaagaagaaatatatttaaaatctgatatgagtatttttaaacagatgtaatctaggttcatgcatgataattgatgagtagttgcattccacatgttgcatatttcaggtatgtttatggaataatatgcgtttgctgtctttatagtctcattaaaatgtcttataaaattatttttcattatctctttattcttctataaattatgaaatgacttagtttattaaaaggtcccattggacccagatagtgaatggtgaaaactatttttcctagtataaaggagcaggaatataatgaaaaggcactagagatgtgaagatgactaaacttggagagatgaagtactggtggctggtagggtagtaggtagactttttaggccaagtaaatgaaacaactaaactgctattaaattcagaaaaattaaaatgttgtgtaagaagaaaaataatgtacttcattcactacatagtcattatataaattgaatataaatttaacctgaggatggagggagaagaaattcagatagggtgttataagataattaaatcctcttttattatgaatttagaaattagatagataaatccattaaaaaaaaacagaatgaacatgatttagaaatattcaagtaaataccaaaagaaatagcaagaggtgtaagtggttgcctcttgggaatgggagctggcataaggaggagagaactggtattgtttcttacatggtattttagtatttttagagtttttaaaaaccatgtgtattgctttgataaaaattaatagtaaaatatgaaactggatttagagagaatctcgctggtatgtatcaaatgaaattgaaggcacagggaaaacagtcttagatctcaggtgatgaacaactgtaatgactggaagggggaaccaaagtactggcttggaaagacattttaaaggaatataatgtggaattttaagacctattctgattggacaatgggagtgaaatattaggttaagatgcaaacaaacctgttttgaggcactcataacaataggggagaaggtatttatgcccatttcaagtggagttggaatggtaggttgtgctttggatatgttatagcttgcaatgaatgtaatataaacatttgtgatatatcctgtaaacagtttgaagtgtgagcctgaacatgtttgatctaaggtctggaggaagatgtgaagcaaatctgacctaaaaaaaattataggaaaaaagcaaattgttctggatttgtttcaccaaggaacaagtaagcagagaaccagacactggagaaaaaaaggagtcaggaagtagacaaggaaatgttaaaagaaataataggataactgaaagaatgtagcttccagattgctagctatcagcagatagatagaaacttttatacagcctttaaatcttccctagaaacctttttaaaagtagcttcttgattagatttaaatgggttttatttatgcttgtcattttacagatattgtaaatatacatatggtatattttctttttgccttttgtggacagttggaggtggggaacaggcatccatagtcagtatatttaaaggaagaaaaaacaacttccataatcttgttatattgactgtttctgttgatacattttccctttctttcttgtttcttagtatgatttgagggtcattttaaatttctgaataaatattttgtaagccaggtggttcactgactgaacgtttgggacagaggtaatgggagatgaggccttctctctctctctccatagacaaaggccttaatatgactaataacttagcgaaagctctatatgaccctctgctaagcacctgtatttatttcctctttcttcttcctcctctacctctaaaaaaagaaatccccatttcttttacacacatgttaaaaataaaaaattgtttctggtaaatttaatatgatttaaaataagatgaacattttgatgctttacttgcaaattctgctattaaaatgtgttttatttaaactattgccacttatacagtgaaaaattttaatgactaaaacagttttgtgaccaatgttataattgaaaagtataaatttgagaaaaccaagacagaaaaagggagcagtttcagaagaatgtaagtgaataaagtggcttagccctcaggggatttgaatgtggcattgtgtgtatttcaaaagtttccgttgaaaacagatgctgctgatgaagttgggaatagtaacttcatctgtggctgtttcagttgcttattagaagtgagaaagatcccaaggggtttatctggtgtagtggagttaggctcaggaaaggatatgacataaatatctggcagctttgtctgtgtggtctttaatccataaacactggttaggtacaagcatgattatctataaacatgcaattatcttatttcatgtggattctgtttctaccacagtgttatttcagtaatggcagggttgttttttgaagtccattttaattcttaagaactggttattacagaaattgtaagttttttccctaaacaaagagaactgtcttactgaatttttattatataatgatagttcattaaattatttactggcttatgtgccccaattcagaacagtacttattcatacagttgtccatatgaatgtttccttttttgctttttcttttcaattttattttctgatattattcatagtattcaagttattctgataactggatagataaaatagatatggtctcagtccatagagcactttgatatagagagggaaataaaatatttattgacatagcccttaatacagagtttaaaagtgcccaggatccttgaaaatatagataagatgctttcagactatgactgaaggagaatttacttctactactagagggaattcaaaggagatagaaatgttatttaattaattaattcagtaaatatgaatacctatggtaactaagcaatcatgctttgatgtttggaagatataaagatagaaattacacagttaagtccagatattacaaagttgtgagtgatcatcactgcttttgaaggggtaccagataagacttcagtggaggtgagtagggacttgatggccatatcccaattccaagtggatgaattgggggtgaattcaggtgttccacagaataaatgtataggcatagctgcagagaacaacaggaaactggggaaattattaggcatagctggaacattgggaccaggaaaatgaagcaagagaaacaagtaaaggccaaatcatgaaagtaaaggccaaatcatgaaaggcacattgtatagtatacaaaggaattttatgtgtatcctgtaggcagcaagggaccattcagggcagaatgtattcacatttatattttagaaattacttaagtagcagtggaatgaaaagcagtgtgtgataatagaaatagtcagaagatatttcataatctgggtaagatattaagtggtcctgagctaaaatcgtggcattgaggctattttggataccctatttatagtatttgatatgaaaagtgagagagaacctgagttgagctttctggtttggaaaacagactatggtgcaagtcattgagatagaagacatacaaggaaggaaagtaggggttttgtttttgtatctttaaggaagagaaaataattccattttagtgaatatgagtttgaaatacctgtgagacatccaagaaaagacatggctagagaagcaaatttggtagttctcactatgggcatatatgacataatctgggagaaaagttgtagaagaaaatgggtaaagtatggagtataccaagtaactagtgaagaggaaaccacaaagggggacaagagataggaaagcattttgttctatcagccaagagaattgtaaatgcctcctagaggtcaagtgagaaaactgctgaatattatctatttactttaggttggtgcaaaagtagttgtggtttttgccattactttcaaaggcataaaccacaattacttttgcaccagcctaaatacattgattttgaggagctgagccttaaaagatattcaaagtttgcaatcatgaaaattgtactgggttgggtggaaaattgggcaaaaggtagacagtgttggagatcaagggaatgccatgaacaaaagtacagaactggaaaagcacattacagacatgaccttttgttttaaaatattacaaatgtaaaaaagatgtataaaaagaaggtgtggacaataagttttatgctattacttttatggtataactgcccaaatacttaagttaactggtgggagagttatttacaaccttttctacttttccttttttcttttttttccttaacatttcactatgttttagagcattgaaagaatgccatctcagatcagggagagttttggtttcatgatgcaagtacaggaatagatattgagaaagtccaaagttttggttccttaaggattacaggtatataccagctattgtttctttttttttttttccgaatctctaaccatgagctcacagtctataatgtataggcacacagattatttggggatagaacagttgctaacagacctacacacttagttttacttacttactttatttatttatcgcgaaggttgtcatgcgctgtcatccaggctgctggcacgcagtggcggcagtggcaccatgttggcttactgcagcctcaacctccagggctcaagccctcctcccacctcagcctccatattagctgggactataggcatgcaccaccatacctggctagtttgtgtgtgtgtgtgtgtgtgtgtgtgtgtgtgtgtgtgtgtgtgtgtttcgtagagatgaggtctcactatgttacctaagctaggctcaaacagtcctcccaccttggcctcccaaagtattggaattgcaggagtcagccactgcatctggcccacacttgttttagaagctatcttacatataggagactgttttagtgatgtaatcatcataaattaatttgttataggcagaattcagtattgctttttaaatagctcattttcccaaataatatatactttttgtcctttttaaaagcttgttgttaattaaattagccttctattgttaaaaattcaattatcatggttatttatttaacacagtcatgctttttaggtagcattagatagcacatattattctactatatggtaaattctttgagggcaagcaccatgtctaagacatctttctgtctccaaaaatgtcttttacatgagagagattcagtaaatatttattgaaaattaacttgacactattaaatggaaactttttaaggaaagttgcatttacattcttaaatcaccattagtggcaaattcaccattgatttgtggaatattaaattctagttcattgtatgctgaatcatacatacctaccttttggtgaaatataataatgagttttacaattttagatgtaacaaattaggatatctggaaaatgtaaggcatctatggcttccttataagaaggagctatatggaaattaggctgaggaaatgattcttagtctctggcacctgcggtgtagataaccaactggatatgctgaactgagccctctgtctcaataatctttggtgatctttggaaatacattttactagctactaccttctgtcagattgtccctaaaggtcatgataaccagctctgtaattatctgtagctactctcttagtaaaggaatgacgatcttcagctcttctaacacagccaaatgtaagcagactaagtataactaaagcttggggtgaactagcttctatctttcagaaatccagcccatattcttccccagaacgtttgaaatgtgaatgcagtctgatatcagtaaatagctaaattaccactgcatctccaacaaaatacaagtcgcccttttttgccctatgttggaaagcacacacataaaaaagtgaacattagtgtaagcataatggacagggttgctttgaagactaaatgatgtttaaagcaatttatagccctggatcaccatgcacatataaagatgtttctcataactactatgcagtaattgtctgtatgtgtaataaagatagcagaatagttccacaaatgggggcaaagtgtaaaaaaatagactgtaggttatgggtcacccccatgacctagtcacctctgaccaggcccaacctccaacattggggattacaattcaacatgagattcggccaggacatatattcaaactatatcaatatcatcaccagatgaatagctaaacaaattgttatatccatacaatggaatactgcttgattataaaaaaatgaacaaattgctaatacccaacaacagggatgaatcttaaaaatattcaggaggaaatgagacagacacaaaatagtacataacgtataattccatatatgtgaggtcctggaaggggcaaaacaaatctatcgtgagagaaggcaaatcagtggttgcctcaggtgggggattgactgcacatgtgcacaaagtaacattttgggatgatggaaatgttctacatttgatttttatagtgattacccaggtgtatacatttgccaaattgaatcctactgtatttttacataggtacattttattacatgtaagttacacctcattagtttcctttacggccctgccttctgtaacttttttccttctctccctaaaattgaggtattatccattcttctgaatttaccatagcatttgtttggccttctcttactctttctttctcctttcgtttgtcaccttgtcctctactaaggctataagctctttacatctttctttaccctctagcaccttgctcatttaatcttccaatagatgtttgttaaacggagttgatttcatacaaagaaagaattaccagctactgctttgatcacggctctgaaatttgaacagaatcacaatcccagttatcagcaagaacaaccctataaaagcagctatgggttgatgacaggcattcttagggcagtcttaattttacaattcagggcagtcccatttaacattctatggcattgggtggtggacacatggaagatgagtgttcctgggccgtatggaaagtcctctttaaggcgaattaccttgtgctagttgcaaaggtctggaagatttaattcaggtaaattacacaacgtgacaatgtatataattccagtaatgagagaaaattagaatcagaaattcagtactagaaggtgccaccatggatgccatttattctaacccattgtcatacagacccagagatcttaagtatcctgcccaacaccacacagcaaattagcggcacagttaactctagaagccagatttctatcaagtaccatacccagaatttaacaagttggagaatttgctgtttgtggaagttctgaggagttgccctagacaaagctttccttggggtgagattttgagtttagacacaataggtaaagatcaagggcaggaagctgctgtcattactaggttcaaatcaaaactggaaccttggagccatggcagggacaagaattgccttatgtgttcctggtgatgtctttgcttcatataccacttgagaaatactgacttgatctattgttgaaacttagtttgtatacttgttgatgaattttctatagtaagaatatgaatatgctataactttttgaggagttgttagtacagttgacccttaaacaacacgggttcgaacttcataggtctgcctataagcagctttttctcaaccaaaaatggattgaaaatacagttttcataggctgtgaaacccacgtatatagagggccaactttttatatgtgcaggttccacagggctgacgggaacttgagtgtgcaaggatttggttctaccagggtagtcttggaaccaatccctcatatatactgagggacaactgtacacaagaatatttttgaatcccacaggattgttaaaacaatctgaatagagtcgatctccctccttcaaaccttccttttttactgttttctgtttatgtgtaaatttggagagtggtaacagttgccattttgcatttcattggttttatatttcattttttaagaacaattttaagtcagtcttatagttaacataatttcaagtggtcattttgaattttaatgatgaaagacattgagatacaaaaagcagctttgaaagttgtagcaaagcatgcttcatacatggatcctttgaatgaaagaataatagcatggatggttgatgaaggaatagaagctgctgctatttaatgtattcttcactctcagtacatggatacagcctccaaatgttacaaagaaaataatcatcagcacagcatctctgcatacctgtggattggtctttttgtaaagcagcctcatggttttcttagaaaagttttttatttaaaaatatatctctagacacttactcctggtaggcctgggaaaatgtagattacttcatgtctcttcaaaagcctttcaaagaaacaagtcaagcttgatttgtgtttttgagatagaggaaagtagtaaggtaggaggacagaggaaatcttagctttaaagggagaaaaagatctttcagtccttttgtcaacactttagtttctgcattagtcataggtcccttcccccttggccatgggtggaccaaaggaatagcagccatttgcacgtttgtgaaaggacagtggaaagaaaagaaaatagctgatacaagaaaatgtgggagattatttcccccactaggtttttacagttgtatttttagattaatcagtggtttctggatatttggcctccttttttttcttttattttgctgtttttgatgttataaaatacagtgctaagaacctaaccctattagtgagatattattcagagtctaatttttttattgttataatgaaagtcatgtagaatgcaaagctagtggacacagttaatactcatatttggtagaaatacttttcctctaccaagctgagttcaaattgtgggcctgcaagttaactgatactggacaggttaactggagaaaagataaggtttattcacacttgaaggagcactcaatatcagtaactctgaagaagagtttagagggttatagaagtaaggggttatgcctcttgctgtggcacaccacagatgccagcactttgggaggctgaagtgggtggatctcttgagctcaggagtttgagaccagcctgggtgacatggtgaaaccctgtctctaccaaaaaaattataaaaattagcctagcgtggtggcaagttcctgtagtcccagctactcaggaggctgatgtgggaggattgcttaagcctgggaggcggaggttgcagtgagccaaaatggtaccactgtactccagtcttggcaacagagcaagaccctgtctccaaaaaaaacaagaagtaaggggctatataccaacttaacaagagggggtagcttagggagtcaaaggacagaaagatctcatttacacaatttttttgttatgtctcagtgcccagtgtcagtcatctccctcctgtggatcctcctggaggtgtgagagggttgtgacagctgcctcagtaaagctctgctttagtcagataaaagaagttaagatttcattctgcatctgctgttgtatttttgggcccttcactgatttttttttgttttaatatttgtatgtagtctgatgcttttcaatgtattttcacatacctcattttattctcacaggactttttaggcagacagggaaaatactattatcccatttcacaggtcagaaaactgagactcagagaggttaagtatttgtccagggccacataattaataacagagccaaaataggaatttcaggtattcaacatttctcagtgtacctttggggtccaatttgagtactcataaattgtgtaatctattgtcaatctataagtcctttaaaagtgccacggttaagtaataatttatttgttttgtaggagaagatggtataaactggtccatcagtgacaaagacattgaggtaaaatcaaattgtttttaaaattcagaataataatttcctttgcttcatagtttattatgataacttttggaacattaataagtttaagtggcttataagaaaacatttgattttagcatatgagtgatttaactcttcagaaacttggttcagccttgagttttgtcagtgagttaatagctgtaatcatccagtcccctttccctttctgtttctctcctgcggtgagtcctctcagcccatatggcctggtaccactaaaaagatcaacaccggaaataactgcttcttcagtgtaaggaaatggttagtctatttttaggatgtggcaggtgtttgtctttgtcgattattagccttaattgtggcagatgctacaaaaagagaataattttataacttggttttgggagatagctagattgtacttacatgtggtccacttggccagttcagcaaaataacaaataaaagatgaaaacttttttaaagatggaattctaccaaacaagctaaagcatggttgggatttacagttcctctttagatattccatatgatatgcattgttggtactctcttacaagatcctagatttagattagaatatgggacagttagaattgggtcactctgtaggcagaatggatcttaaaaggattccagtggaaagaaattatctcattcctttatttctataaaggaagactggattatcagtcttttattatcatccagtcttgtaggcagtaaccctgtgctgttcaaaagaatggatatattgggtagctgtactaactttacaaaagacaaagtcataaaaacaccattccctaactcaaaatttaagtagccctcccattcagaaaaacatggtgtacattcagttatagaaatcagcagtggctggccgggcgtggtggctcacacctgtaatcccaacactttgggaggctgaggtgggtggatcacctgaggtcaggagttcgaaatcagactgggcaacatggcgaaactccttctctactgaaaatacaaaaattagccaggtgtggtggcgggcgcctgtagtcccagctactcggaaggctgaggcaggagaatcgcttgaacccagggaggtagaggttgcagtgagtcgagatcacgccacttcactccagcctgggcaaaagagtgaaactccgtctcaaaaaaaaaaaaagaaagaaagaaaagaagtcagcagtggctttgactgaatgctaccgcggtgtctaagtgatgcatgtcagtacccctgctcgatctgaaacataagtagagaaagattaaaaaaaaaaaatcacatggagaagtataaaagactcagcaggcgggaggggcagacaaaaagcagtagagttacctttatggcacctccttttatgtttttctacctctttttttttttttttttttttttttgagatgaagtttcactcttgttgcccaggctggagtacaatggcacaatctcggctcaccacatcctccgcctcccaggcgcaagcgattctcctgcctcagcctcccaagtagctgggattacagacctgcgccaccacgcccagctagttttgtatttttagtagagatggggtttctccatgttggtcaggctggttttgaactcccgacctcgggtgatccgcccacctcggcctccgaaagtgctgggattacaggcatgagccaccacgcccaacctctacctctttttaagagaacaagagagatcataaagttcccctgtggctaggttctaagttgaacagatataactaataattctcttgctttatcaaggtaatggaactgacttgaagcttgatgtatctttatttgcttatagttgtctttaacaagagtagtagatggcttttatttagcagtgaaacaatttttttaattcttgatttttttttcccttaggcccagatagctaataaccgaacacctggaagatggacccagcggtactattcagccaacaaaaacattatctgtagaaattgtgacaaacgtggtcatttatcaaaaaactgccccttaccacgagtacgtgaaatatgctttgcttctttccacatttgtaaactcaaaatctcaagggtgaggctgggcacggtggctcatgcctgtaatcccagcactttgggaagccgaggcaggtggatcatgaggtcaggagattgagaccatcctagctaacatggtgaaaaaccccgtctctaccaaaaatatacaaaaaattagccgggcgtgatggcgggcgcctgtagtcccagctacttgggaggctgaggcaggagaatggtgtgaacccgggagatggagcttgcggtaacagagatcacaccattgcactccagcctgggtgacaaagtgaaactctgtctcagaaaaaaaaaaaaaatctcaagtgtgaaaccctataaccttagaattcaaatctttttatagtatgtgtgttaaatttcatgtagcttacagcctagtgtcggagaaataataataaatttggagtcagaaaaatgtggaatcaattttaacttatcattactagttgtatgggcaaatcatttaaccctctgtgcttcttgttttcttgtctataaaatgaaaagattgaatcagatgattcctgagacccctttcacttctaaaccttgtacttcataagatagcttatttcaatgtgagataatttttatcgttagaaaattataatttggggcatttttaaatgtttattaatgtaagttacgttaagcaggtacatcaacctttggaacaacacagaactgaagatcttagacgtttcctgaccagataattagctcttaacaaacatttcttccatttctccttcctcttccaaatgactgcttttcaaatagttcagacacctcttatgctccttttttgttcttgcttctccagtcaaaacagcttcttctgtatctgttcctcctatgacttagcttctagatatcctcctcattctactttccctcttacatacctttcattttgtcaatattcctataagaagaggcataaggaatatatgccagctgctagtatgtacagactaagcctttttggcaaacaatatacatacagtgttttggacattttgtttgatttttacagttgtgctcaggattctacctttattgggatctcaaattagaaaagatttttttatgggattatattgaaaaacaaatactaatcttctaccttttgagactgaagagattttatgtttttttcgccacatagaaagttcgtcgctgcttcctgtgctccaggagaggacatctcctgtattcctgtccagcccccctttgcgaatactgtcctgtgcctaagatgttggaccactcatgtcttttcagacattcctgggataaacagtgtgaccgatgtcatatgctaggccactatacagatgtgagtatcctgcatataactaatttgtcaggctttggagggagtgtgcaagtttgtaattaatgtgcaagtttataactatcagtcagcatacctaaaggaatgtttactccgtgagatatatatatatatatatagtcatgtccattttgtcactgaacatgtatataaagcagtgctctaaataatataggggtaaggagcctactgaatcagaagacagcatcaagagatagcattaataaatattttaagcccattctagccctttttctttataagcttgttaaataaaggctgaatttaaagaggtaataaataacatgtaaaatttgtgtattcatatttatttatttatttatttattttttgagacatagtctcactctgtcacccaggctggagtgcggtggtgcaatctcggctcattgcaacttctgcctcccgggttccagcgattctcctgcctcagcctcccgagtagctggggctacaggagcatgccaacactcctggctaatttttgtatttttagtagagacgggggtttcaccatgttggccatgctggtctcgaactcctgaccttaggtgatctgcccgcctcagcctcctaaagtgctgggattgcaggcgtgagccactgcacctggcctatttgtgcatatttaaatgaaaatatatgcacaattagcagttatatacagatgtttaatggaagcctattttgatgcttctttttttatttttattttatttatttattttttgagatggagtctcgctctgttgcccaggctggagtgcagtggcgtgatctcagctaactgcaacctccaactcctgggttcaagcgattctcctgcctcagcctcccgagtagctgggattacaggcacgtgccaccacacctggctaattttttatttttagtagatacggggtttcaccacgttggccaggatggtctcgatctcctgacctcatgatccgcccgcctcggcctcccaaagtgctgggattacaggcatgagccactgtacccgaccttttttttttttttttttttttttttttttttttttttttttggagacagggtctcgctctgtcacggtggctagagtgcagtggcatgatcttggctcactgcaacctctgcctcccaggttcaagtgattctcctgcctcagcctcccaagtagctgggattacaggcgcccaccaccatgcctggctaatttttgtatatttagtagacagcagggtttcaccatggtcaagctggtctcgaactcctgacctcaggtgatccacccatttcagcctcccaaagtgctaggattacaggtgtgagccaccacacctggcctgattcttcttatcaatgattttgctggtctaatagtctaaggaaagaaggacaaggcagccattactttaaattgcagcatattaaaaatgctgttttggacactatttgcattgtattgttgtaaatgtatatggagtttagtcataatttcaaagaccagagggctgttgaaataagcaaatacagctttgatgtggaatatgtagttttctacattcagtttaccctaattcctaatgagtgtctcattaagagtctttcattttaggtcttaattgcgtttcttactacatagtaacatatgtttattttatattaacagctaatcagtacaaagtcatttttcatcctcatacctaagtggcaattctaattgatttaaggggtatttatgaaaggggtgtctctcattctcttttttaaagcattacttacctattttttaaaataataaaagtactttaatatgtacttccccaaagtcatgatacgaaagcagaaatatttttctaattttatttatattgaaatacacctatagtcttttttcttacagccctttttaatgcatgtctgaaatacacctataatcttttgctcaataaattagtatggctttctgttgaaatgaatttcagattaaaacagattagagtatgagtgtttggtatatatatgtatttctcatgtaaataacatgacaattatttattgtaattccaccagcaaatttatacttaaattgttacccattttttaaacaaacagtggtgcatttaataatgttttggtaagtcatattttataaatggaattgtgaaattaaaagacgtacacttatgtctggataagtattgtcaaattgctcttctaaaagattgtaccaatgtatctacctaccagcagtgttaagagaaatgagcactgcactcatcaacattaagtattatcagtctttaaaatttttggctggtcagaccaaaaaatgatattttattgttttaatttgtatttctttggttattaataaagtggtatatggttaattaatttgaatactctattctcaaggctatatagatagaagttgtcatttcattccaaagtactttagtcttattttttagtgtttaccaagtcttaaaaatgataaatcctgaattgtcctagcattatgttgttgtctgcattaagttgtcaattataattttcttagcaagattttctagtttggcagttatctttaatagcatctgttttttttttactgttttcttccaaagagctctgacaaatatggtcttatttgcctgtgataaagaaggggagtaagacattatcataggcaattttttaaaaacaagaaactgtactacagaacagttaaaaattacttgtaaaaggttatataatcatctgtgttaattctataggccattcctcttaacttcttgattttggcctctaatatatgttaaattattatctaaaatgagaattaataatcccaatgaatgtaggtttttttaaataagattaaaatcatggtatgctcctgtaatatcagctgctcaggaggctaatgcaggaggatctcttaatcccaggagtttaaaacctggtggctcacacttgtaatcctagcactttgggaggccgaggcaggtggatcacgaggtcaagagatcgagaccatcctggccagcatggtgtgaaacccagtctttactaaaaatacaaaaattagctgggcgtggtggtacacacctgtagtcccagctactcaggaggctgaagcaggagaatcgcttgaacctgggaggcagaggttgcagtgagccaagatcatgccactgcactccagcctggcaacagagtgaaagtctgtatccaaaaaaaaaaaaaaaaacagcctgggcaacatagtgagagcctatctcaaaaaataaaataaaatagggttgggctgtgaccagcttcagagaaggcagtactcttttccccaaatctaccagtatctactatatttgttgtaattacatggcgaaggttctggaagctggtctttgtagcctacacacctggtgtaggattccctcgcagcccagtcaagcctgggctctactgactccttgtggcaaggctcatagtccttccaccaccccagaaacttcatgagaattcacatggaagccgagtcattctggccccatgttgttggaactgtacatgctttaggtctgtcttgaaacctgggcctccacagaaaatttgtttcctctgcagccctatcaaatgcttgctgctcatcttccgtgaccctgaatcttaagagatgatatcagcctctttctcacatgccatggctgcttttaagtcattactcaaccctttttatgtaaatacctttggcttatttaaggcttataccctctagcaatactatcctctaccattctttgtcattttcatcttcccacctactggactttctgctcattcacagaggatttctaaccttttataaattgacgatattgagaaacttccaaggctgggcgtggtggctcatgcctgttacccagcactttgggaggccgaggtaggcagatcacttgaggccacaagtttgaggccagcctggccaacacagcaaaaccccatccctactaaaagtacaaaagttagctgagtgtggtggtgcacacctgtaattccaactactgggaaggctgaggcatgagaattgctagaacccaggacgcagaggtttcagtgagccgagattgcaccactgaactccagcctgggcaacagagtgagactgtttccaaaaaaaaaaaaaaaaatgaaagaaacttgcccttttactttatatattcccatagtcacacacctagacctctgtttggccagattaccagatatatgtatgcaaagagaatttgtagtgaaaactgtcgagtcatattcaaatcctttctgtaatgaaaagctttttcctaaaatctgttggaaattgctcattggttaactacttctgtaaaagtatttggttgaaattccagagttttatgaggtgaaggataaaaagatggctcaaggcctactaaagtcaacctgcatcattagtccctttcagaagacaagaacctggattatggaaagaatcctgtttctgaatctgctatagtttctctcctcacttgccaacaatttttaaatatacagagaatttttaaatgtctgtatacctttagcttgcacacagaaacctattctgtgagctatctctgacatttccaagataacaacagccatacataattgtgtgtttactgtgctggaggagtgcttcattcaccactatgcccttagcatatagtaggtgttcagtagatttaatcctcataagcaggatatgaagtgtaggtactatttattactcctattttacaaactgaaaactgagacattacaaggttaataagtctaaggtctaaaagctaaaatgatgctatactttatgactatgtggagaaagcttacatattggcaatcaaggaatcatcagtttatctcctactcggaggatctctcaactttctttcttaaatatgcagatattatagctctaataagcaactttaatataacactcatgacattggggcaacatagtgagactcccactctttaccaaaaaaaaaatttaaaaattagccaggcagggtggcacgcacctgtagtcccagctactcgggaggctgagatgggaggattgcttgagcccaggagatcaaggctgcagtgagctgtgatcacatcactgcactccagcctgggtgacagtgtaagactctctctttttaaaaaaaaaaaaaaaaaaaaatcaatatattataaaacacataaagaaaaatattttccaaacaaaaataaattttaccttaggttgtcagcactttaaaaaacccctggggatcaagaaagcagtatagaatgttgattttcagatacagagccaattctgtgataccatagagctttactgctcacaagagaccattgcagcttcagcaatctttattaattgttcagattgccatccttttttattaaagcataatgactgagttagtcagtgtcagatataatcaaaacccaaacctcctaaatttcctacctttattcagcaatttttttctcaaattccctgctcagtgtgttatcccagtccatgctaaataactgttaaagtctgattttttaatacagtgggagaaaataattcatagaacatatttcacttgattcctttatttatttatttttatttttatctttgaaacagagtctcactctgccgcccagggtgcagaggtgtgatctcggctcactgcaacctctgcctcccagattcgagcaattctgcctcagcctcccaagtagctgggattacaggcatgagccacaacacctggccaatttttgtatttttagtagaggtgtggtttcactatgttggccaggctgatgtcgaactcctgacctcaggtgatctgcccgccttggcctcccaaagcgctggggttaacaggcgtgagctactgcgcccggcctttttacttttttgatgctagaaaaatgctcccatatcagccatatactacaatatttttcacagtgcaaaagtttattttaaggagaactcagtttaaactgtgtagtatttaacatacacgtgagtgctcaatgatgtttcttcaataaatatatatgtaaaattgaaaactaatgtcttttatttagatttttattaaacttggagatttccagcaggaaatacaaagcatctagtacaaatcatttcatacttgtcaaatccagaatggagagttactagagcattatttttgtaaaggtaattatttaagaaacaggtatttattttatttttagtgtactccaaggagcactgagtagtattcatatgatttcctccccttatcctttccacagtcttactcagatatgactggccagaaataagaatggctgaaacatattattgtgctgaataactaagccaagatttgaatttaaagacttgcttaattcacatattttgtgtaatggcggttctacctttattcaaaaacatctccagtgttctaccacccaaataaactttctacatttgttcatttagcaaaaatttgctggttgcctcttatatgccagacagtattccaagtactaggggaaaaaaagatgaataaaacatgatccctgcccttgaggaactcagagtataataggaaaggtgggtgtgttaagaacagtgtaaagtgtaatgtgaaagtacatcagggtggtgataaataaaagagtcttagaagactctaaacttagtgacttgcagatgatgcatacctagaaaatgtagaaagtgtgacgtagacctaagaagggagccaagtaactgtgtctttttattttgacatgattatagattcacatgcagttttaagaaataatatagagggctgggcgcagtggctcatgccagtaaccacaacccagccctttgggaggccaaatctggaggactgcctgaggccaggagttagagaccagcctatgcaatatagtgagaccctatatctacaaaaaacatttttttaagaaatgataaaattaagattcagatagcaaataatcatgaacaagctaatttccctgctcaacttatttgaagagaaaccactgatatattcaaatctacttaatgaaaatgagaatgcataaataagaataaataattaaaattaaaatgccgcctccccaacaaagtaacttagatgtgtaaaatcacgatgtgaggaaggaatgaaggggaaaagaaaaactcatctctgaaaaaactaaaacactagaattatattatcgtgatagattggtatgtactttcagataaatatgtagttctgctgacagtgtgcattacacctacctttggaaataggaaaatcagactttggttagatatatgtactttgttccacccacttttctcaacattttaatgttatttataggtaatattggagcaagagggcaggctgcaattgattgattgtcttacaaaattgttgtataggcttaccaaatgtttatttaactgagagatcagactacttcaagaaagttaagttgatttctatacttgaaggtctcctcctgtcttcttgatgtacacaaaactcacgataatgttagtgaaaatcgcatacatgttcattgttcagggagtaaatcccaaaatcaggaattaataatttattggaactgttaccaagccacctaataaatgaatatctgaaattttcatggttgcaaatgtatgtgaccttatgtaaataattatgttctacattttaaacttgaaggcatatggtacagtttggttcaatgtccccactcaaatctcaagtcgaattgtaattcccaatgttgagggagggacctggtaggaggtgattggatcatgggggcagatttcccccatgctgttcttgcaatagtaagttctcatgagatttgatggtttaaaagtgtatggcaccctgcccctcatttgctctctttctctcctgccaacgtgaaggtgcttgcttccccttcaacctccaccatgattgtaagtgtcctgaggcctcctcagccatgcttcctgttaagcctgtggaacttgagtcagttaaacctcttttcttcataaattaccccagtgtcaggtaattctttataataatgtcaaaatggactaatacagtgtataacttagcacatttaaagtttgaaggagaaaccagttcttattttaaattgtactaaatggtttcctttctagtcatttctaagtaacctgaaaattcctccaatcttttcaactctccgtatagtacatacctccttgtctagtattagtcactttgagtggacttagcagcttactagcaagcttatcttgtctttatagaaaatgtaagaataaatgtgtagaagatagagataattcccattctgcagacccttacctttcatcaaaggaagggaaatattgtctacttctagcctgcctttataaactttataagctctcaacattaaaggataaataaactttagtttttcactgagaatcttatggcactgaggaatggactgacttactcttcagtccaatcacatttgggaagacacaggtctctgatgtataaagcagaaggccactaagaattttattaaatttcaaacttattatatgccacccctttttaaaactaaatccaggtataaaagtccatcatgtagacttgaattttactattaaatccactaatacgaacaaattctgggacataattatctgagttatgaattgagagtgaaaataagatcctcattaacaactctaaggctaaaagattcaccaaatcttacagaataaggtcagtgctgctgacctttatagatccctggatgtggtgggagttgcctatagtcctagtacgtgggaggatgaagcaggaagatcacttgagcaaaggagttcaagtccaacctgggcaacatagcaagacccgatctcttttaaaaaaaaaaaaaaaaaaaagtatacattccagacagctttctgattgggttttgaaaatctccctcaaattacacagcagtgaagcaatgtacacaactgggaaagctttttaacctctaaaactattcaaagacttacttatagggatctgtttgccagcatactaatcaattctgtgtatgattttgttgtactaatcaatcctaggtatgatctggtcgaacccaatatgcagttattcatcttgaaaaaacagctgttttcttcagttgtctactagttaaaataattaggcatgccatctaaaaggtacacacagttcgtcttgaaaacttacaaatgcctgtagaatgattatatttcagttaaaaaaaaaaaaagaaaatgagctctgcataatctacatgtatatgcttgtgtgtgtatatatatacatatataaacaatgataaatgggataaagtatacataccaggctcttaacattgcttttcctcatcagactgggattgggttagaaaagagggctgagaaacacaattagcttgcctttatttgtatttttattgtattgtttcatttgttttaaaaagagagtaagataattatgcaggatttcagtttaatagtaagcgtgatcttcgtttgttgtaaggcattctactaattgttgacttgataaaaaaaatcataagcaatactaaactactttgagaagttcaagacactcaagcaaattatataataataaatattatgagctaatcagccttttagttatagaacataaaaataattctctctgtaatcatggatattaccagaaaaatatacatcctaagaacactaatcattacggtgaggtagtttcagatataaaggaagacatggctcaatttttaaattatttcatcagtgttatctaaacttttacttttttaagcccattatattttagacaggaaccagttctaatgtagcaggaaaaaattctaaagtaagctacagggtctcaatattaaacctttctctctcaccctgtcatccctggtttagggatgcttatatagaacttttacctataggtaaatgcaaaggaaaggtaaaagttctatataagcatccctaaaccagggaaggtagtagtgggtagcaagggtgatgaactggttcctgtctaaaatataatggacttaaaaaagtaaaagtttagaataacactggatgaaataatttaaaaattgagccacgtcttcctcagtctcaaaaaaaaaaaaagggttcctttttgtttgtttgttttttgtttttgagacagagtctcactctgttgccagactggagtgcagtggcgctggagtgcagtggcgcaatcttggctcactgcaacttccacctcctgggttcaagtgattctcctgcctcagcctcccaagtacctgggactacaggcacgcactacaatgcccagctgctttttgtatttttaatacagatggggtttcgccatgttgtccaggctggtctcgaactcctaacctcaagtgatctgcccacctcagcctcccaaagcgctgggattacaggcatgagccaatgtgtctagccaagaatcttattcttataagaatctggcacaatgaaagggtcttttaatggtataaataacaatatccagtgatttaaaacaactcttcatagtacctgggactacaggcacgcactaccctgcccagctgctttttctatttttagtacagatggggtttcgccatgttgtccaggctggtctcgaactcctaacctcgagtgatctgcccgtctcagcgtcccaaagtgctgggattacaggcatgagccaatgtgtccagccaagaaccttattcttataagaatttggcacaatggaagggtcttttaatggtatagataacaatgtccagtgatttaaaacagctcttcacaggtctctgtaattgtaactctttccctgttcttaacaaaccaaaacttgatggtctctcaagttttccataaatgagttgatcagagacctatgcagtgcttggcaaataccacctgagctgccagtactggtgggatttcacataagcctctttttttttttttttaatataccaatagaaaaaaaattgcaggcatatataaagaattggtagatcaaaaaaaataataataatcagagatgtctccaaatgaaatgaattgtttgtagaaaataggaaacttgggaaaatcctaactctttcttcacagataatgtgaatagagaagacagacgaaaagcactgctgagcaaaatgatgaagaaaattatggacaaaatagttcacactcaatttgagtgagaaaaagacccatagtgaaatttctgaatgtcaaacaaaaattatactaatatccagagagaaaaacacacaaatcagattcacatcagacttctcctgtatagtactaaatgctgaaaagtaatggagaaatctctaaagcctagaagattctgaggaaaaaagatgatacaatctgttgctcatttgtgaatttaagggaaaagtcagagaaaaaaattagcaacaatgaacagtgaaagcaagaaagcctggaatatgtgtctgaatacttcttgataatctgttttttaacttaatataagtatttcctgggtgcagtggcacctgcctgtagttgcagctactcaggaggctgaggcagcagaattgcttgaggtcaggagttcaagaccagcccaggcaacatggtgagagttcatctcaaaaaaagacagaaaaatataaatagagcaaattttattttttaaattatagtaatgtggtttataggtaatttcagtaaaataaaaggttatttgtttcaataatcagaagaaaagtaagacaaaggaaactcacgtagtataacattatgggagaaaatgggagcaagaaagtataaaaaacaaaaagcataaagaatgagaaaaatcagaccaaatacatcaattataacaataaacattttcatagtagattaaacactcttatagatttaactgcctcccccactccccccgaccccccccaaaaaagcctgtttatccaaagagacctttaacaaaagtaattggcagaccatggtttgggaaagatttttgtaatatgtatgatggcacaattatctgtaatatataaaaagctcttacaaatcaatataaagaaaggaaaataataatacccaatgttagggaagctgtactattaaagtacatttggatgggctttctggaattcagtgatgtatagttgcaaagatatagctataagaatgtttatatcaaagttgttaataataatgaatactagatgcaacccaaatatttgacgatgaggatgacttgccttacaatatagtcatataatgggatttattcagccgtttcgaaaatgatataaaaggccgggcgcagtggatcacctgaggtcaagagttcgagatcagcctggacaacatggtgaaaccccatctgtactaaaaatacaaaaattagctgggcatggtggtgggctctgtaatcccaactacttgggaggctgaggcaggagaatcgcttgaaactgggaggcagaggttgcagtgagccgcgattgcaccattgcactctagcctggacaagaagaacgaaactccatctcaaaaaatatatatattttatatatataaatgatattgaaatataaataagttgctagtacattaagtaaaacacacagattacaaaacagtatgtgaagtataattagacttctatatatatgtgtgtgtttctatatatgtagatttgcatagaaaaaagtttgagtgggccctgtgtggtggctcacacctgtaatcccagcactttgggaggccgaggcgggcagatcacttaaggtcagaagttcaagaccagcctggccaacatgttgaaaccctgtctctcctaaaaatacaaaaattagccaggcgtggcagcgcacacctataatccctcctacttgggaggctgaggcaggagaatctgaagtgggagaatcacaagtcagagaatcacttgaacccaggaggtggaggttgcagtgagccaagatcgcatcactgcactccagcctgggcaacagagtgagactctgtctcaaaaaaaaaaaaaaaaaagagtaaaatattccaaaatatttgctcttgttatgtcaggaattatagatgttttatcattttttgctttttatttctattgatctttatttgcgagttctatattagtcattctaatagatgtatactgtctatcttattgtagttttagtttgcattttctaatggctaataatgttgaatatcctttcatgcacgcacttatcatccttatttctttggtgaaatattaacatcccttcctaatttttaatgagtgttaattttcttcttattggctgttgatagttctgtctgtattttggatataagtcttcagttgggtatgtgatttcaaaatatttttttctagtccatagtttgtcttcttattttcttgacggttctcaggcagagcagaagtttttaaatttaatgaagtccaacttataaatttgaactctttacccaaccccagatcacacagttttttgtttttgttttttgagacagggtcttactctgtcccccaggctggagtgtagtggtgcaatctcggctcactgcaacctccacctcccaggctcaagtgatcctaccacctcagcctcctgagttgttgggacgacaggcacgtggcaccatgctcgtctgacttttgttttttgtagaaatgaggtttcattttgttgcccaggctggtcttgaactcctggactcaagcgatctgcctaccttggcctcaagtgctggtattacaggcatgagccaccatggccagccagaagattttctcctgtgtattctttcagatgtttctacttttatatttagatctgttatctattttgagttaaactttgtataatgtgaggtttagatcaaggttcattttgttttctttacatatggttgaccaattgttctaacaccatttgtcgaaaagactttccattctcaactgaattgattttgcatctttgtcaaaggtcaattggccatatttacatggattgattcctgtgctctattttgttgcactgatgtatgtatatgtcttgttgccaatgccatatggtcttgattactatagttttatagtaagtcttaaaatacatagtgagatttcttaaacttttgcttttgttttgtttttgagaccaagtctcactctgttgcccaggctagagtgcagtggcactgtgttggctcactgcaacctccgtctcctgggttcaagcaattctcctgtctcagcctcctgagtagctgggattacaggcgcctaccaccacactcagcttatttttatatttttagtagagacagggtttcaccatgttggccaggctggtctcgaactcctaacctcaggtgatccgccaaccttggcctcccaaagtgctggaattagaggcatgagccaccgcacctggccaacttcggttattttttacaaaataacttttgctgttctaattcctttcccccttcatgtaaattctagaatcaccttgtctgtacttacaataatttctgataggattttgattacagttgtgttccagtctatagactactgtagggagagttgactccactgtattgagtcttccaatccatgaatatggtatgtctctgtttatctagaactcctttagcctccattatcagatttttgtagttttaactatacatgttctctacatagttagatttatgtgtatttaagttgtaagtattttgcctctcttggaattataaaaaaaggtattgtcttactacaacatcagacctaaggatgattatttgtgtatctgacataagctggatgctatcaacatcttgggagaagaggaaaagataatttccccaagagcattccatgagatttagaactggatgacagggcatgattgtacatagaaggagtttaatgtagttaactaaggtgaattaggattggatttggtggttttaaacaatttgctctattaagtatttgttatttatgatggagtttatataattgggttttttcttttttctttttttttttttttttttgagatggaatctcactctgttgcccaggctggagtgcagtggcgtaatctcggctcactgcaacttccgcctcctgggttcaagcgattctcctgcctcagcctcccaagtagctgggactacaggcgcgtgccaccacacccggctaattttttgtatttttagtagatatggggtttcatcgtgttagccaggatggtcttgatctcctgacctcgtgatccacccacctcggcctcccaaagtgctgggattacaggcatgagccaccactcccggccacctttttttctttttccttttaagtagaggtggggtctcgctgttacccacactggtctcaaactcctggcctgaagtgatcctcccacctcagtctcccaaagtgctgggattacagaaataaaccactgttcctggcctataattggtttataagtaaagttctaaactttcactttaaaattatcttaccaggttgggtgccaaggcttattcctataatttcagcctttgggaggccaaggtgaaaagatcgcctggggccaggagtttgagaccagcctaggcaccatagtgagactccatctctacaaaaaaatgaaaaattagccaagcactgtggtccatgcctgtagtcctaactactctggaggctgaggtcagagaatcctgcttgagcccaggagatcagggctgcagggagctatgattacaccactgcattctagcctgggcaacagagtaagactctgtctctaaataaataaataaaaataaaataaaataaagtgaaactaatttacctttagtttacctcttttgagtctagtttaaaacttctggttcctgctagtatacttaaagaaacagtatagtatagaacctttgcagacttagtttacaattttctcaggatgtcagcgctcagatttcattattccaataccaaagggacaatgaaatcactcatggcagttgtaatggagggatgccatcaacattagtttttatttttgtttttcaggggatttttttgttttttaagaaatgggatatctgagtgagctgaaagttatgaagacaggaactcagaaagagttaaggtactagaaagcaggaagtaagacctctcttccatccatcgtgcacatggactatgtattcactaccaaaccagttagatggttcccagaattatagggatctacatctacatgttcttcctggtttccacttacccagccctcaggtctggtttgaaggtaatgaattatctcacttggttgttaacagtcagttgcagatcgaactccttgttctactgcttccccccttctcactactacacttgactaatcttaaaacccccccaaaagaggaggaaaggctagtaaggaagctggggccattaaacaatgtttaagcatagaaaaaaggaatacataagtttgagttgaattaaagaaagttgtcttaactttcagaatagtgtacttttctttttcatcaatgaccaaggtattttaagatttttgtattccagaattttaatataaaatacaacatcaggattatctgatccagtatttttttttaacaactaaaaacatcgagtagacttcggctgaatgtaaaaataggtacattgcacatactagatgcttattgatgtttctgaatttttttaagaaggtggccacaaacagctgtagtctaataaaatctgtattttattcattttgttcattgttttattttttcctctattatgtctttatcaacaggtcacctaaactgagtttcttctaggtttgggcacatccaagagttgaccttggtacagtagattcatttatttcagctactttattgatgccaatatttccattatttatttctgcatcagcagtatggggagtgccaaattgatgttgtcataacaatagttaatacagtggagcacttgctatatgtcaggcattgctctaaagactttatacttatcaaccccttaaatatcacaacaatcctttgaggaggtactgttagccccgttttacctatgaggaaactgagacacagagatatataacttgcccaaaatagtaaatagctggattagaatccagccatttttgctctggattttctgattttagctgctacattatcatgctacattttactagctcttacaaggttttactttacattaccttaggtcatcagtcagcagatttactacaaatattagcaactatttgtgaaattaaccttgaaatgtaatctactgataaactttgtgccttcataactgtacttaagttaggaggagaatatcaaagagaaaaatctttgagccagaaattaagcttgtcagtttccctgattacagaggattaaaagtataggaattgattaaaatttgaccttgggtggaaagatgattttatgaagtctggttcatcttggaggcagcttagagttaaagaccaatgcatggctttccataccgattggttaaaaaaattatgtagattttatacacattgccacttacatcttgtatgtttgtagctcctctttatcaagaatggcaaattttcatgcagaatagaagtataataagcattattaagacagtaacttgtcttgaatcttaattgtatatttctatgatttcagacctcagagcagtctttatgtggaattttgattgacggcaaatgctaggatgttcttttcaaaattttccttctaggagaaattatatttcacgtatactcaaagtatatgtacaataggatacaaaaatattttgtgtagctgaggaatagtgtatatgccagtgattaccaaagtatcgggacaatcagatgacttggtagctataagtctatgaagagcctggtcttgaggcttcagagtaggggcgttctttttaataaaggcacctaaacttatatttgtgtgcatatggaacagttaagatggtggttgagtccagagactagaatggttttcttgccatgtgttttcattcaacaatttttaaactgaattattctctttattctttatttatgttattcactatcaatgaatattgtttgttttattaaatcttttgttttgctgtagtgacttgagggggccatctcctaacaacagaggctttgacaaagcaccagaggattctgttaaaaagttgtgtttcgtaattgtagttgtcgtgtcagagcctaactgacttggagctgaaggatttttgtgagatgagtagctgtgccagcagggacccaagtctcctgggctggccgcgctctcattaagatttgccgctagcagtggcggtgttcagcatgtatgtgacgtgcattctgttattgtatgcttggcttgtcagcctgcagctttctgacactcacttatgtcactctttattcagagaggaagaagcttttgataatttgacaagacaagctcttaaacgatctaggtcatggccttcactgtctgtgattgtgaacatatttcctgaaagccctgtcactcatcacagctacattttctcccggggagccacaggcctgtcctggtctcttgtcagctcatacattttggttattcatataccaaatacagtattgggggtttttttcttcccttttgcaaatgctagcatgttagtaaggctaatcctttctcctgtgctgtgttcccagcagggctgcgttcaagggctctctctagtacaaggcagacaactggccaaggggagctgaggaggaggaaaggccgcttagtgctgtttttgtgtttgttcattgttgtggaaatatgagaactggtggcaagggccttgtctattgagcacttgagtcttggtctgctgtcaggggctgtttaagattgagtgttttattttctttgatgttcacatttgagaatagggaagtgggaattaaacaacagatgcactaagccgttgttctcgtaaaacaataattagcacctgataaaattcaatatgggtcaaaatgcacaatataaactctcaattcatctggtgtggcaaactgtgttgattcatctttgaattttatgaataataacactgatttatgtatggtttattatacaaaatacaatagacgggaaaactagttgggcagaagttggcaaacaatgtagcacattgctaaaacagatgtacaagtacactttgtatgttttcagttgtgtgatttgaggaggccctttgggttgccatccatctaagtaccagtaaggtgagatcaccagggtaaccaataaatgcaattgtattttcatagtttgttgaatttgcatcttagatgagttccacagctgactagtaattcattttaagtatttttttaattagaccaaagttagttgtaatagtaggcttcttgctttagaaattactttattttatgcaataggtatataattttccatgcaatagatacatacatttgggtgccatggcattctatttgataagaagaaaaatacgtgcaacgactagggaatggtaaaaagaagttgaagccataataagcaaaaagaaaaattagggttttaaaaattcattgatgatacatagatataaataaagatgtgtgccttatattgacacctagtttgaaatgaaaaatatttgtttactttttaacctcaaatataaataagtattacaaaaaatagcaaaatgaaactatgcatgagaatgttgagtaaaaatacttatgagacagtcaagtaggagtttttaaaaattacaatactattgtctaataaatgaaaagaagtttcatgtctctcactactaattttctatattgggcatcatcttcatgtacagagcaatcagatgattgttcaaaaaccaagtaattctttcttttattactaaattgctgcaacacaagaaaaggtcacatggtagagtggcattctgccagtgtatgacaactcagtgattgcgatttttcaaccgtattattctgaggacactgtggtaatcaagaactatccataactaatgtataaataactgcttgcttatttctacaataatccaactcaaattatatatacacagcaaaaagcttatgatagaaggtaggaaatgaatatttaaggatatattgtacattagatatttgtgtgtatacatgtttataaaaatagatatttcttgtatatattcttaagaacttttgtaacaaagtttgtggctacatttggtaactaacatgatctttgccttatgaatcaaccttttactttttaaaaatagttgtcttttcatcagtgttgttcatccagaaatgactggatataataagtgggtttttttagtaagacactttagtttccaggaatttgatattaaaactggaaagctgaccactaaacagtctttcctatagaaagctgtgtagactgctttctataggagcagtctacacagctttctataggaaattacacaggaaagttaaaatgcgtaaaggataaaatttttcagcatagatatgtttcagcatagttgaaacatatctacttttttgtctaatcacttatggtggtataatcagtagaggtattggcattcaaatgtttcttaaattattatcatagccatgatattttcagattgtatgaattacctttgttagtcttatcaatactttgaaaaataaatgaaagaggaatgacaaatcaagtaaagagttgtttcaaactaggtatcaaaaattacaaagatttcagaaagtcttactctaattttaggcatgcatctataaacaaaagctataaatttccattcgcttttaagaatcaccatttcctttgcttggtgttttaatttattccaaccatttatatagttacaaacaacacactttttgctcctgagaagatggtaaactgatcaactatacataagcagcttggttagaaaaagtgtccttaacaaggtcataatttaggcataagaagatttatatatgtgttcgtaagaaaatatattctaatcactgtttttgttgttcctgctattgtttatatttgcttgtttggttggttcttttgttgttacctattctagtttcaattagtatatcttttacaagattatcgacgttttggggatttttaaagttgtttttgctacagatgtggatatggaaagattagacagtttggactttagtttcttgcagtcgtttttgttcttgttgtttttaattctctttcttatagagtattaaaagttagcaccaagtgattccgtaaaagatgccaacagctatcacaaatatgtaataacagtgaagtcttcttaaagcagttactattaaattgttttccatcttactaccaaagttcaaaatgctgttttaaaaggtgtacttggtgagttttattgattttgaccactgctgttcatttatcagtttaactgagttatggctctttatcacatcttagtgcccaaaacttgtaacctgaaaagaaaaagagagaaaactttgttactggctttctgacaatggcggggagtgtgttaaaccagtgtaaaattcaattaaactgtctagccaggtttttgaagctgaaatgcagaccctttctgttaagcttcttattttcctgtgaccgacaccggtggatgctgggttatgccaaaaccaacaggctgtaaagtaccttgtttcatgctcccagctgatcaatatttttattttccaggcttgcacagaaatctggaggcagtatcacctaacggtgagtagaaacaccttttttattttccccaagacctagcctatttacccttctctgaactgctgaccataaaatatagacaagcatcttctgctggaagataataaacatctgaagagtttttgtacggagaaagcaataatacactttttctcttttccactgccccctaccctatcttcctgttcttaaaagaatttgatttttttattactcacatcatttaatgattacatcatggtatctcttagtcttccagactatattcattaaattaaagggaaaaagtatactgggagccttaaagagtaataatccagtgtctttaaaatgttgtattatccacagtccacaagcattcagtccacagtatcttcagttgcttttactaaaacagttactgatatttttcaatgaacctagaaaaagcttagtgtatatttcatatagaataattcaactgtcatatccttaagcccttcttgacttattcaaaatgtataaatatctgcttaataccattcaagttattcaattcctagtttccttttattgtgattttaggctaagtagaagcagaaaatacagtttgctagagaatctaattgactggtgctcaatattatgaagttagtttacttttaatgttcagcttaaatcatttcagtaattcaccatagccctactactcacttcttttactgtattaaatatgttgtgctaagcaacagaccattattcttttaattattacagttatataacataatatatattaattaaaagttgttaaacattgtttcttaaggtttagcatagttaaaagttttgtttacacaaagacaggttgtaaaaatacaaagggcaaagttctttcaaaacatgacttcttatcattctccttagagaaataaaaagtaaaccaacaagtagactcaaactacctgtctgtctgtcacaggcccaagaggccataaattatataaggtggtttgttttcacattttgtgattaccatttaatttttttaaagattttcagtagaaagctgtaactcctcaactattcctcaaatctcaaattaggatttgttaaaaacttaagtgttatacccaaaaatatatacatacccatgtatgttacacatatatattacaaatgtaattcatctgaatacattgtttgtgcttatgtagcagtttttttatcctatcataatatagtgaaatcattacagcctaaacttaattagaatctaattatatgttatacttttcaagatgacagagctactctttgtaactgtataaagtaatatccttatagatttgacattgcatttattttagcttttcccctaatttaaacaattccaatcttgaagtgtaggaagtatgattttaaagctgctcttttgattatttacacctgtgttcgtttatatacctatagttaaagggtaaaaatttgtttcaatgtaacagaaatatttgaaggtttgcttaatattttagctgttcagaaacataaattttaaaaagaatcattaggaaaaaataatacaaaataaatttactttttaaggaattacaatatattctatttataggtataacaaattcaatttgaaaactttgtttgttccaatctggaatcctggttaattttttaaaataatattgaagttgccatcacagtttataaattatcaagttgaaattaataatgagtttactatgcaagtataaatataaaactagcatgtttatgaacttgtgcatatatcagtgtctctaaaataaaatagttaagtaattatttaaattatcagtatatggacaatatccaaatgtatgcaatgaagcaatattcagtcttgaataaaaacaagatgcatgatgattttagtcatcttcagctcttttactaggcgatggactgccatctattgactcctagtagccctcacacatgaatgttgagtcaatcagcgcagtgaccaagtaatgaagcctcagttagaattgttactacttattcatttaaaccagtctgcttaaaactctggagctttctacacttaagcattgattaattactttttctaaccaaaattgtcatatttcttaccccaaatgatggcaaagatgattagtatccagtttggagatgtttatatttgggagctttacagttgcttttatctgcctcccaactagagggtcatttacagaacgacttaaattttaacagtaaattaatgtttatccaggagtcgttttctttaaaaaccaaaaaagtctataggttaaacagaatattgtttctcaaacacataagaaaggtggtgtagttgattgttacaagtggacttttgaaatattccaaataaaaaattccttaaaacactttcagaactaagaagaaagttatagaagtgttcactattttcaacaatttcaagaaaaataaaatgaaatatcttcaacaacctgtatatgaatataatagctttttaatcagctagactcgactacattaataaaagctaaagaccatcattctaaagggttcatgctaataaaactaaaaagactacatatacacaaacatccatattataacaaccatctggtgacaccatctttctatgttttaatgattctataattatataatttaatgtctttatcaatttggagaccatgaaaaaaagaaaaaaatattgtttttacttaacaagtacataatttcctcaaatagttaatatttttacctccttcaaaaatgtttagaatgcttttaaatgtttaataatatagctaaaatataacttcttgtattttcatttctgctacattttcagatttttgtagagcctgacttttaatgttctttttcatctttcaaataactcattctagataaaaatttccccctttattcgagaaagaatgtcccttcccccaccccctgtcatttctactctcatttatattaaaaatcctaggccaatatggccaccaacagagttttacaaccaacagaatttttaactagtagaggctatgatttgacatgagttggacatttggttaatcttgtttttaatctacttactttaaaaagtaaccaggagtttgctatttgagggctgtatgtgttaagaatcgaaaaggacaatgcatcttttatgtttaattttgcatttgatttctttgtgtgcattgttaaaatgtatttcaaccctactgccttttattttaactgaaggtttaagcaggaagcaaatgtaactgttttagaagaattaagccttaattgtttttttatatataatgttttgaatgcctagaattcacacttcaaaaaatagactatttgttatccgggaaatggggaagagtagagaaatgagtgtgcttgacttcctttctggcctaagaaaggcttatggccacagtttgtcagggtatatcttataaaccataagtaacaatattacatttcattttgccacttagttttctgtccttacctggaaatacccatttagaaatgtattttttgtgttttcacagtttggagttttatactgagtgagaatgttattctctaaagcattctatgccatactacagagtgggtacccctaaatgtcaacagatttggatttaactctagaactatgttttacactccagaaggaaggaataagaaggtggttttggttctgagactatagctatgcaaaagcctttatcctgagattgtgatgtaagataggatagataattttctaattgcctaatgctaatatggaatgtttttcctttaaaataacttaaaatgtgaaatgaagagattcaaaaagtcagccagaatcttttcttttcctggttaattggatatatgttgggattcctaaatatctttctgagaggtccttggctacataagcagatctgtaaaaaccataataaccccatccacacagtagatatcaagtgataggtctgtttttctctgtgtgcgctttggtgtgtttaagaaaatagaactggttacatactgtcttgtaaaatgctatctaaacaccatttttattggtaccatttttgaggcctagcacataggttttcataagctaatacattataagttcattttggaagcttttgttttggtagttcaacttactttgcctacttcctcaagaaccagaaatactcttgtataaattatagtttttttcctctgtatctggtattgctgttttaatgttttgattgatcaggtgttgctattgagacattacatctctgccaaattgtcagaggtttagttttcatttaaaatgcccttagtactaaaatactactgaggtgaacgtgattgtgctctgatcattcagaaggcacatgactcttttgtagtgcttcagagccatctttccattatagtactataaaataaatcagactggtttatcttttgagttacttggtgtttgaataacaagattttttttttgaataagcattgatgacttgtaatagtccatctctgataacagagatggaaaatacatttggagaatgactaaaatttttaaagatttttcaaatgcaaaatttatatgaatagttttatgttatttaaatacttatcttgttcttaaagaatttgctgttaaaattatcatcataatttttacttcagtcttctcatattttgagtttagtaggaatgataattactacatttacagagtaagtcaactgatttttttttttaatctttatttcactggcatgtggaaccacattttgccagaacttatcattggaaaatgcaatttcaaagcaaatgaaacctggaattatcaatctcaataaatgagattcttttaaaaataaataaaatttgctaaatcatcaaaaagcaattttctaaagctactgtaaaggaaagggggaaaaatgaatgttgtgaattataaatgcatgttatttttcctcacataacatttcctcagatatttagaaattgtatgtatgcatatttatttgtgaatggagttagaataagatcatttagatttgggtgtaatttttatttattggagcacttgtgagaaccttagtattttcttctttacaaagaaatactgaagtgttcactccttcaattctgaagttacttgattctcagtattttaatgcaaatactaatttggtttaaatgggaaatcaatatggcatattttgcatagttttttccttgcattaatatatttagataatatcaagtactttatgatggtaatcctaatgtagatttaagtgtttcagataatgaagcaatgagaagtatgcagccttcactcaatttaggaaagatttatcataaatgttttggcatagaagcagctgtgcttttgccatcttctaaatatctttaatgacctactcactagtcatcatgaatttggctcatatttttagatattagatgttcaataatcaaataattgaatctgaagttctactataaatagtgacttcctttctttatttgacggaaaaagtccctgtgctttttattcctgcccctagtggctaggggcaaagaccagtatatttaggacttaaatatgtctcacatggccttaaagttgtacttctgttttaaaaatggaaagaagtacttgttgtggtcatctgttttcttatctgttaacaaatgtttatcctgaggatgacaaatggagcatcacgtttgcacttttttttattaccctttcctctcttccccatgtgtgttcagcattacttagaaaggaattatagttagtcattatagggacaatttattcttgattattaaatactgtggtaattaaatttcatttctaagtgcttcttgttttaacatatataacacactttaaaaatcttttttaaaacccacagtattcatataatctcaaagaaaactacatttctttctttaaaaaaattaaaatatggaacacttcatgaatttgcgtgtcattcttgctcagggacaaaactacgtttctttttacttgcaactctgcacttttaaagagtgaccctattacaataaaaatgagtataaatataaacaaatagtcttagattttccaaaattaatacagtttaccattgtacagtatctaactatataataaattaacagttttaaaatcttgagtgatgccaattctttgtcgtgttacgtacacataaagagtgtagaagtattatgtagataactttagcatattcaagtgattatttcgcatatgtgctttgaacaggtatttcatgccatttattaattatattccgagtgatcaaacttgtcatagtcttttctagacatttcagtccaacagtaaatgtagataaaatatactagagcattgatatttgtattagacattcattttggtagtcatgcatgtgagtgacatggtagattacagtaattcctaaaggtctgaagtatttaggaatcaattaattactcacaatcatgatcaaccataacctttaagggtttggatcgatcgtttgaataatctgcaggaaaagactccttgacttgttaacatgaacagtctctctgaactagtgttatattttctgttacaagctgtggtgataaacttaagttttaggtttcaaaagcacagtcttttcagtgactgaaagttaatgaattattgttaaaatcagtcagattttagacttaaaatttatcagtcatttgatccctatatatcagaaattcaagggtgttatgtgtgggttttttggtacatttataagtattttcttccagctattttgagttggtgcaatgatcctccaagaccaacaactctggtgtttaagaaataccgaaaacaagtgaagaaatatattacctctttagaaagcatttaacaaaaaaaagtttaatatctttgggattaaattagaacttcaccttaattggtacaccagtacatagataccgcacatttcaaaacaagaattatttaaagtgagtgtttagaaatttttattagctttgtaaaaggaatgcacatgtgtgtatcaactggtaataaagctactagataattttcattccatttttcaataatcatgtagaactgaatccattgggtaaattataagatcatctttataattttgtaatacatccattttacatagatatgtttctttacattgatttgtggattaccccacatttttgttcagttaggaaaactaagttttgggttgtgtcttaactttgtttatacaatatcaattttgttttcttggatctctcacatttcctttgtttacagttgtacatttcctccctgtttttaccaggccttagaaaactgtgctatacagttgggccagaagggcaagcaaatttctgaggaaattactaggtggcatttttttttatcataatagagaaaagaatgccagctttgggattggactgtggttcagagtctgagtctttcgtcatatactaaatgtgcaaacatagttaaaatatttaacttctaaagccctcagtttcttcatctgaaaaatggggataatgccttgtaggattttgttaagtatacgatgagatgataaatataaaatacaatacctgacagacagagcatgttaaacactatgcaggctgtactacagcaaacccaaaggcatctcacacctgtggagatggcctctggactgacgtcccaaactcaggttattataatgtcttctgcccaacattaggagattcctaaggacctctttactctgtctcctaacaatgtttccttcttatatttattgaagggaatcttttgttgacaaaattatttacctcagttttcattttctaattatttatacttgtcttattcttttccatttaggctacttcctttcctaatgaaaataactatataaaatgtgtatcataaaaatgcaatatcactttgaaaatacatattaataaatgtgtgagtcttaagtgataacttcagtaccatctgaatatagttctctatcataagcaaataaattatataaatatttgctctctatacaaatgatgagaataaaacgaaattgaaaaattcacccaaacataaacataccccaattagaatactttctgctaggggtagagggcttatgttaatcagataagaaatgaaacaaaatagcatagcagttttttgcactttaggtaaaactactttatgccttcacatgattaacaccaaaaaccagcctgatttcatagcaaaatgtagtggtataagagctgggtcagttctgcagacttccagctgtattctcagatacgtccagcgaaaaaggcaactcaaacttaagcactttatcagtacatgcagtttgtattctttcaaagagcattcctatttcatgtttgttccttgttttaagacaagcaaaggctcagatggaacatattgtaaaagcaaaagaacattacttcccccttctaacaggtccttgcagctgtggaattccctgcctttgtgatcgatggttaagagtattacagtggaataagcagagttgggatggcaggtggtgggagggccatgtgttgtaagtcatgtggagttatggtaaaaatgaaaatcttggggtttatttggatcccccatgtattagctaataaacgtaatagagctatggttctattcttttataatttttttattggggttcatgtacaatcacatgcaaaatatagtagcagatttgaatatgttaagcattttgtatggttggaagatgtatattagtgtgatttctgtgttttatagtctagcccaataaacattcagataaaatgtccatggatttacacatttatgtgttcttttctgtcccttccccctacatcctgtctccatgccttcatccctctatcctgcatcaaagcttgtggtccttctccatccatgtactaaatggtttctttgtaaaccaagccatttgtccatcattgtttggggtccaaacagtggtaagataccctgtcaccgatcccgcatgctatgaatggcagctcctctccggacaattggcggaggggccgagaaatattcctgagaggattatttaacctttcaatttagagggcacaaagcctggctgattaatgaactttctgatgggtgccgataagcggatctatttctttatttcccctaaaagtgattccttcttctgtccatattactataatcttaaacataaaatgtggcaaatagattaaaaaacagcactaaagagtttatctggctggcaaactgaaggagctaaattaaaattggtaatgacagcagtggctcagcctcatatatggtttttaaatgcactgtgtattttgaagagacttattctccagctcgcctggtaatgactgcttttggtgcacagtctggggctggcttctgttatcccaccccaccctacccacccaccccccccccccccaaaaaaaatgagttgtgttatctggatggctgcagacacatacgcatccccctttctcactgcatgggcagacaaggtcgatagcattacaaggtatttgtggcagtgcttgtttcagttttcagagctgccagtttccaggcggatttgaattacaaaagaagaagctggcatgaaaattgaaaggttttatcggctggtctgaagcctcatagcacattgcttatttatgcagtccatttgcaccaggaaatataaaaaggaaatacatttttaaaataaggccataaagactcagatatgtttaagatggcaaataaaatatagatacctataatatctttccaggaaacgattttcacttaatgttgcacattacttcagaagagcatttatgttgctgtcataaatttgtgcgtttgtgtcactatgtaggtagtctctggggattaagaaggaagcctttgctaacttactttaaaattaaaatagacggagggatagctctgcagtttgagagctacattggaaatatttaaatagggtggtatattaaacttaaactaacatttttgcattccatgtaaaattagctatggcccaatgaataaatgctactacctttagagaaaattgggatgctttttaagccatgaagatttggagcattcaggaagtgaattactctgatccttactgtgttgcgtgtgttcattgttctctgcttactgaggttttctttctgttgttggagttgttttgatagggggagtgtcctgtttacaaaaagaaaggttataaattaataagcttaatagctcatttttataaaactcgtgcttctttttagttttcagatatattttagattttgcatagtggttaatgttgtgaatatataaccctttcactattggaagttataccaataatttatatctatttacattactttaatgtagttttcgatttactgaaaaagatacaatgatgtaatcccttatactcttgactacataaaatgaagacataagtatacaaacataaagtagtgcaagaccttgagtgattggtcattcgcagcttttcaacccattggtttataaaatttcagtgtatccaaaagagaagtagggaggaagttacagagatacaggaaatatcaaataactaaagcaacacacgttattctgcagttcaaatgaacactctttaagaatcttttttccaatatggcaaattactctcaggtaaaccatgagagatgcatttttttactatttttattttcactatttttaccagtatctgggtacctttcccatgttttcacgacctcgactaattacttcatgtagttgttttttgttttctttttaaacagagaaaatatcaaaagcatacatgtctgttgcatgctaatgatgtgctgtacattttttcatgaattttcataaggattttttctacgtagcatgtgtggcttaatgatgtaatcacccgatagactagaaaatgctccaaaggagacgttccggtctgttgtgtacataatacatgtttcaaaaatctgcctaattaaggaattacccaatggattgggagtctgttgggtacatgacatggttttttaacacataaaagtattatgtatatatggtacacatggtacttttaatgccatttttaacatatgaggaaaattagtagcaatgtccactagaatacaggggaattctgttttttcactaagcaaaaataaaagctttaaaaacagcactcttttaaaataattctaaagccattagcttggagaaaattcctcctagtattcctgaaagggaagtaatactgtcaatatttgccagaacagtgtacaaatggaagactttgtccaaaacctcagttgaagtaggcctagagttcaggtcccaggtgtgaggatccacctcagaaaaacaccttaaagggaggaaagggaacagtttttggcttttttgtaacacagcatcatctttgttgtctcacagcctctgctttggttcagttcactataaaacagtttgcctaacttttaggtttctttatttgattcttttaggcataaattgatttggaaatatgaaagaataaggttgttctcaaacatgaaaatcatattgattgaagaggtgcctaggcacatgtgatttagtcagtaagattggagccaagctctacttttctcagtgttatatttggttatgaatgcatttacctcaggtatttaatatatttgctttttaatatatgtcatatagcaaactggattaataaatagaaacacatagtgtagtctttaagcatatgtgtgattataaaaataaatccattttgcattcacagaatagaaaataccctttaattagtgaaattgattacatatcgtatatagtaatgagcttcagctagatgcaagccctcattggatcaaagtcagtttagataagggcagctgaaggtcacagagggagatgcccagcaggttcatttgcataaaaaattactgttagaaataggacactgaggcagctctagcattttgatctcttggcctttgtcatggagattcctagtagtgaagggagtaaggccagtgtcccagataatgattaactgttttaatggcattcattcattcattccacactaactactcatgcagaaaaaagggttatgtaaaatgacattagaagaaaatcatttgtaatcgttgcatcgggctgcactttgaggagacattaggagtaaatccgtggcgtggtaggcttatgctttatcttctgatatttactgagtttactggtgcatgaaaagctttcagcaagaatagcagatgggatggacctttcataggtaatgctatctaccaggttattacttctatatattgatagtaaagtaatctccaagatatcaccctacaaatatagattatttaaatgtctgcaaccaaaaaaaaaaaaagaaatacaaaaggcctgcttttataagtaattaatttggtatccgttgggtcaaagtctttagatgaaattttgacttaaaaaagttcacaaaaactacattcattgccttgcatttaactttttgtcagcagtacaggcacgtatgacagaacactgaacttagagctaatcagttgacacattctgctttaaattggacctttactgttaattaaaaataaagacatgctccaaggcataagtattgagtcacaaatttatatttctaacacaatagcttagagatttttgttagatcatagtatgaaaacttgtccactggaaaccactattgagttttcagtagtgtattctaatacagaaatgttctctaattaggtaagatctaggctgatttcattcctattaagccctagtacatgatagtttattaaaatgagagtatgtagatagcgtttgtcatgtcatttactaattaattattgtgaaacagtttagaatttcatagcacaatatactgttgctatttttattagtaataatggaagtttttaactactgacattattcagatgaatgaacatccacatgtttacatttctttcaggggctaaatttgagattcctttaaaataaaataagaagtgtcaacatgaaacatgctttcaaaatctcgattaagaaggatctctttgtccctggtactgtaagactgagttcctgttcacttggcattactaattccttcctgattttgtcagagtatataccacattctcagtgtgaagtaggggagacaataaggaagctgtattattaatttattcaagctttttaatatatttaagcatgatttgataggttttcccttaatgacataaaaaattaatagtttcccaaagtatgcaagtttttattaacaagagctaaatcatattggatgattactgtaggccatgtgctttacttatgcattacctcattattcattcattaatatttactgaactactactatatgcctggccctattccaggagctgaagtacagcagtgaacaaaaacagacaaaaatccctgccctcacagaacttactttctcctagcctggggatggggttgggagtggataggtagtaaactatatagtatgtcagatatgataagtgccatgttgagttttgtttggttggttggttggttggttggtctttttaaaataaaatggcagtacagcaggatagggagtacagattggagggagctagccattttaaatagggtgctcaggaaggccttactgagatgacatttgagccaaggcttgaaggaagtgaaggagtgcactatattaaatctgggagaagagtgatgcaggcagatcaagtagctggtgcaaagcgctgaggtggaagtttgtctggggtattcagagaacagtgaaaaggccagcatgacaggcttgctgtgagggaaagtagtaggagatgaggttagagaggtgggaggatgcaaattacaggccattgtaaagtttttggctttttctctgagatgagaagctgttagagagttttgagctgaagagtggtatgttctgatttgcaggctataaggatcatctttggtttagagtatgttgtagagggcagggatagaagcggagagaccagttatgatgttcttgtaatcatccaaacgagagttgagtaattggaccaggacagtactggtagagtggaaagaggtggatgtatttgcagagccaacaagctttgctgatgggctgggtatgaggtataagcaagagacaagttaaggttgttcgtttttggcctaagaaactggaaggacaaagttgccgatgagatgggaaagattttgggaggaacatatttggggtgggggaagaacaggatttgattttaactaactaaatttgaggtgcctgttcgacattctagtagagatacgtgagtgtagagttaacagagatcaaggctgaagatagaattttagaatggcaagcgaaaaggttaatgtaaatctatactattagatgagagcagattcaatagagaagaaaagcagtctaaggactgagccctggggcactgcagtgtaattggacagagagatggatagaagccaacaaaggagactgcagaagaaatagcctatgaggtggaagaaaactaggagagcgtgttgtctgggaagctaagtgaagaatctgttgcaagaggaagtgatcacctggtcaggttttactgataggttgttatgtaagatgagtatgtttcatttatgcctcacagcagtgttaatgagggagcactcttactgttattattcccgttttacagatgagtaaaatgaaggaaagaccatgtaaataacttgactaaggtcacatagtcagtaaatagtggagcccacattagaacataatcccaaaatgcattggataaataaattttatcagagcatctgggtcttaggaagagtttgccaattttgcccttgattgcccccagtcgttaaaatacttttcttccatgctttttctttgaataagccaaacataatctttgtattatgtgtgtgtacatatatagtacatgcgcatagccatacacttgtatatgcctgtactgtctctgtgaacacgagaatctcgtaacagtaattgccgttgaggaaaggggaactgagtgagaacagaagtgggagacagacttctcaccacacctcttagtgtcttttgaattgtgtgccatgtgcatgttactgattgtaaaatatttcattctttaaaatctaaataactcatttaggattcattctatagcagcaagacatatgatttgttctttcaggctctggcctaacagcatctcagaagaaattgtgctgatgcagttttttagtagaaaatatgtatttgatgcacacttaattccattttgtaggcctcagcctccctagtgctttcatctttaaaatctttactatatttgctctttcatctattatctccgtattcctcgcagtgtctattacaatgtgttgtacaaagtaggaactcaataacttttgaatgaaaaattcctactaagggataaatcatgagaactacctgttatttcctcaaatttaggcaataaagtaactaaattcggaaaaattccatgaaactttttctcaggcactcaattagtagcagagattttcagtgtttgtatctactttcaccacctttattggtgcataacttatttccactctctgttgaagtccttaatacctactcattcaccacctatttgtttgttgagcacttcctatgttctaggtcaggggtcagcaaactttttctataaagagccaggtagtaaatattttagcctggcaggccatatggtctctgttataactctatccttatagtatgaaatcaaccatagaaaatttgtaaactaatatgtgtgcctgtgttccaataaaactttatagacactgcaatttgaatttcacataattttcatgtgttgcaaactattctgtggtgattattattattttagccattaaaaaatgtaaaaccagctgggcacagtggttcagttctgtaatcctagtgcttttggaggccaagtcaggaggattgcttgagcccaggagttcgagaccagcctcagcagcatagcaagacccccatctcctaaaaaccttaaattaaaagataagttatgtcttatatttgcacaaacaaacataaatagaaatatttgtgaacatagaccttttcagagagcatttattatttggagagtggatgatcctttttatcatcacaatccctgctgacagctaccaactagttattgatcacctaccattagcttcaaacccatcatgggcatcccatgccacttaaaacaaatccgatattcttcaccctaatttataaagccctaagtgatctggtccctccctgtcctctagagcctcctctttcactcttccttcacctactccacttccaaatttacaggtatttttttcaaatcctcaaatttggtaagtttgttcctaccataggactcggtactactcgttccccatgccttacgccaagagtggtgtttcccagacatcacatacatggcttttcttgttatgagaaaggaccttcctagttgaggcttcccccaaaaagtcaatctaagtcatcactagtgattctcattcatataactattttaattgtttgcatactatttttcgctaatattttgtatgtttgtgtattattggctctatttatcttccaccactggagatgtgagcaatgacttttatcttgctcacttctcagttacctgatcttagaacaatatctggcatgtattaggccctcaataattattttttgaacaaattaatgaaggaatgcatgcatacactcatgccatgggcccagcactctggtaaatctccctgatggaggcatccttcgacttgtattctgctctacttgtccccttcccttcttgcatacacagcctagtttctaggaaaagtgacctatgttctgttcttcagcagctttctacttataataaatccattacaatctggcttgtacctctacccctcgaaagaaactactcacaatagtttctccacttgccaacaacttcctatttgctaagtccagtggatttcatagtcttcatcttatataacccatcagtagcttttaacagtttcttccttgaaacatccattctgccttcatatctatgacatcatctcttttgtttttatttctcttaagccatgtatgcttgtggctgcaatttgatgtcacgtcaaataatatagctgtctttgtgggtggaaaatcatttctgcttaataatttcatgtcttcacagtgttctatctgaagaaatttgtgaaccactgcaataagggatacatggcttacatgcgtacctgttaaaactctgtttaggctgggtgtggtggctcatgcctgtaatcccagcatttggggaggctgaggcaggcggatcacttgaagtcaggatcaacctgaccaacatggcaaaacctcatctctactaaaaatacaaaaattagccaggcgtgctggcatgtgcctgtaatcccagctactctgaaggctgaggcaggaggacaacttgaacccaggaggccgaggttgcagtgagccgagatcgtgccactgtgctgcagcctgagtgacagagcaagactccatctcaaaaaaaaaaaaaaaactcttgtttaatgacttttagctagtcttaatttatgaaccccatttttaattgcagaatataaaacggttgttatttttattatatctcaattgataatacctgaggttgtaaattccattttgtgtagctttcagtaggaaagattattgaggttattgttttgctacagtttttcattttagggaataagagctgaaagtaaagttgtttgaagtagttttttttgttttggtttggtttggtttggtttggtttgggtttgcgtttgggttttgttttttgcgacagagtttcgctcttgttgcccaggctagagtgcaatggcacgatctctgctcactgcaacctccgcctcccaggttcaagtgattctcctgcctcagcctcctgagtagctgggattacaggcatgcaccaccacgcctagctaatttttgtatttttagtagaaatgaggcttctctatgttggtcaggatggtctcaaactcctgacgtcaggtgatccacccaccttggcctcccaaagtacagggattataggcatgagccactgtgcctgacctgaagaagatttttataacctatttattattttcctatatcaaggaaataagacctttacaaaacacctgtttgcaacattaaaaacaaaattagggggcctgggcacgttggctgtaatctcagtactttgggaggcgaaggcaagcaattcacctgagcccaggagtttgagaccagcctaggcaacatggcaaaaccccatctctactaaaaatagaaaaaatagctgggcatggtggcaagcacctatggtcccagctactcaggaggctgaaacccaaggattgcttgagcccaggaggtggtgttgtggtgagctgagattgtgctgctgcactccagcctgagcgacaaagcgagacgctgtctcaaagaaaaaacaaaattagggctggccatggtggctcatgcctgcagtctcagcactttaggaggccaaggtgaaaggatcacttgaccccaggagttccagaccagtctgggcaacatagtgagtccctgtctctaccaaaaatttaaaaaacaataatataaaaattaaagtagccaggcgtagtggtgcactcctgtggtctcagctacctgggaggctgaactgggaggatcgcctgagcctgggaggtcgaggctgcagtgagccatgattgtgcctctgtactccaccttgggcaacaggggaagaccctgtccaaaaaaaaaattagttggcagactagcactgtttgttaaagactttcaataaacaacataagaaataaagtgatccacgtttaagccgatccttaacttttcttccagtctccacaaagcgtgggggtgtgcaggggttaggtttttctccccctgtttacagccaccacctcctcagaggtctgtgtccatcatctcctttcctcctctggtttcaacttctccatctccattatctttcccagatgttcaagtctttcccattctataaacagattccaccaaatccccttcctgggtactgcttcatcttattctgccgcttcatgcttctcaatatataacttctctctcctacaacttccattcaattttttaaaacattttttgttctgaaataataggttagtgcaaaggtaattgaggttcttgctattaaatggcagaaactgcaattacagttacctttgcaccaacctaatatacatactgaaaagtatgtaaaatacatgtgcaaaagaataaattagttatgtaatacacacacaagttaactatcgccatgttgaagtaacagaaaatttcagctatgccaatatcctgtgtgctgtttctcctcactggaagtaacctggctttaaagaaaaaaaaaatccgggttaagttcacagatcctggcttttatgagtaatgatttctttgctctttttgtagttttaccacctttgtatgcattactttactgttcatcctgctgccttgtactctttctagaatatctcagaattttcacagtaaggttatctgtgagcagttgccacttcaagtggatgtttctcagtcctaatctcactaggcctctctgctatatttaacattgtagatcagttcatccttcttgaaacaactctaaagtctgttactgtattctcctatgtctctgcatcctttaaccttcccttctatgtccatttcacaggctcctctgcccaccccttaaacattgatgtcttcagggttccttcctcagcccacagccactcttacactgtccatggtgatcctgtccactctagtgatttcagccttcactcttatgctgattactttcagatctactcttcagctcagactcttctgtctctacatagaaactgcctcctggagatccttacctagatactccatatccaagacagtcttcatcaactttgcctctaaacttgctcctctttctttttctactttttctgaatcaatccttgttcacccatgttcaaaatctggaggcatcctgatttttcctttccctcattccccacgtcttttcaatgaccaagtgataccagttcgttctttctttctttctttctttctttctttctttctttctttcttttttgacatggagtctcgcttttgtcgctcaggctggagtgcattggtgcgatcttggctcactgcaacctccgactcccaggttcaagcgattctcctgcctcagcctctgaagtagctgggactacaggcacacaccaccatgcccagctaatttttgtatttttagtagagacgaggtttcaccatgctggccaggctggtcttgaactcctgacctcgtgatccgcccacctcagcttcccaaagtgctgggagtacaggtgtgagccaccacacctggcccaaactacaactatcctaacttcgacacttaaaactggataaagctcatgctcctttacttgacttacaaggccctccattcttgtgccctgctttttccaccttgtcttccatttacacccggctatgtatgtcatattttggcagcatgtatgctcttttttagttccatgtcactgttcattctgttccctctgcctaagattctccatttgatttacacctaatttgagagtaaatttaagttttacacctgcagggaaactttctctgacccttctttaaccccatccgctggtgggggagtccccctcaccactccattaatgccttgtacatactactgtcactgtattgacattgttttgtaattatgtatatgcctctcatgttctgctggcccattatactgtgttggataccgaacacagtacttggcacaatgccaaattgaatgaggagggaagaaggagagggaagcacacattgacattaagagtaaaagaattgttcttaccatgttatatactttaatatatggaatcgcctgaatacaggtctccatacaaaactctaagaaacttctaaggaatcccttacctataaagctcttttggaaagaatgaggttttaattttcttctaacatcaacaaaccctcacaaatattcatgttgcagaccaaacctggaccacccaaaaagccgaagaccccttcaagaccatcagccttagcatattgctatcactgcgcgcaaaaaggccattatggacacgtaagtttgagtgacatttgggcatgaagcattctgttgtcagggagtgttttctgaaagatgaactcaaaaagaatgtaactctaaatacttactttttaataaacattaaagtaagacttaatatattttcaactggtttacccctcccctccctgctagagtaacaagctatcagagcatattcctctaattatgttacatgtacatgaacaggttgggataaaactaatatagttcataaaatcaaacaaatataatagtcaacagtatgatagcagttctcatgagttcttacaaacacaattgctttgacaccgccatagcatgattttagattttcttttttttttgagacggagtcttgctctgtttcccaggctggagtgcagtggtgcgatctcagctcactgcaacctccttctcccgggttcaagcgattcttctgcctcagcctcccaagtagctgggattacaggcgcctgccaccacacccagctaatttttgtattgttagtagagatggggttttaccatattggtcaggctggtcttgaactcctgacctcaggtgatccacctgccttggcctcccaaagttctgggattacaggcgtgagctaccacacctggccgattttagatttttgttgtgttttggggtttgttttttttttttttggttttttttttgagacggagtttcactcttgttgcccaagctggagtgcaatgacacgatctcagctcactgcaacttccacctcctgggttcaagcaattcttctgcctcagcctcccgagtggctgggattataggcgcatgccaccatgcccagctaattttttgtatttttttagtagaaatgaggttccaccatgttagccaggctggtctcgaactgctggcctcagatgatccacccgcctcggcctccaaaagtgttggggttacaggcgtgagccactgcgcccggcccaattttagattttctacttagttctcccgttttccctggtacaatgttcagttaagtctacatcacatacatgtaaaccctggcattcagtggtgaaaaaacagatgctgcatcattgacttgctcacctaccccacaaatgcccagattccctatccagccaacatattccctaaccccagctgaaaaggccaaactgtgtgtgttctagatgctgaggtgtcaaagcagaagaagcttcttgctgagagctgggcatgaggccactaggcagatgccacattaagtatgaagcagcagcagctcatttcagagaaaggatgtaataagaataggctcagagcccatacttctgggaatcttgaggcagtggaggaaaggcagtggcacagaaagtagaaaattcttaaaaaagaatgtattattcccagtctccaggtaggcttctagtagcctagaaaccaagataaactaatatcaaaccagatctggtgtcaggaggcagaaagcatgcagtgttgggagtcctcagactgagaagtatgagcaataggatggggtgagtggtattgcaggttaccacttgaattccaactatgacacatcactggtgtagatcttgggagctggagacctacattgtagggcaacgaagaaaagtgctgaacagaatccataaacagataaagtttatcttccatattggggcagcagcaaccgtgggggtgagacataacttatgaaagccaggatgaggctctgagcctcagttgcagtttttgctctgctactgactcaaccatgtgatgtaaacaacccattttttctctttggtcccatttctttatctccaaagcagagaagttgtacaggaaatctctcagcaccaagtagtgaagactttttttgagacacggtacagagtgcagtgggcactatctcagctcactgcagctttgacctcccaggctcaagtgatcctcccacctcagcctctcgagtagctgggattacaggcacacaccactgtgcccagctaattttgtttattttttgtagagacatggtctcactatgatgcccaggctggtctcaaactcctggcctcaagcaatcctccctccttggcctcccgaagtgttgagattacagaagtgagctaccatgcccagccaagaagacttcttttacagaattatcatctctagatcttttactgctctgtccattcctcattactaaacattcagatgttgtcaacgtcttttagggaacatattcacataagctttccattaccacacaaatcacatagatgtacaatttttgcttgcttacctctgtaaagcagaggggtataattttagcatttatgtttgttcaattaaagaaaaacaattatagttggatgcttactagtcacttctgttaaggcagataggaaatatattaaaagcatgtggaatttatccctaaaatctagatgtagataatttttaatttacaataaagcaaatttggcagcctcatgactgccatagatgaggaactctagattatttacactaatgaagaagatcattggtgtggctaatccagaatagtagataaattatatagccaactatcaattgtctgtgctaatggaggggaccagcgatgtggataatcaaaatataatttacatttagctttggaaaacatttgtagtattatatagctctgtgtagtcacatcagtctagaccatacaagacccaaatagggaactatgcaggtggttaaagatgtctgtggaccccttccctttcaatgtcagaaatccagccttacagatactattattgaatggattcctcatgtgaaagactagatctaaggtgaatatgacattgcccttccctaatttcactcactctctagctggggaagcaaggacaacagtagtcactgtacaaagattactccaggagtgtgtgaaagggggagcacgggctgggagagttaaagattctgctgaaatgagtattagttgagtgtatcaagacctctgttacctttgcataatcacaatttgctcttttttttttttttttttttttttgagacagagtttcgcccttgttgcccaggctggagtgcagtggcgcagtcttggctcactgcaacctccacctcctaggttcaagctattcctacttcagcctcccaagtagctgggattacaggcatgtgccaccacacctggctatttttttttttttttgtatttttagtagagctggggtttcaccatgttggccatctgttctcgaactcctgacctcaggtgatccacctgcctcggcctcccaaagtgttgggattacaggcatgagccaccatgccctgccaaaagcgtttctttatgttaccatgtaagtttgccatataacctctaggaccctccccccgacaaaaaaacaatctaaataatccaggtagtcacaacagataaatctaaagatagcagaaggatggaaatgataaagattagaaccgaacttattgaaatagaaaagtgaacagcatcaacaaaaccaaaagctgattatttgaaaactctttttttcaaacaaaagagaaacttctggaaaaactactgaaagaaaaaaggtactaataaacaatgagtggaaagtgtgagtaacttaagatactatataaatgtttttaaattataagactacttcataaagttaaatctgaaaaggcaaataactctaaaatatatgtataaattaaccagactgactcaagaagaacaaatcaactgaaccaataccattaaagaaaatgaataaggccaggcactgtggctcatgcctgtcatctcaacactttgggatgccaagttggaaggaccacttgaggctgccagtttgagaccagccttggtaacatagtgagaccttgcctctacaaaaaacaaataaaaattatgaagtctgaaacttaaaacttacatcactgttcattggaatattcatcagtaagagtataaaaacacatgagaatggccgacttcaacttgatgacagtggtaacttctggaaagggaaggagatgagtgcaaaatgggaaggacttacatggaggatttcagctatatcagtaatactttattcttgggggaaaaacaggcaactaaggtaaaatgttatggttttatatgagggtgaatataggtttttaattatttttttataaattgtgtgtttagaatgatttataattttttaattctacaaattaagtacataaatgtttggctgctagcttggctagttcagacttggcttaattttatgtggatttttcacctactctttaaaatatattctaattgtttttcattacttagctaagaaacaacattttaaagtaacttttaggcaagatggcagaggcagaaaggggaaagttccaaaagaaaagatttcaaacatgctgaatggatctgtgtcacagatcatgataaacaaaagcctgctatgtggtgagtggttcaggccaaagcctatggatttgggaaatactagctgggtagaggccagagtcatgagagtaggaagctgtcctgggaaaatgagtaagagtagggatttcaacttgggtggcggaagcaagaagagaaacttcttttggggtgtctcacaattacctaggaacaattttaaactaggcataacctaccaccaacctaccccccaccgttaagaatcactacccctataagcagtgaatgttgagttaaaataagcttgcaaaccatttgtctctagaaaaaaagatcaaagggcttagaacttatacccacattttggggataggaagaagagatggaaaagaacttgatagaaggctgttggaagtgatggacaagcaaaggagtaatactaacatgaggccgaataacataaacccactaacagagcggcaaggctgctacctcagactgtgaaaggagttaggcagaaaaggctgaaaaaagatacgaagggtttcataggtaaagaagtaagggaagaaaactcaagcttgaaagaatatcataacacagtggggtttagggctgggtgaccctcccaacaccccagcaaggaccatatcctacagccaccacatgaggtaccagtgacatggggctcatttctaattaacatgctccagaatcttgcaaaaaggtttttgaacagtgtgaccatgtgacatcataattttacatacaatttataggaatgtccagaaagagaagtgtatgacccgtctccagtatctccattcatctgctactatgatgacaaatatgaaattcaggagagagaaaagagactaaaacaaaaaataaaaggtatgttgctagacttcttgttagatcacatttgcagtagtttctaaatttctttgtttgtactgtctttgcctgctttgggggtcattggttagcatagaaagtatttttagtaattaccaaagagactggaactttcttgatctccagaaaccaagcacccacttcagaaataatcccatgttgcaatctcctcacagtaaacatttttttacagtgatcattttaggaaatgtccagaaaatattgctgtccatctatataggcagagtttttaaaggctcctttgagatttttctgtttgacaggtaattatttttttttccatttgtatttctccagtatttttttatggaaagaaaggctttcctgctaagttattcctggagcttccctgaagaagtcatttgttagaggccaccgctgcaagcagagctccaagttcacaaccacctctgtggtttctgtacttactgttgcaaacattgttctttatcaccaaattaatatcttatcatttaagttttctctacctctgttctttcttgttattcacttcaaggtggttttccaagttatctttcttgctttaaaaacaaaacagttctgtatttttttagtttgttctataccttattttctgactcttttggccttttactcttctggattcttagttcaggacctttccaaaatgaaggtactaattctgaggaaaatagagttattactctcccagctcctgcatattttacatatttaatataaaatgtatgtcatctacagctatccctggatattggttccaggagcctcctcatttaccaaaatctgcacttacttatgtcccatagttgactctgcagaacctgattataggaaaaagtagccgttcgtatacacaagtttctaatctgtggaatggtgtattttcaatcctcatttggttgaaaaaatccacatttaagtggacccacgtagttcaaactcattgtgcaagggtcagctgtgtggagaagttatagtagttgtagattatgattaggcaaccaaattagagattaaaaagaattgcatgaaaatgtcatctctagattaaaggattatatgtgctttctgttttttatgttctttgtacttttctgttttttccaggttttctataatgagcagttataacttataattagagaaaacccattttggtttttttttagctagttgtatcgacgtctgtagcataaatccactttgaggtgttcactatgatcctttgaaatttttataataaaagtctatgctaaaagtttttattggccacttttttaatctttaaagattctattgactgctagttttcatctctcactgtaacctcatctcccacctacccgtatcagaatcactatcagagatccgtattaagcgtgtcaagctctgacaaaacattaacatcagctttatcactaaaacctctaagatacccgcactcacgtgcactcacacacactcctcaaagccagtgatctctaccctggaggaataatctcttgggcagtttggcatccacctaaaagtactatggccaggccttatctttagagggtggttgaaatgtcatatgagaccatcaaaaggccattttataaatcttgctttgcctcattttcaaaggctgactcgtcatcattggggaaactcgtattggtcagacatgacttttcttcacaaagctaagatgattactgttcttacaggtcctcatctccattgcttaaccttgttaaactgttgaaaaggataattaactatcattggatttctgaatgtgtttcatttttagcaatcagaaacttggagctacaactatttaatttttagtgagtgatgtcatactgttaacatgtttaaatatctagcttccctgtctgttaagttatttacacttaggaaagctcagcatggactgtttagctgctgaatatgcaaaaatacttttatatttttcagtactcaagaaaaatggggttatcccagagccatccaagctaccttatataaaagcagcaaatgagaacccccaccatgatataaggaagggccgtgcctcatggaaaagcaacaggtggcctcaagaaaataaagaaacacaaaaagaaatgaagaacaagaatagaaactgggagaagcacaggaaggctgacagacatcgtgaagtggatgaggattttcccaggggccccaaaacctactcttctcctggcagttttaaaacccagaagccttctaagccctttcaccgttcatcacattaccacacgtcaagagaagacaagtctcccaaggaaggcaagaggggcaagcagaagaaaaaggagaggtgctgggaagatgatgacaatgataacttatttcttattaagcagagaaaaaaaaagtcttaagccgtcaggcagcctctgatgtggcttttcattgttcatttggcctttgtgtctataaccttctggcactgtgtttattatctatgattaaataaagtgagtttttggttttgtttttttaatttcagccattcctagagttactgaatatccatggagatctcaattctctgtgtccaacaggatattaggtaagaaagtacaaagataaacctggacttctcctattccaatatgtcatctttactcagaatcctagggataggtagaagaattcatcttttcaagaaagtgttttaaaaatactttgggaaaaaaactgcatcaaaggtaatttatcctcaaattaaatccttgcaggaagagaaattaacactaagaaaaagtcatcaatatttttcaactttttttttttttttttttactttggaaaggacaataactataaacctatatccagattttctttctgctgaagctgttgtcagaatcttcctttggacaaaacatcactagctgactataaaaacaaaagtgtcatcattgaagccctgaagaggcagggaattgagcttcagcaaaatacaggaaaagaactatccagtataaatgtcagaagacagatttcctaaacaagtaaaagagacatcaaaaattttaacataatcacaatgaaatcattttttaccacttttacagcggtgtttcaagcggactgtcactcagatctgcagagatgaatattactcaaaaaatttttttgttctcttgcatttttttcaactaccgcaaagctatacagatttttttgtacttgtggatcttttgtacttctcataacctaatgtcagactaagaaaaataaaatatctgagagtaaatacatgtgtttattatgtaaaaagacaatgagagtttgagtgacaaagagcatagttaatgtttattttgtttgtttgtttgtttgttgtagagacaaggtctcactgtgttgtctaggcaggtctcaaactcctgagctcaagtgatcctctttccttggcctcccaaagtgctgggattacaggcatgagccatcactcccggccttggcatagttgtgttgggcaggtggataaagttataaaatccctgtagactggagtcaaaaatgccatttttgcccaagtgcaagctctctgccagaataaaatggtatgaaatcaattaaataggacaattttataatgtcaggttcttaaatttgtattttactctttgggaagtatgcagattcctgtatttctggcagaatcatctctcatctttctgagaggaaggaagaattctgtcctctcaaatcagtgctagtgcaaattgtaggatcacagagtttagtctaccactttccctgttgctgcatagatttcagctaactttattatatgttgatgcatagcttcctaatagctagagttgttttcaccctaaagtaagcaaccagggttttttttttaacaacttgctaaatgtggcagccataaaaaaagtttcatggaagtggaaaaccttgagataattggcattattctccagtaggacttgaggcaaacatggcttattactcatatggtataacaagtaccccttctgatcctaaggcatctcctttcagggcagaaataggattgacgttctttaggttctttcgtacatagcagattgtttggagaaggagagaaaggaagcacttttttttctgtttgtctctgcacattatcttattttttcccaaaacttacaaacattttgttctagggtataatttacctattgggtccatgtatttacatgcagataggaaaggatgctgagctacttcacctgtgggcatgaagatacagtcttcatttcctggtaagagaagaacagaaacatggaggagtctttgcttcatttcctcttcatttcccttgcccccagctgttacaccaaatgttcagttaaggtgaatcagtcagtcagtttattaacatacagactcttcatacaacaatggggagtttaaaatatgtatagattcaaccattaattaaataagactttacatggataaatacaagagaagaaaagcaaatgtccaaaacagtaaagatctgtatagttggtaggattaagaagattctaaacatcttacctctggcccaactttgatttgaagcagcttgagtggctcctatcttgggttctaccttggtttgtgtttggccttctcaaaacagagcaaggggaaccagtctcccattttctccatggaaagtcttgctttcatggaccttgctatttgcagtacttattagtagctctttatttttctgttatacaaagattatgtaatcattttaagggggaaaaatgttaaaaacaagtcatatgtgattctttcacacaaaaatgtagttaaaattattagtgtctattttttcagacttttctatacctatgtatacattgttttgtaacctgtttttcacttactttgggaacaaatacatgtctgcacttttgcatgatgttctattatatggctgtgccatgatttaatcagctccctgtcgagcattttgtttccaatttttattatttttgaaaaattcttctacataatatcttctccatttattcaattgtgataaaatggaatttagggtcagagagcatgcatatatttcataaaagttttaatacatgatgccaaattatattcccaagtcagattcttccccaatcatttatatgtccctggcagtttgtgagtattcatctccccattcccacaatcacatggaatattgccattcccttgtctctttgccactctgatgggcagcaaagaaacattattcattagtgctgcagtgaaaagattgatgtgggtttgtctgtgtaaggagagacaggattagcaatatagggaaaatctgtttttaaaagatgtggagagaagcttctcataggaaacaactgaaaattcttctgccaacaaaaaattacatacaaaataagggagcctttcatttgtttatagctgtcctgatcccctggtcttatgcttcgctttctcaacaaaaggaggatgctgctggcatctaataagtagaagccagagatgttgctaaatatcctacaatgcacagactagcttcccacaatgaatctggcccaaaatgtcaatagcgctgaggttcagaaaccctagttgaaaccccagctatttctcaaatggaattctgttcactcgagagagagttcacgttgccttccacatctaacaggatgtgcccttgtcttacaaggctttgcatttcatcatattgccagtgtttgagagactggttggacatggccattcatgtgaaataaggaacactagttccatggcatgaaggtctacagtctggaccactttgtggaggatctgggccactggagactcagccagctgagggaaattaatagtttaggaatcatggaaacaaacactagagtgccaggctatggcttgagccctggcaagaaaaatatagaactgtggtgtgagaacaaagggattcagctagtgaggggaggaaagagttggagactaatctgatgggacacttaattgggtcagaatgtcattaggctgtaggaaggaaccctcaccaggatccaaatccaacataggcccttagatctcacagttggactttccatttcaaagaagcaccaatgttttggtgatttattacacattgccatgcagtgaatcacaggatgaagctgattggtgtgtgatttgagccaaaagtttttctgttcgtttaatatatgttactttttttttttttttttttttttgagatggagtctcactctgtcacccaggctggagtgcaatggcatggtctcagctcactgcaactccacctcccaagttcaagcaattcttctgcctcagcctcccaagtaactgggactacagggacgtgccaccacgcccagccaatttttctatttttagtacagacggcatttcactatgttggccaggctggtctagaactcctgacctcgtgatccacccacctcggcctcccaaagtgctgaggattacaggcgtgagccaccgtgcccggcctaagttacctcttaaaatgatttcctgggaaatgattccatgaaaacccagtaaaggagtggggagggaagtgagacagggaaaagaagagaaggaagccaagctggatgcttatcaagtcatgtctcataaagaggaactttcagactcacagggaacgctagaaagagtgtaggccacacctcaaagttgccctagtaaggggcaatggagctgtagtgtgtgtatctttttttttttttaattagtcattgtttaagccaggtaaattgggtttaggcagccccctgacggatggagatatgaatgaaacaccaatgtcattcgctacagccataatctcagaacagttcttcttacaaaaagatacttggggctgggcatggtggctcacgcctgtaatcccaacatttgggaggctgaggcaggagaatacttgagctcaagagttggacaccagtctggcaacacagcaagatctcatcgctactaaaagtaaaaaaaaaaaaaaaaaaaaaaaaaaagattggccaggcatggtggctcacccctgtaattccagcactttgggaggccaagatgggaagatttgcttgagtccaggagtttgagactagcctgtcaaattagtgagatcttgtctctccaaaaactaaaattagccgggtgtggtggcacacgtctgtggtcccagctcccgagtagctgggactacaggtgtgcaccaccacacccagctaattttttgtattttcagtagagacggggtttcaccatgttggccaggctggtctcaaactcctgggcccaagcagttcacctgccttggtctcccaaagtgctgggattacaggcataagtcaccactccctgactaaaatattgttgatctgcagttggttgaatccatggatgtagaaccctaggataccatagaccaactgtatgtttattatcttgtgatcgttttgcaggtgtgtacatatgacaaagtctagtttcacacaggtaatccattggaaacattttaatattttttcactgaattgggactgttcttattaaactgggtgagttaggctcagtagtccataggctatcttcagttttacttcctgctttgtccatatggggccaagaagacttgatcataaggcaagtatccacctgcaggggccttgcagggagaggtcactgacctcttaagcctgtgagtaggacctttatctaagaggcatgctggtgataactacatgcacaacgttcggaaactactgtctacaggctgaagtctaacttctggcctaaaattcaaagcctttcatgcttcatcttctgcagttcttcgctcttctttctcctctatccccttcacccttcccgtcccaccacatgaatgactaattcctgaataggtcatgcttctcctccatgcctttacctgtgctattacctctacccaaaatatcctcttccccttttatgaccactcccagacaatattaatccttccctctttggtgtttctgttgtcatctgagtgatttattcagcaaacagaggctatggactttctttgcgtcaggtagtattcttgcttgaatactacctgacgcaaagaaagtccatagcctgtgcttgctgtggagaaatctcaagcctcaagggctaacaagcaagagacaaacacgaaaaccagtattttgtcttagaggtgaggagtgcagtgagagatacgggtatgatggtaacaccaaagaagcatgattggtcctgctacagagaggggagactgggcaggacttcccgatgggtcattataacagaagaaaagtgttgcagcttaacaaaaggggaggagcatgaaccatgtgtgtgaggcgtggagctgtgaaacagcaaggatgcactctgtattcgttgcctggagctactgtcccaaaataccacaaagtggtggcctgaaacaacagaaatttgttctcttacagttctggaggccagaagttcaaaatcaaggtgtcagcagagttggtttcttcttgttgtgctgagataattccttccatgtctctcctaccttttggtgggcctgagcaatccttggcattccttggcttgtataagtccagtctctgcctctgtcttcacatagggttctcttctgtgtctccttgtgtcttggctttctggcccacactaaaattatctagggcaattttatcccaagatccttaattactctctgaagaccctatttccaaataaggtcacattcacaggtgtcagggattaagatttggacatatcttttggaggaacattattcaacccactcctacctcaaaaactataagaattgctttgcctagttgcacttttgtttttattccaagcttttatcgggggattcggtcttccatatgttctttttttcctctgtccgactttccattctgatttataccttcctcaagacttttaaattagtgataatttctcatcttacatatgtccttatacttcagtttgtgaaatgtgtgttggacaaaagcatgaactggaaaacacctatcaggtttagtggcagacctctgccaaaggagttccaggatagcagtgagccaagaaactagattgcagtgcattgaggagggaatgagcagctacgaagaggagggtgtctgtctctttaaacccttgcctgtgaaaggctgacagtacagaacactggctggagtgaggctgacattgacaggaagctgccgaaagagagagggatgctggagaaataaaactcaacttatggcactcacatcaaggaagtgggaagggatggatccagagggacaagccaatggagacgggcgagcagggtaaggagatggtatcctcctccttgatggagaagctttttccaagaacaatggaataggtgtgcggggcatagggagacttggaaggacccccaaagggaatagaaaaggagagcctcttggccactaggatggtgttagggagccaggggaggttggagcctctctggaagtgccctgtggctgcccaagtgaggggagacaatgagtacacatgtgaagaaaggatttcctgtgggaaaaccagattcatgtccttcctgcccagagttatgttcttcaaggagttcagtcctgcacacactagtgaataatccttataaatgtccacatatgccccccaagtacgtctaccaaacatagctcagtcttacgtaaaacagtgtacacatgttactaatcagatgctctcataaggaatcatgccattttgagagggcccgaagctctaacaacttgagacctcctatctgggccgtagctttctcattataaagttggaagtggtaggattagcctggatgggttctcattacctcccaactctggtattctgtggttctaatggtagttggtagcccttggcatcactcaagaataatccttgatggccagtgtgcagcactgcctccctgtgggcacccctcagtctaacagccacacagcaagtccccagcctccccagctctgccccattgtatccaggtaagcaaggtgagcccttgctgtaagcatcaccctggttgccttcccatgacccagcttctgagaatctccttgctgtgtgcatagccctcttcacccatctctccagctcttcgtgttgggctccgcccttcttctggtagtcttctgattccatgtggccccatgagccactctctgcccaaccagtcatgtagatgtggcttgtgcacagtctagagactatataagcaggccatgatggttggttgtgatcatttttaggtatcatgctcttgataatgaacatatccctcgatttgatactgttttgatgggaaaatcagttttatcccctcaccatccctttgtgagcatacacctagccttaagtgcttagaagtggctgttctggccaggcgcagtggctcacgcctgtaatcccaacactttgggaggccgaggcaggaggatcacttgagcccaggagttcaagaccagccggggcaacatagggagaccttgtctctacaaaaaaaaattaaaataaattagaaataagaaataaggccaggcacggtggctcatgcctatgatcccaacactgggaggctgaggtgggaggattacttgagctcaagaatttgagaccagcctgggcaacatggtgagaccccatctctacaaaaaaatttaaaaaattagccaggtgtggttttgcacacctatattcccaactacttgggaggccgagatgggaggatttcctgagcccctgcagtgagctatgattgcaccactgcactccagcctgggtgacagtgagacctggtctcaaaaaaaaaaaaaaaaaaaaattctgtggcaccctcctggagacgggtctgtttttagcttccacaccattaatagtttaatctcttaagtcacaagtaaggaaagggagtcacatacgacagcaaaagcccgcagttcccagcaaaagccagaggcaaatgagaacccacgaagaacccagagttcacaccacaacctgtgcgctggtcggggtgacccatgctggacctccacagaacatggggccattcagctaactcagtaaacacttgctgagcatctgacctgagccaggtcctgtgctgacatctaggactttctacccttaaggagctgtggctttttctctagttggtgagacagatggaaaccccttcagttccactacagatatttttgaaatacctgttatgtgccaggcactttctgaactcgaggtaccgcagtgaaccagacaggtgttatctatgccctcctggggcttctaagccttcagagaagatagacactgtacaggtgagttaagtgctccaaagagtatggctcctggtgtgtaagggttcaaatatctgttgatagaaaggataaaggccatgtcatctttattctttctcacagggcccagcatggggcctaacacagttagacttaagtaaatggattcaactcactggtccccagcactgtcctctgcatgatgttaccgaaatggagacaaccaaaactaactggacaacttagtcagctggactggaagactgcacttccaaatggaaaggtttgcagtggctcctttggaaatgtggcttcaagggtggagaggggggaagtgaatgtggggctcgcattataggctttgggggttacagagcttgctggtgttgcttgcccttacgctctgtcaaatctcaggcagatgaaacaagatgtaagctttctaaattatcaatagagggcctgtcattcaaatggaagataagaccagagaaaataaaagtccaccaaaataatgccagagaaaaacaaccctggtctttcaaaaaaccatagatacaatttcttagagaagtttaggccaggtacagtggctcacacctgttatcccagcactttgggaggccaaggcaggtggatcacttgagcccaggagtttgagaccagcctggccaacatgtctctaccaaaaaaaaaaaaaaaaattagcctgttgtagtggcacacacctgtagtctcagccactcaggaggctaaagcaggaggatcgtttgagcttgggaggcagaggttgcagtgagccaggatcacgccacttgactgcagcctgggcaccagaatgagaacctgtctcaaaataaaataaaataaaataaaaaaggtttagtccaggaggcctatttgtgttttgaatcaaaattcactgctttagaaagaaactgcatggatttcagtgttctcgtctgtcatactctctcagacttctttcctaccctcagaaagcttccattttaagataggaaagagaagccctgaaacaagaccagtgtaacttaagttacaaagaggcattcatgtgggtctatgtgtgtggagagaggtcacttctagtgtcactggtggtggagacccaggaaaacttcacagaggagatggcattggaattagctcttgaagcataaagaagactaataattaggataagaggaaatgcctctcaggaggaagacaaatataggcaacagcctggatgtaggataacctaggacacacttaagtaagaaggtctagtataatttcccttgactctagttcacatgagggtaatagagggaggtaaatgaaccagatcactgaagtctgaatttcaagctaaagagtgtggtttcattttcctcatctataaaatgaagataatatctctgtctcttgcaagaattaaagtgaggccaggcacagtgcatagccctcttcacccatctctccagctcttcgtgttgggctcagcccttcttctggtagtcttctggttccagataatggctatgattccggcactttgggatgctaaggtgggagaatcacctgagccaggagtttgagacgagtctgggcaacatggcaagaccccaatctctacaaaaattctaaaacttagctgggagtggtggcgtgcacctgtggccctagctgcttaggaggctgaggtgggaggatcgcttgagcccaggagaacaaggctgtggtgagctgtgattacaccactgtgctccagcctgggcaacagaaggagaccatctcaaaaaaaaaaaaaagttctgcattagatgtatatatattagatatgtatatattagtcattaactacttgcataatgctttgtaaaaagcagctgacacaggctgggcgcagtggctcacacctgtaatcccagcactttgggaggctgaggtgggtggatcacgaggtcaggagatcaagactgtcctggctactacggtgaaaccccgtctctactgaaaatacaaaaaaattagccacacgtggtggtggacgcctgtagtcccagctacttgggaggccgaggaaggagaatggtgtgaacctgggaggcagagcttgcagtgagctgaggtcgcaccactgcactccagtctgggcgacagagcgagactccatctcaaaaaaaaaaaaaaaggcagctgacacaatggcagtggtggcagcggagaaccatcgaagattttgactaggggagatgagtcacttgtgtggagatgtgttttagattaacacagcactgcacaaattagcaattagcacttttgtaatattagtactcataaattgcttttctttccaaggaattaaaagacatgaacagacatggtaggtggttacatcggtcagggttctctcgagaaacagaaccaatagtagagatttattcaagcttgcacagttgtgtaggctagccagtctaagatctgtagggcaggcagctgaggcaggatttctgtcttaaggcagaattccttctttgggaaacttcagcttttgctcctaaggccttcatctgattgaatgaggcccacccacattatcaatgtcagtctcctttatttcaagtcagctgataaatcacatctacgaaataccttcccagcatcatctagactagcatttgaccaaccaactgggcatcatagcctagccaagttgacatatagaattaggcatcacagtggtctttatcttgaatatggaaactgagacacagactggcaaactgacacagaagcttggccaaattagaattcctagaacccggtaccaggcctaccaggtaactcttgtgtcttatagttttatattatttattcctgctttttacataaaatttaccatagacataaccagactgaatatctatgggtagattgtgccgaatgctgatgcaaaccactctattttggggaggaaagagaggactgacgtcaggtcaggcccacaggtagagacacagactttggcttggtgcgaagaaacacttccagactggagtttccaccagtgggacaggctgcctgggacacacacagctcttggtccccggaggcgagcaacaaaaagctgagccacttaacatggtgctgtgaaggagatccaaacatccagccagcatggaccaggggctgagaagagcctccctccgagcctgtatgaattccgataaccccagatactagaaatgatcctcacaattaactgcatccttcagaaaagtccttgctcctctccctaccccttctccaccaccagggagcctgtggagattggagcagaacggggaacctccctgagatggaagccatctgcaggccccactcacttttcctccactggcgccctcttgcctgccagcctaccctggttaaccttcctgggaggagagcttgtcaaagtcgcctccgcctcagcctcctttcacaaccctgcctcatcttccacaccaagtctcagggggcctgcaggacccaccatcatcctggagaagtcatgggtcgccagccacctgtctcctgtgcctgcacccaactaaccatcgcttcctgctaatttgcattgacaaccttcctgcacttggctgctcaggggagttttctggttttatctcctcaattaactttggcctcctgggtcactctggatttcccactgcagacctggctgtggaagcctgcctatatgctccagaggattcttgtcttttcacgagccctcccttcccatctgcaagccaggctgtgcacacagcaacatcttgcaagggagtctcggccatggcaggatttttgaagttctggtgggtgtcagagctgcaaagggccaaaggactgtctagtccactctagcccacccgactttgcctcctctcctcacttcacagatgggaaattgaggcaagaactgagaaaaggcttgcggtggtcatacatcaagtcagaataatggccagacccaggccttggtgccccctcaaccccctcacactctctctgccacattttgtcaacagaaaacaatttgcaaacttcatcaagttaggagggagtgaaaaatgtgtttaaatattgagcttcaacagccttgttacttctaggcaccttcagctatttgcaagaatctctgggcatagcatgagccgggctgtggcatgggagtgaggggctggatggagaagaggcctccctcctgggccaggaagccgactcccatcccctcctttagcaccgtggactgagcacctctaaaataacacctcccatggagttacgatgcgtcagggagcaaatgaactctgagatgcaggaactagacctgaggacaggaggaaactgggaagggagtggggagcagcagcagagcaaacagaaaagatgcccgaaggaagcgagttcctaggccaccaggggccaagaccccagcacgtgctatagattatcttggggttcccaagagaaagaaactctcaagatcagaaagtcactgttgtcttggaggactttcagagataatgaagtctagaatgctcttggtacctatggggaaactgaggcccagagagagcctcgcatcccatactgagttgggggcagagccaggactactgcccaggcccgaccccagtgtgagactctttccacaaggtggggaaccagggcgtgggagcagggtttgcaggagacctgaaggaggggacatctatggttgggtgttgaactttttggagccctagaggccagtgaggcagaaacaccacagaggaaagctggggtttctctgtgacaacagactcttgtggtgctatgaagaaactggtgtggttgtgatgaggaaagaaaggctgtgaaagtgaaatttccaatttgtgagaggaggaaactgcaaatgtgttctccatcccatgcaaattatctgtggccttttgtcctgcacctgcagcggctcacaacatacacaacaccagggctcagacagggctcagggtcccgcagagtctgaactgggtcttccagctccaaacacagcaggagcacaggggcagagaaagtctccctccagctgtgggggtgtcctgagatgcctgagctgcacctgtagggtgtctgccctcccaagggcctgccaggatgagaacgggcaaacctggccaaggtgaccccattagggactaccctcctagggacagcactcagggccgttcccaatcaccccggatttcctgtcctgctcgtctcctgccacacctccttttgatctacccccaagacacccctacctttttattctgtgaaaatttactcatgctgtgggccctgctggaaatgccctcctactgtttccccaaaccccgtcagaaattccacggggaaactcccttcccttctgctgcaggcaccgtcactgtgtctctcagctctgccccccagcctctgagtaccaccttatcctagcccttagctactggcttgtcattgtctctttacgttctcagcctcccacagaagcctgggagctcctcgagggcaggtatctgattcatctctgtatcccaaaagcccagcgttttgcttggcacccattagaggccaggaagggcaaacctcctgtcaaatcccgggggagatgttgctaatcagtcctgaacaccgttcccttggagactcaggcttctcaacgtggtgggtaggccctgcctgtcagccaggacctgctctcccaaaggggcgctccagaaatgtgtgactcagttcagctggaagctcctggcccctcagaggtttgacgccagccctctggtgtgtgatttctgagataccaaggcttacttcctcatgacgcccgcatgctgcctcagcttcactcctgagacagtccaggcaggaagcacagaactcctctcagttctgtactcacactcgatattcacactcatacacacgcaagtatgtacacatgcacatatgcacacttgcaccacacatgctgccacatacacaataacacatgcacacgcttgctcacacttgcacacacacacaaatacactcccatcaaatgttttacgggattcaggagtttcagtgaagatttggggctacgaggacaggttacatgacactgggcatagcttcccactgtccttgcagctccccctacccactctctctgtcctctccccctcaattccctccattgttccagcactgccccacctcggtcccaaattctcatccctctgttttatagagccattctactgtctgctctggagttgggaactgtccatacctgtgcctgcagatcccaaacaagggagtgtttcccaaagaggcatttgaatcacatgtttctccgtcttgcttagtatcattatgaacaaatgaatggctgtagcagaagaatgtcttgtcacagctctccatttcccattctaaactaacacaattctggccagacataatggctcatgactataatcccagcactttggaaggctgaggtgggaggattgtttgaaccccggagttcaagaccagcctgggcaacatagtgaaacccccgtctcagtttttttaaataaaagaaaaaaaggaataaacacaattcagtgacaaatctcttgttttgggccctactcagtgcctggcactgtgccagacactgcaaatacagagacagtagctcccccaagaaagcaccacagtgcctaatagcaaacacacacacataagcaaacactaggctgggcacagtggttcacgtctgtaatcccagcactttgagaggccaaggtgggaggatcacttgagcccaggagttggagatcagccagggcaacatagaccccatctattaaaaaacaaacaaaaaagcacgcatggtggcccatacctgtagtcccagctactcaagaggctgaggtaggaggacatcttgagcctggaaggtcagggctgcagtgagccatactcatgccactgcactctagcctgggtgacagagcaagaccttgtcccaaaaaacaaaacgaatagtgacaagtgaaggatgtgactgaggccatcctagaggtagagaaacagcctttctgctgtgatatgaaggacagtcaactttccaggtgagcaagattgggaaggtcatctcaagcaggaggagcagcacgtgcaaggacacaggagtgcctcacctattcttgagcttcatataaatggaatcatccagtgggtactcttgtctctgacttccttagctcagtgagtctgtaagattcacccatggggagaatactctaaagctttgtttcaaacattgagaattggggagctaacttggaggagcccaaactcaacacaatagtttcctaatcaccccaccacagaagcagggctctcatgaaaattagcttttatcctcttcttgtaaaagcttccacagaacctaagcctcaaggagcacaatgtatagcaagctcccccaccgcctgcactgagcagcaagagtctcactctagtccacaacttaagatgttctattaaacccagggtggattttctatgcccagtggttttccattttgtcttttaatttttactttaaggacttaattttaacaaaagagccaaattaccaccaagctttgaaatgaactttagaggagttaagaacaggctttggaatatgaagctttaatgaatattggaagacagtaattaaacagccactgtgccctgtctcatgctttacaaaaggcaaggaacagagagatcaaagactggaggtgtttgcttcggaaccactggaaccacctgaggagattttttttttttttttttgagacggagtctctctgtcgcccaggttggagtgcagtggcatgatctcagctcactgcaagctccgcctcctgggttcatgccattctcctgcctcagcctcacaagtagctgggactacaggtgcctgccaccactcctggctagttttttgtatttttagtggagacagggtttcgccacgttagccaggatggtctggatctcctgacctcgtgatccacccacctcggcttcccaaagtgctgggattacaggcgtgagccaccgcgcccggcccacctgagatttaaagtctcctgtgcccagcctgcacccccagaccaatggcatcggaatctgttggatggggacacagacaccacaattatctcttaagcactcacgtgattccaatgtgcttccaaggttaagagtttctggattgattgacagtgaagtgatgagaaactgataaaggaaaacgggtgaagctgaaagagagaggtcttcacaccaaaatacagctcagctttggaaggaaccgagagggctacacccaagcctggtgacaccaagggacatttccaacctctgaggaaggagttctgttatgggctaaattatgttcccccaaaattcatatgttgaagtactaaatcccagtacctcagaatgtgactgtatttgaggctggccctatagaggggtgattaagttaacgtgaggtcactatggagagcctcagtccaatctgacaggtgttcttaatacataagaagaggagaccggaacacacaaagagacccaggggtgcacagggaccacatgaagaggcagccagagggcagccacctgcaagccaaggaggaggcctcagcggaaagcaaccctgccgatgctttggtcttagacatctgtggatgacgtcactcagtgttagtttggtgtagcagcccttgcaaaccaatgcaagcttcatttcagcactttggtcttatgtctaaagagtcttctcacaaggttacttcttcagccacttctcggactcttccctaacaactaatgaggatccccttaaatactgatccactaagatgttcacagaatattcctgataattatggatagtggaaatgtttgacaatgagagaatggagaagtaaatgatagcagtcagttcaatagagcatgaagaagccattaagttatcaagatttttttagcctcttcccttgtcttctaacaaggtctttttttttgtttttttgtttgtttttttttgagacagtctcactcccatcatccaggctggagtgcagtggcacaatcttggctcactgcaacctctgtcttcctgttcaagtcattctcatgcctcagctgggattacaggcatgtgccaccatgcccagctaatttttttttttttttttagtatagacggggtttcaccatttggctaggctttcaccatttggccaggctggtgttgaacccctgacctaaggtgatccacccacctcggcctcaaaagtgctgggattataggcatgagccgccttgcccggccgacttaaaaaaatctcaatagaaggcctggcgcagtggctcatgcctgtaatcccagcactttgggagactgaggtggacagatcacctgaggtcaggagttcgagaccagcctgatcaacatggtgaaaccccgtctctattaaaaacacaaaaattagccgggcgtggtggtgggcacctgtaatcccagctactcaggaggctgaggtgggagaatcacttgaacccaggaggtggaggttgcagtgagccaagatcacaccactgcactccagcctgggcaatagaatgagagttcatctcaaaaaaaaaaaaaaaaaaaaaagatttttaaagttgcactttcagcatgatctctcacctacgcaaaaacgcattgaaaatgcccttcagtaagcggatgggtaggtaagttctgaggtattcacaaaacagaatcccacaccacctgcaacaacatggaagaatcttacaaacattgagctgcagggaaaagaagtcagacacaaaagattccatttccctaaaattcaaaacagccaaaactaaatctgtgctgttagtagtcaggatagcagttcccttggggagaccagaacggggtacaagggaaccttctggggtgcggaaaacgttctgtgtcttcatctaggagatcaagaccctcgtcctgagacctcctaaccccataccaggacacttgagtatgtgtctactttctttgcccccaatgtctaggttacctataggtagtcctgcctctccaacacatatggggacacccacagagagtctttagcttcacagttggtgccttgacctacccatctgcatcctaaacccatacaaggatgtataaatatagaaaaatgtattgagttgtaattgtactttatgtaggttaatgtcagttttttttaagtgttttaaaaggcagtgtaaaagagctggaagttagtatgtacacagatggccatggcattcagctggggctggtacagggtctgtgggactggttaggggtggggcaggcggctcagttctgacttgggttggaagagtggaatctgggcaggcttcccctaaggaagtggctcttagatgaaagcagaatgaatggggggaaaagcatctcagacaggcttgttcaaaggctcataggcaggccagtggaggagtcatccaggctgagagcactggtcagggtcggaacatggttgtggtgggagaggagatggataggacagagacagggacacccaactgcagatgaagttgtctgattccaggaatgatcccagcatggctgaccaagggtggtctgtgctgtcgatgatctcaaagcggggtcgggtagccatgccagcttggggcacaagggagaagatatgatgtaccacagtctagatgatgtggttgaggtcccaagtcactgtacgtgagaatattgatgggtaaaccaaggcacaagctggagagctcaagactctgtggatgtgggtgtgtgtgtgtgtgtgtgtgtgtgtgtgtgtgtgtaggagagaaggtaaaatacataggtaggtagacacagtgtcctgggatagagtgaggggatatcaggacaaggtcatgagttgaggcttggaacctagggcagcttaggggttcttagctgatctggtttccccttgggttttgtttcgttttgttttgtgagtgcgtgtgtttagaaatggagccttgaggccgggtgcggtggctcacacgtgtaatcccagcactttgggaggctgaggtgggcagatcacctgaggtcaggagttcgagaccagcatacccaacatggcaaaaccctgtctctactaaaaatacaaaaaattaaccgggcatggtggcaggtgcctgtaatcccagctgctcgggagcccgagacagaagaattgcttgaacccaggaggcggaggttgcagtgagctgagatcacaccactgcactcctgcctgggcgataagagtgaagctctgtcaaaaaaaaaaaaaaagaaaagaaaagaaagaaaaagggaggaaaggaagaaatggggtcttgctacgttgcccaggctggccttgagctcctgggctcaagcaatcctccccctacagcctcccgagtagctgggactagagtgagttttttgcttttaaataagatcagattggaaaggattcttggtgattcttttccttactttatgatttgttttgtaatggccttttcttgccccccaccctcacctcattttacaaagggcaacactgagacccagagaagggaagagagtcataagggaagggaatgtggctaaatctccatggaccaagcatgcaagggtttgagggtgtctgcagcttagtctgtgcccgaggctgggctgtcaggaccaggacctcataagacatctgccccctgccaccggccacccgggaggcccttgaaccagttattttgggagtgccatctgaataagatacagaaatgtgccattgtgtttacgaagatcagcagtagttccttctgaatcttttcggggtattttggctgggtttttcttaattatccagattagcattaggtaaattcccacatgtaaagacgtctcatcttctgaaaacagttgtcaatgtggaagtggacttgtggctggcttgccccctagacaatgaataggcagaggacactgagacccggccagccccatccagccccatccagccccacccttcagcctatgaagtcatttctcacggcataaacaacacggactctgcaaatgcaactctctccttagtgttcaagtacagcatttgtttccatgatgaatcgggaccccagtgattatttctctccccacaatgtggctggttccggatgcttttgggccactgcgtgggacctccaaaggaaggcaggagaaagggatgtgcctgaatcaagccatgagtctgggcgccactggcccatccaccatccggggaggctttccacgtgcaggatgcgccaccgagggcacggccgcctctcccacccgaggccttcactctgccctgtcttcccccggtacccctttctcccgtctctgcccagccaaatcctgtcatggtcagcggccggctgcagcgccacctcagtgaagccttgggggagaccatgccgtcccagcgaggggtacagtaaggatgccacagtcaccccaccctcggggccacctcatcccggcactggcactggcactgtcctctgtggctcccagcacttcacacatttgtatgctttgcttcagaacaacaaacactaaagttgcagaactttatttaaaaatgaaaataaaactgcctgatttataaagacacgtatatagatgtttgggaatgtatgtgtgtatacatatgtagagagagagcatataaataaatttatatatatatatatatatatatatatatatattttttttttttttttttttttttgagacagagtctttctctgtcacccaggctggagtacagtggcacgctctcggctcactgcaacctctgtctccttggttcaagcgattctcatgcctcagcctcttgagtagctaggattacaggtgttggccaccacgtctggctaattttttgtatttttagtagaggcggggtttcaccatgttgcccaggctggtctcgaactcctgacctcaagtgatctgcttgcctcagcctcccaaagtgctgggattacaggcgtgagccaccacacctgtcctatatttatatattctatattacctaatataaatatataaatgttgatatattctatattacataatataaatttataaatgtttatataaagaaatatgtctttgcatattcatagaaagaaatctggaagaatacacaccaaactgctcctcttgcttatctctggcaagttgattttgctttcatatgaagcagtgtttgaatttgttacaggaatgtattaagtttttaagctcttagccaatatttctgaagatgaaaagtgtcctggatatgcatctgtcttctctcttgctggacagtgggaacctgcctctgtcctctaggctgggtcacagagcaaagtgggcagatgtttgtgagatgaattacagagagtgcaaggatgagccccagctgcctccagtgaggcccgggagtgatggcttctcactgctgccctgcagtgcctggaccggcacttagggagtgctccctaaaggtttactgaatgaagaaggaaggaaggagggaggcagagaaggagggcagggagagaaggaagggaggaaggaagggagggaggaaaggagggagagaaggaaaggataaagggaggcagggaaggggggagggagggagaaagagaagaagggagggaagaaggggtatgagtgatcataaaccctgaatttgtgtatctgaattaatgactgtttaatgtataaatgtgggaatctaatgaaacactgaaatacagggtaccatctggatggatggtggaaatattttattactaggcgtacaattgttttcattataaagtaacagaactgtatcccaaaagtatgaaaaataggctgggcaaggtggctcatggccataatcccagcactttgggaggccgaggcaggtggatgacctaaggtcaagaattcaagaccagcctggccaacatggtgaaaccccgtttctactaaaaatatgaaaaaaattagccgggcgtggtggcgggcgcctgtagtctcagccactcaggtggctgaggcaggagaatcgcttgaacctgggaggcagaggttgcagtgagctgagatggcgccattgcaccccagcctgggcgacagagtgagacactgtctcaaattaaaaaaaaagaaaagaaaagaaaacttaatcattacgtcaccctaacaaatcccctatttgtatttttgtgcatttccttccgagtaggtgagtgtgagcacatatatcttctctacgtgttcgtgggggctgctcacaccattttatatcatacttctgttgtaagttcctgtcatatcctaagcctttcttcgtcccgttataaagtcctcaacctcttattttataagtgctgtcaactacattaagaggacatatataacttatttaaccacttatctctttttatattgaggtaacctctcattttttattattatagcgtttatgattttttaaactactagcttttgcctaatgccttcataattttccctgggtaccactcagagatgcttggacacctcaggttagtgtccccagaagcagcctgaaagtagctgggccacaaactttgttaccatgagttaagcagcttttgccccagagagtaaatcagtgacctgcttcctttattgagaaagtcttgctgtggaaaaagtcagcaggactaaatagcccgctgagtgacagtaacgtacattccagtgcgagcttcttattccccttcatggacatctaaccaagcgtttgcagagcagcacaggtctgcaggtgacattttgagcagcacttgtctacagagcttcagtaggcacaattggcttactgtagaaggtttacacctgggtggattcatggttggagtttggaagagaataaagtccctgccatgagcctggcgccgtgccatggccttcccatgtaacagtgctcaaagggtgcccctcccaccactggggcctgctgttctcgagtccttgagcatttgcctcatgtccttcccacgtgctccagctcctgtccgggctgcagatctcccgtgcattgccatgtgtgagcacgcacagccagggctgcccctagaaacaaggagaaccagagccactcaattagaggggccaccacaataactgtactgttggcatctttcataggctccttagggtattgctaaaaagagtaattttacaattgaatttcaattattctcagaaaacaggaataagacccccacatgaaagaaggattgtaaggatttttaagctgaaaggtaatatgctcaggtctgcattttagaaggagcaaactaactactctatggagaatagatcagagagtttgagaccagaggtgaggactccagtggggacgtcaggactggaggtcccaggaaggtcagtggtggcagtagtaggtgtgaattttagtcccaattcttccacctccctgcatccacactctggctatatgagactttgggcttggtcttgtgacttactttgatcaatggaatggggcagatgagtcttgataccaggtctgagagctgatggtaagagaccttacatatttctacttttcctctcatgcatctgccatcaccatgagaagaacctgtccagcttggccgtggaccctaggaggatgagggacacgtacagcagagatgcccaccagcttgccaacccctgagtgagcccagccaaggtcagtagagctgcaggccctgagaaggaacgcctgttgttgcagaccactgagattctggggctgtttgttacgcagtattgctgcagcaatgggcaactgatacagtgggcgtggaaagaaattaacaaagccaagaaatacttaagtaagcaaatggagttagcggccagtcgagtgagtgggcaagacggagagagcctcagagaacttggtttggctcaggtacctggatggttgaagggcacagtgcctgtggtaaaggacacagaggaggagacgtggccacccacagtagacctacattaagagcactctctccttccccctacacttttttcttgtttctggaggaggccagggcctgtgtctgaagagataagctccacagggacagaaccacagtgtgggattataggcacccctgccacagtcagccacccccacggcctccggctctgtcagagcttctcccccagtacagactcattagaacaaccgctgatgtggacaagggggtgacccagacttcccggccataggggccaactcaagaaaggcccccagatttcccagggcctcctgcagaaaacacagcctgcatctcgttactttcatttgcttaaaatacctgcctttgcagcagtgaaaccacccaaaatactcacttctttatttccagctagataagttgaactcaatttgcattggataattattttcaattaagtgataacaatcctgtttggtgcaaaagtaatcttgtccaaaggccaaacagtttatcccatccaagaaacaggaggcagtgataggaggaggcctattagcatgcttgccatgaggatggaggggccaatccccacccctggagggatgcctcagccaagtcgttcgtgggggacctctgacgctgtgggccgggtgggaccattgacctggtttgccctttgacagcccccgggccaagcagccactctttcttctttctggacaaagaaggaggcacctcctgccagctgcaaggaagtggaaaaggcagctggtcagagaagggcccaagacagaggccaggacccaagttctgggccagccgtgtgtccctggacaagtcatcccccactgggcctcagtgtcccctctgtgtggggagcagtggggttagatggggacagttccagctcagatgtgattctgtcctggttatccagagctacctaggtctgaagccaggttttctgtagggaaaagccccacttcctgtgtgatgtgtgtgttgtcggggcagggatgctcctccaccaggaaagagggagcaggcgctgagttctggagcctcacaggggccccgccactctcctggtcttatggcagtgtcacattctctgcaggcagctggagttccttactttcctccacagccttccctactgttgcacatctgggcaaaccccctccccaccaatcgagccgccgtgaacatcttgttcaaggctgctggtgtattcaagagcagaccctgtctcaaaaacacaaaaaagaaaaatgaaaaacaacctgcctgccaatctttctattgttatttacattgaaaaacatgaggatcgaggtggtccaaacaaataactcttgtgaatttttgcagccaatacttcaaatatttgatacttgagtaccccatgctgtgtgctctctgtgtattcactgacatgcagtcctcccacagcaggagaactaaaactcttgtcacttatagacaagaaaaccgaggctcagagaggctaagtaatttgctgaagtcacacagtggaattctgactttttgttggtttcaattgacttccacactgcattttttccttctttccttccttccttccttccttccttccttccttccttccttccttccttccttccttccctccttccttccttcctccttccctcccttccttccttccttttttttgagacagggtcccactacattgtccaggctggtcgacctcctggactcaagcgatcctcacctgggcctcccatggtgctgggataacaggtgtgagccaccatgccctgctgttccgcattcttttctctacttaatggtggcagcggcccttatgcttctctggcacacagtgtaccctcagccaagccgaactgagaagctggacaggaggagggaaagaagaaaccatctgagctgccgtatctcttaagtacagttttctgtattcaaattaggcgacacaatctccatgaataacattacagttcccaaaggatcacacccaatttaaatgtataagaggccattaacgggtggggctagctattagaatttagctccagtgttattgtggtgtggttctgctattaggcaggcgcaatggggataacagaagcccaaggcacactcgcccctggtctccaaggctctgggtcctcagactggctgagtactggggaccaaggtcacccaagaagccctgagtggccctcttgagggttagcagagcttctctctgtccaagacaggtcaggctctctcccctggccccagctccaccgtcactcagaggagtggcctaaacaaacgctgcaggtgaggctcccgagcccctgacatggatgtttatggaagaggactcttggcatcagcacctgggcaaggtgggtagaggcaggagtgggcaaatgggaaagtctagctgccatgcgggctgagcaacaatggggccaacctcaggggacacctggaagcccgaatgtcctttcaaaagttctgaatgtgggctgggtgtggtggctgatgcctgtagtaatcccaatactttgggaggccaaggcaggcggatcacttgaggtcaggagttcgagaccagcctggccaacatggtgaaactccgcctctaccaaaaaatacaaaaattagcctggcatggtggtgtgcacctgtaatcccagctactcgggaggctgagatggaagaatcacttgaacccgggaggcagaggttgtagtgagccaagattgcaccactgcactccagcctaggcgacagggcaaggccttgtctcaaaaaaaaaaaaaagttctgaacgtggagtttcatgcagagacggccaggcctttgtacccccatgcagatcagtggctggatgtgggctgccctgggaagggtgtgacctcaggctgggtgatctcagcagctgaggctgtcctacagggctggtcacttaaggccgtatgctgaccgcctgcccagctgctgggcagcacgtccttcttggaaggggatctgggcaggtggcaatgactgatgcccaccagggctgtggccttgtcagtctgtgggataacacagaccctgcctcagtggctccaggggaaaaagagaccatctacgtgaattgtttagctcagggcacagcacacaaataagagctcaaaaaatgtcaaccactcttgttatccccatcctgacccaaatcacaggatgaccctctgctcttctccctcatcctcgcgtacctccccagcgtccagcaagtgtccaagcctcacttccacacctccactaatggacaggtcactacttcccaaggcagcccaagtcactgttgaacagcttttttttttcctgtggtaaaatatacataacctacattttaccactttaatcatttttaagtgtacagttcagtggcgttaggcacattcacattgttgtacaactatcagcaccatccatttccagaacttttttcccaaactgatactctttacccattaaacaatattccctcattcctcctctcccctgaacgcctggcaaccaccacccccatttctgtctctatgaattggactggactgctgtaagcatctcatgtgagtggaatcacacagtatttttttttccttgtgtctggcttatttcacttaacataatgtcctcaaggttcatccctgtgacagcatatgtccggattcccatttttctttaaggctgaataatagtccattgcttgtacacaccacattttgcttatccatttatctggccgtggatggatagttgggtggcttccaccttgtggctattgtgagtgatgctgctgtgaacactggtgtacaagcgcctatgtaagacccgctttagcagggcatgtggctcacgcctgtaatcccatcactctgggaggctgaggcgggcggatcacttgaggtcaggagtttgagaccagcctggccaacatggtgaaaccccatctctactaaaaatacaaaaattagctgggcatggtggcgggcgcctgtaatcccagctactcagaaggctgaggcaggaaaattgcttgaatccaggaggcggaggctgcagtgagccaagatcatgccactgcatgccagcctgggcaacagagtgagactctgtattagaaaaaaaaaaaaacctgctttttttttttgtttttgtttttgtttttgttttttggggttttttttgatagggtctcgctctatcacccaggttggagaaggtgcgatcatagctcactgcaccctcaatctcccgggctcaagcaatcttcccacctcagcttcctgaatagctgggactataggtgggcaccaccacacccagctaatctttttatttcttgtagagacagggtcttgctgtgttgcccaggcttgtctcgaactcctggctttaagtgatccccccacctcagcctcccaaaaatgctgggattacagtgatgagccacgccggccactgctttcaattattttgggtatgcagaggcggagctactggaccatatggcagttctacatttaattttttgaggaactgccatctggtttcccacagtggctgcaccatgtttctcgagcagctctgagagaaaacgttctctttcatcacgctgcattcccatgacgtcctcactggcccttggctttgccctggggacagccctgctgagtcttttttttctttttctttttctttttttttttttgagacaaggtctagttctgttgcccaggctagagtgcagtggtgcgatcatagctcacagcagcctcgaacgcctgggctcaagcaatcctcccacctcagcctcctgagtaattgagaccacagttgagtgccaccacacccagctatggtttttttcgtagagacggggtctcactatgttgtccatgctgatcttgaattcctgcactcaggcaatctgcccaccttggcctcccaaaatgctgggattacaggtgtgagcccccgtgcccggcctctgttgagtcttgatgccaactcaggagccccgctgagccctctgctctgggcacgtcacccattccagtgcccagggccctgactgcccacttcacagaagtgcagtggcattttctcttgaggaaccccaccagggggagagggaatggggtctcagagtcaggagcaagctcacctggcacttggaaggaaacccaggacctcctgcccacactcctcttcagcgaggccctcctgcccacactcctctccagccgggccctcaacttcccccagccttcctgcccctctcctctcctcagggcatcaccctaccaacaggcgaaagtaatctgtgaccaggagtactctcctaggaaactctgaaggcacttgacacgcttgaagaggtgacacagatttaaagttgttgctttgctcagtcagtttaccggatcagaccaaaagttgctttgatattcaaaaatctttaaaagtatctaacttcaattcttttttttgtttgtttgtttttgagacacagtctcactctgctgcccaggagtgcagtggcaggatctcagctcactgcagcctccacctttctcctgcctcagcctccagagtagctgggatttcaggtgcacaccaccacacccagctaatttttgtatttttagtagagacagggtttcactgtgttggccaggctggtcttgaactcctgacctcaatgatcctcctgcctcagcttcccaaagtgctgggattacaggtgtgagtcaccgcgccccgccctcacctcagttcttgaagggattaacactgcatctcttcaccatttctgaaggttcctgattttactgtcctgagacatttctacctttattaaatcctccccatgggatggtggtggtgggagaagggacatcaccaccaacaacaaagaaaataagacagccagatgcggtggctcatgcctctaatcccagcactttgggaggccgaggcgggtggatcatgaggtcaggagttcgagaccagcctggccaacatggtgaaactccatctctactaaaaatacaaaaattagccaggcatggtgacgcatgcctgtagtcccagctgcttgggaggctgaggcaggagaatcgcttgaaccctggaggcagaggttgcagtgagccgagatcaggccattgcactccagcctgggggacagagtgaaactgcgactcaaaaaaaagaaagaaaataagacaaaatcacactttagtggaaaacaagtggtgaccactctgcacagctcttcaactcctcaacgcctcctaaggcagctgtgccaggtgctgagtccacatattttcaccccgtgcttctcacactgggacagtgtacttccagcagcaccggcagccacacaaaacccactcacgggctctgcccacagcaggctgggaggcaccagctctcctggctgagtgcaggctgggccctgggagcaagtgcctcctgaaacttctcaccctgatggcagcatgcctcaccctagtcccagcccagagcctcaaccttgctggaaaggcttagcatccgctaggaggaatattagacccaactcaggagaagtaagttctagttctggctttgccaccaaatgtggactctcatcctcactctccccattcagaaactcacaggttagaagtgattatttccaagggcgggtgcggaggctcacacttgtaatcccagcactttgggaggctgaggtgggcgaatcacttgaggtcaggagttcgagaccatcctggccaacacggcaaaaccccatctctactaaaaatacaaaaagtagccaggcatggtagcaggcacctgcagtcccagctactcaggaggctgagacttagcctcacttaagccctcacttaagacttagagaatcacttaagcccaggaaatcgaagctgtgatgagccatgatcacgctgctgcactccaacctgggcgacagagtgagaccctgtctcaaaaaaaaaacaaaaaacaaaaaacaaaaaaaaaacctcaaaccaaaaaacagacaaaaaaaagaatatcacaggaaatttggagaagagaaaaaggaaaaacataattaccccattcatcccttaataccatccctgagctattcggtgtgtttccctccagaattttccctggtatgaggggcacgggctactgctgcgcatctcccctccgtggcgcatggtggaggtcatgctgctcatggacacgtctgccctgctgtctccacgtgcttccctctccaggctcaatagtacctccatatccagcagctattgctatgtaacgatctaacactcaacattcaacgggttaaaataacaagatttggccgggtgcggtggttcacgcctgtaatcccagcactttgggaggccgaggcgggcagatcacttgaggtcaggagttcgagtccagcctggacaacatggtgaaaccctgtctctattaaaaatacaaaaaaattagccgggcatggtggcacatgcctgtaatcccagctactcaggaggctgaggcaggagaatcgcttgaacctgggaggcagaggttgcagtgagctgagtttgagccactgcactccagcctgggcaacagagcagtctccatctcaaaaaattaattaattaattaaaaattaaaaaaatacaagatttattattgcccaagagtctatggtcaggggaacagttctactgatctgggcctggctcagctagtcttgtttatgcatctgtgatcagttgctgggtcccctggttggtctaagctggcactgttcacatgtcttggctgactggtcatggcctgggcaactggggtgaccaggccacacagtgtctcaccctccatcacattctactggtcaaagcaagtcgcaagaccggcccagagtcagagtgggagggactacaaatttcagggtcaagggcatgcatacatggaagccagtaatcgtagtgtcaatcactgctcttaatctaccgtaatccctaattttcatacctgccatttttggtagcaatactgtttttcatagatgtacatttcatagattaccattaaataagatgtaccacattttaatttgtttaaaatttttctcttataacacttgtgtgaacaactttggtggaaccttcgcctttgagatcaggaaaagcagcgtttcccactctcaatcagaaacccaaggttaagtgagaaaattgagcccaagtgtcccgaaggccctttagaagcagcgccacctgcagaccttcccgagttcctcacctgaccgaattcaaaggtgtcagaccaggagtctcagaccaactctgagtccagctgttgaaatcactttcagtatcactttccgtctctgggcttcagtttctccatctataaaactgcagggttggactagaacagtctttctcaaatgatgtcactctggtctaaaagccaaaaagatgccagtgaccaccttcttgaaagtatttttattgattgattgactgattgattgagacagagtcttgctctgtcgcccaggatggagtgcagtggtgagatctcagctcactgcaacctctgcctctcaggttcaagtgattctcatgcctcagcctcccaagtaactgggattacaggcatgtgccaccacacctggctaattttttgtatttttagtggagatgggattgcactgtgttaaccaggctggtcttgaattcctgacctcaaatgattctcccaccttggcctcccaaagtgctgggattacaggtgagagccctcgtgcctggcctatttattttgagacagggtctcactgtgtcacccaggctggagtgcagtggtgcaatcatggctcactgcagccttgacctccctgggctcaagcaatccttccacctcagccttccaagtagctggggctataggcaagcactactatacctggctaatttttttttattctttctgtatttgtagagatggggtttcaccatgttgcccagtcttgaactacttggcccaagcgatccttctgccttggcctcccaaactgttaggattataggcgtgagcaaccacgcctggcctgaaagtatttttaaatgcataagaaaaagacaaagcagttccatatcattctaactgctcggcggtgatccaccttttagaaatggtgtgctaggagcaggggtcacggcgtgagaggctgcccgtccggcacctacgagggcgatgtcagactcgggaatccaggcacgggcagcacatgaggcagctatcataacaaggctgaggatgatggctggtctctgttcggtgtcttgtcttgtaatcccaacatgtatttgtgacctcgctcaatgttcattgtctgttaaatgcactacacaaatttaattcccatggtctgtggctgagcaaaggaggtttcaaaagaaaatttgtgcattctagttcatgagctcttgctgttatttttaaagagctccatggaacaaatgggtggactccaagcaccctttgagctctaacagcctagagaagaggtgggaagggggtgcctcttttctcttccccagctgagttcagaggtcaacagtcctcacagctggacatgggcagggttgcccagtagcttaggggtcactggtcataatggcatcctgcatggcagagaccctgggagtagcattttcggcaatgtttgggttacagacctccttccgagtcgcctggagaggtctttcccgccctttgtagtggatgtatgattttgtttgcaagcgtccttgggagaaccactcctcccacagcatgaggctgttaatcctggtggcttcttcctccaacccaggccctctgaggagcactctgccccacccctcggcacgtgattggttcagaggcaggcatgtgactcaagaagccaataagaattcttttctgggattgttactttagtccctgggtgaaaggaggactcccctggatagagctgtcttgctgggacgttctctatctgtctgcccaccaccatctttcctaactcatagaagaaagcgaagcagagaggcaagagatggggggggtggggagaggcggggggagagagagagagagagaactgacaaggctgcttgagcccctgcatccagctatgcctgcttcccctcagacttccacacttcaggagccaatgaattccttggttgcctaagctacaatgagttaggtatctctcacttgcaaccaagagtcctttaaggcccactcaacagggctgccatatacagtgacaccccttcgcttacacagtactcagtcttttcagatgaatgaagtaaattgttcagtcatcatctcctctcagaagccttccttgatttccctatacagaaccagtcactccctaatctatgcttccaggaatcttgtaaaaatatacactgtggcccaagtccctctgtgtatttatgataatataaattgaatataagaatataaattgaatattcaatttatattcttacacacatgcttgtctccccatcagagtgggagatccttggggtagagactaaatctgatttatcactgtttcccccgtacccaaccaagaaagtgcttaggtgtttattgagtgaattataatcaaatctcactacaacaaacaattgggatgtctcatctaatttgttattaagaaaattctcacctgagtgggtggctcacacctgtaatcccaacactttgggaggccagtgtgggaggatcacctgagctcaggaatttgagaccatactggcaacatagggagaccctgtctctactaaaaataaaataaaaattaaaaaattagttggtcatagtggcacacacctgcggccccagctactcgagaggctgaggtgagaagacgccttgagcccaggaggtggaagttgcagtgagccgtgatcacaccactgcactccagcctgggcaacagacagagaccctgtctcaaaaataaaaagaaagaaaagaaaagaaaattctcagctgagcactgtggcttatgcctgtaatctcaatattttggcaggccaggggcctgaggctgcttaagtctgctgactggccccaggtcacacacagtgagtctgggtcccatagggaccggacgtgctgacctctgtggagctttgcgcccaatcacccagaggcagcaggaggagtttcttttttgttttattttgtttgagacagggtcttgctctgttgctgagttcagagtgcagtggcacaatcataggtcactgcagcctcaatctcctgagctcaggagatcctcccacctcagccttccaagtggctggcactacagttgtgtgccactatgcctgactaattttttttaattagagatgggggtctcactacattattgcccaggctggtcttgaactcctgggctcaagagatcctcccactttggcctcccaaagtgctggggttacacatgttagccaccatgcccacctcaatcaagatttgtttcttttctttttttattgagataggatctcactctgttgcccaagctggagtgcagtgtacagtggcatgatcttggctcactgcaggctctacctcctgggctcaagggatcctcctacctcagcctcctgagtaatttggactacaggtgtgcaccatcaggcctcgctaaattttgtttcttttgttttgttttgcagagacagggtctcactatgttgcccagcttggtctcaaacttctggcctcaaatgatcctcccaccttggcccccaaatctgtgggctacagatgtgagccactgcacccagcctcgaggtttgtttcttaaactatcaccctccaggggctgctctgtattcatgcaccttcatgcatttggctctgggctctacccacctcccctcaccccagattctgccaagctggtgcttaggacagtggccctcccacttacgctgaggccgagatctctgacatgtttgtgggcctcacttcccaggtgcctcccagccccacatgagctgtctcgtagggccaagacagcacttttgtatgggggtctgtttcagaggcacagatggctccaaacacgtcttctgcatctgtaaaagataacaggtgtacatttaaagaaaggaattcatacatatttaatgatttagcttaagcaactgggcaaatattcattttcttaaggtggtaatacataattaactgataataaaattaattgggtaaaacagtctaaaaataatgcagtacttattacatgagggaatataactgcattgaaagaggtttaattgttccagagactgatgagtccccaaaagcagcaaagggaagaggtttttccacctttggaataagggctctgagtgggcgcttcctgttcaccctgtgggaatagggtgggaatggagggtggagaggaagatggtttcttgcaatttaacagcttcacaacgggtttagagagcatcccaatgtctactcccaaccctaaccacacatcttcacccctgccaggtcaaaaaatacagaaaagaaagaatctaccacagatacccttttattagatcagaagagagaaagcttgtagacgcctcgtgaactcaccccttccactgcgaagtgccagaccctgggctggacaccgtgggagaggccagctgggcaagtctgtccttcggggaggtctggggtgtttggggaagggagatagggacacacaatcctcacaacaactgcaaaaagaagtgtgagcacgtgggggcagagggagcgtcagtcagacgggaggtgatcgggactggagagagatgtcccagaggaggtggcttgggcaggtgggctttgactggcgtctatgggagaggagcccgtaggaagaagagagagcaggacagctgggattgagttgggctgaagccggaccggggagggtgtggcaagagatgaggctgaaccggtgggctggaggagggggtcccaggaaaagcagctctggtcccaccgtcagccctgccttttattattaatctctcttgtgaattcaggtgggaaaaggcctgctgagagtagtgccagaattcacaggagaaagattctgtaatttctttgagctctgtgactctggacaaagtattcagtattaatgcagttgaccatgacgtcttctgtgtgcgcgactgacagaccaaattacctttccttatctcctggcgagaaaaaaggaccattttcttgacatatttcataatcatttcacctgcttgccccctatggagagcgccggtgacccggccccctcccctcccacacaatgcaggaagtatgtcatctaataagcccagtttctaaagaatgtttttaatcttggaatagtgagtgtgatttttgattgtatttttaattctctatctacttttttaaaagcacacgcttttgttctaattctcatcttagctcatcagggccaggaggaagcgtggacatcttccattccatggatctgcttagcatttgacaggtgaggcccaaagagaaggcatgggccaggaccccttagggcagctgggggcacaccaggaattctggagtcagggctctatgccctccatgcccagtgggcaccgttctctaggtggtgccccagcccggtaactacaaaacctcagagcatttttttctaattgtggtaaaatacacataacaaaaaatctacatcttaaccttcatttttttttttttttttttgagatgaaattttgctcttgttgcccaggctggagtgcaatgacacgatctcggttcactgcaacctctgcctcctgggttcaagagattctcctgcctcagcctcccaaatagctgggattacaggcactcgccaccgctcactgctaattttttgtatttttagtagagacgggatttcaccatgttggccaggctggtcgcaaattcccgacctcaggtaatccacctgccttggtctcccaaagtgctgggattacaggcgtgagccactgcacctggccacatgggaaatatttatgatattaagtataaaaagccgattgtggctgggcacggtggctcacgcctgtaatcccggcactttgggaggccaaggcaggtggatcacgaggtcaggagttcaagaccagcctggccaacatggtgaaaccctgtctctactaaagatacaaaaaaattagctgggcatcggggtgcatgcctgtaatcccagctacttgggaggctgaggcaggagaatcgcttgattccgggaggtggaagttgcagtgagccaaaatcgtgccaccgcactccagcctaggtgacagagctagactgtctccaaaaaaaaaaaaagcagattgcgtagccaggtgtggtagcacacacctgtaatcccagcactttgagaggccaaggtgggaggatcacttgaggccaggagttcaagaccagcctgggcaacatagcaagacttgatatctacaaaatatttaaaaattagccaggtataatggcacatgtctatagtcccagctactctggagactgaggcaggaggatcacttagcccagaagtcttatgctgcagtgagccgtgatcgcactactgcactccagcctgggtgacagaataagaccttgtctctaaaaaataataataataattaattaaattttgtaaaaagcaggttgcaagttggtatatatagagaatggctcccacttacatgagtaaatatgtaaatgtcagtgggtatttgcaaggatatttaccacaatttgaccaatggttattcctgagtagtagaattatggatggctttttctattttctttttttaatgaaaaatgaataaaataaaagttgtcctgctagggctaccataacaaaataccacagactggactgggtggcttaaacaatagaaatttattttctcacagttctggagtctggaagtccaagttcaagatgctggcaggcttagttcttctgaggcctctctccttggcctgccgacagccaccttcttgctatgtcttcccacggcctttgccctgtgcacacgtgtccctggtgtctttcttcttttaaggacatcagtcatattgcgtgagggtcccacccttgtgacctcattttaccttaattacctccttaaagaccttgtttccatatacagtcacattggggtttagggcttcaacctatgaattttggggaaacacaatttagtctataacaaaagttagtttgaaaagaaaaagaaagtaggccgggcatggtggctcatgcctgtaatcccaggaatttgggaggccaaggcgggctgatcacttgaggtcaggagttcaagaccatcctggccaacatagtgaaaccccatctctactaaataaataaataaataaataaataaataaataaataaataaataaataaattagccaggcatggtggtgagtacctgtagtcccagctactcaagaggctgaggcatgagaattgcttgaaccaagggggtggaggttgctgtgagctgagatggtaccactgcactccagcttgggcgacagagcaagactctgtcttaaaaaaagtaaagcttgttaaagcagtgctcttacaaaaggacacacacagttcttaggatgaattttgtcagtttcacccaacagttaatttctgtgctatgcaacctttcccagagcttagaaaaaagttaaaaattttccaattaattttacacactttgcataactccaatactaagacttgatttttaaaagagcacaagataaagtgtatctatctaaaatcaagaatcaacatcatactaatgataaaacactaaaccccgtctagaggagtttggattagagtcagaatgaagacaagggtgtcagttaggtatcagcaatgctagctgctgtgaggaacataactccaaacctcaatggctgaacacaatggaagtaaattacttgtttacacaaagagcagtgagaatccctggttagccagctgcctcccatgtggccattcagggacctccactgcttgtgccatcccccagagccactgccagctcctctgacggcaaacaggaagaaagacagtagaggatcttgtgggaggttttatgggccaaccgggcaaggcacctgtatcacctccacccacagtccagtggctagaacctggtcacgcggccactcctaactgcaagggaggctgagaaatgttacctccttccgtgcccagcaggaaaaagaaacaggtgacgttgcagcatttcttgcagaataccccactgtcgtctctgggacttttgttgacaaatcactgatgttttctgcacatcctgatttgcagcaggcagtgactactacctgagcaccatcccagtttcagagattaaaaatgtgaaaaacttggagttgatgaaatactcgataggaatagtaggtgaagctgtaggagatgctgcgcttgtaaaaggcccacggatgagccagggctttccgggcataaccccaaggccaaaaacataagtgatagactaactatataaaaacaaaaaaatcccttatatcaaaaaagaacattgaaaggagaagggcccactgtgggggaaatatttgcaatgtgtgatagagaatgagcaggcttgctatttaaagagcccttacaaatcaagagtgaaaaaggtgaagaaaatggacaaataacagtaacaggaaattaataaaagaagaactaaaaatggttaaatatgttaactatgtaaaactatttagtagtcaaagaagcacaaattaaaactaccatgtaataccacgttttaccatcagattggcagagatgtgaaaattgataatggtgtttgcaaagactggcaagtaaaggctattaaccctctggaaagggaaagatgggtgccctgtttaccactgtgggtgatacggtcttgaaaacacttatgcctgttgacccagcagtcccacctctggaatttatcctaaggaaacaaatgaagagatgtgaaagacatatgttcaaggctgctaatctcaggggagcttttaaatttaactttaatttgtatcaagttatacatgcacatgatttcaaaggtcaaaaaattctacaagatttgttacaaaaatcagcaattccctgaagccactcccccagtcatggccctgctctgctttttcagtcccagagatactttttttttttttttcttttttgagacagggtctcactctgtctcccaggctggagtgcagtggcatgatctcggctcactgtagcttcgacctccagggtacaagtgattttcccttctcagcctcctgagtagtgggaaccacaggcatgtgccaccatgcccagctaacttttatcatttatcctagacaggggtctccctgtgttgcccaagctggtcttgaactcctaggctcaagcagtcctcctgccttggcctcccaaactgttgggattgcaagcatgagccaccatacacagcctcagagatactatttcaatcctttaagtatttagtgtattttctctaaataccatgcttatattgctacttcttgatttttcaggtttatacattatatagtgatttttcattatggaaggggagaatttggctctcatcaatcactcactcacaataccccccaccctggaacaaaacgcatattaatacatgtattcccaccccccacagcctcccaatatagttatttgtcattctgatcagatcaatattcgttatttgctttattctgactgcaaatctgttttcaagattttcagagttaataattgtcttgcttttttttttttttttttttgagacagaatctctctctgtcccccagacgggagtttaatggcacagtcttggctcactgaagcctccacctcccaagttcaagtgattctcctatctcagcctcctgagtagctgggactacaggcacgcgccaccaagcccagctaatttttgtactttcagtagagatggggttttgccatgttggccacactggtctcaaactcctgacctcagatgatccacagcctcagcctcccagagtgctggaattacaggtgcgagccactctacccggcccaattgtctcgtttttaccattggcttggtttactaattttcgtcactaatttaactacaaactctttctttcagaattttgaacatattcctccatcatgttccggttcccactgacgctgttaaagaatccagtgccattcggatccatgatcctttgtatgaaatccactttttctctgcaaacttgtaggatattttcttcatgccagatacttgtgttcttcaattctgggtttttgaaaacaaaatatttttaaaattactttcttctttctttttttttaggacagagtctcactccgtcgcccaggctagagtgcagtggtgtgatcccagctcattgcagcctcaaacccctaggctcaagtgattctcccacctcagccccccaggtagctaggactacaggtgtgtgccaccagtcctggctaattttttaattttttttttgaaaacacttatgcctattgacccagcaggtgtgtgccgctatgcgtggctcattttttattttattttattttattttatttatttttgcagaagccattgataccatctagctaagctaggttgaagatactttggactcgacaattctatattaggatacatgccctagaacatctctcccgtgcatgcacaaaaagatattgatgcctgtaatcccagtgctttgggaggccaaggcagaacgatcacttgaggtaagaagtttgagaccagcctgggcaacataacaagacactgtttttacaaaaaaaaattaaaaatgagccaggcatagaggcatgcacctgtagtcttggcactcaggaggctgaggtggaaggataacatgagcccaagagtttgaagttacagtaactatgatcatgctgctgtattccagcctgggtgacagaacaagacactgacttaaaaaaaaaaaaaaaaaagacatttacaagaatgctatggcaacgttgtttataaggacaaatacaagagaaagatataataaatacttattgacaggggaatgaataaagatggcacagttatacaaaacatatacaatattgagtaaatacacaagacatataaggatgccatgacatacacaagacatacacagccagccatggtggctcacacctgtaatcccagcactttggaaggctgaggcaagaggatcacttgagctcaggagttcaagaccagcctgagcaacatcacaagaccttgtctctacttaaaaaaaaaaaaaaaaaaaaaaaaattggccgggcgcggtggcttacgcctgtaatcccagcactttgggaggccaaggcgggaggatcacaaggtcaggagatcgagaccatcctggataaaatggtgaaaccccatctctaccaaaaaaaaaaaaaaaacaaaaaaattagctgggcgtggtggcaggcgcctatagtcccagctactcgggaggctgaggcaggagactggcgtgaacccgggagtcggagcttgcagtgagtggagattacaccactgcaccccagcctgggcaacagagcgagactccgtctcaaaaaaaaaaaaaaattaactaggcttggtggtgtgcacctgtagtcctggccactcaggaggctgagatgggaggtttgcttgagcctgaggaatttgaggctgcagcaagctatgattgcaccactgcgctctagcctgcgggacagagcaagaccccatctcaaaaaagaagaaaggggaaaaaattgcaatcctacttaaaattgcaatattccaccacccctgcctctccagcttcccttattttttccctctgtacttctcacgttgtaacatattaataatgtatctcagtttcataccttttgtttatggtttggctcaccccaccagaatgtgtgtcccatgagagcagtaatcctctctgttgtttacggatgttcccagggcttaggttggtgcctcacatacagtaggttctcaatatgtatatgtttgtgagtttatgaatgaataaaagacagaaaccgctactgaaagtttaaaaccatgcaaagcaataccacttatcatttatggataaacacgcagttcaggtttgggttacccctggtgacagaggtggggaacaggatcaggaagggacacccaagagtcttccagtgtccccgtaagatttatttcctaagcagggcaatagagatggaaatgtttgttatattattatcaacaagttttgcatggcagagaaattctacagcttgaaaaaaaagaaaaaaaaaaggaacagccagcacctgcagcaggtgttagagtttcccagggtttttccacatgacctcatgggacaggggtgcacagggggcttcctgtaaacccagctcagagccaggtggggcctgggactgggggttcttccagagctccctaacaggggggaaatcccagtcagatcaagagaggaaggggcagcctaggaggccacctcttctgggtgagatggggagagtgggccagaatgaagcttgatcttacactgtcttagtaacagcccaacaagttctagcccgttgcccaggtagagccgatttatcaagacaggggaattgcaatagaaagagtttaatacatgtagagctggctaaacaggagactggaatttattattacttaaatcagcccctcgaaaattcaaaaatgggtcttttaaggatgattcagcaggtctgggaccagggattggggagtgcgtattggtcagactgaagatgaaatcatacgggggttgaagtcgatttttttttttttttttttttttttggagatagagtctccctctgtcacccaggctagagtgtggtggcgcgttctcggcacactgcagcctctgcctcccgggttcaagcaattctcctgcctcagcctcccaagtagctgggattacagacatgcgctaccatgcccggctaatttttgtatttttagtaaagatgaggtttcaccatgttggccaggctggtgtcgaactcctaacctcaaatgatctgcccacctcggcctcccaaagtgttgggattacaggcgtgaatcatccgcctgaagtggattcttgctgtcttctgttcctgggtaggatcgcagaactggttgagccagattacaggcctgggtggcaccagtttgtgcatcagagtgcatcagcagtgcagggtctgagaaatacctcaagtgccaatcttaggttttacaatcgcgatgttatccctaggaggaactgggaaggttcagaatcttgtagccagctgcgtgactcctaaaccataatttcaaatcttatggctaacctgttagtcttacaaagacagtctggtcctcaggcaggaaggggtttgtttagggaaagggctgttagcatctttgtttcaaagttaaactataaactaagttcagcctatgcccaggaatgaacagggcagcttggaggttaaaggcaagatggagttggttaggtcagatctctttctctgtcataatttttttgttgtttttttttttgagttggagcttcgctcttgttgcccaggctggagtgcagtggtgcgatcttggctcactgcaacctccacctcccaggttcaagcgattctcctgcctcagcttcccaagtagctgggattacaggcacctgcccagctaatttgttcatatttttagtagagacggggtttcaccatattggccaggctggtctcaaactcctgacctcaggtgatccgcctgccttggcctcccaaagtgctgggataacaggtgtgagccaccgtgcccggcctctgtcataattttcgcaaaggtggtttcatctttatccaagagtagggacttgccgctggatccccctgtcagacacacgctgctgtgagtcagctctggattccgctttaggacacctgggagctgtcccagttcagaatctgattccctgttggaagctctgcccagaatttctcaaaactcagtctgcatcctggcccccacccccatgaataatggggagaataaatgtgaacccggttttgtctacatcatagggctgctgtgagaatcaaaaagggtgaaaaaaaacctccctgccggtagagaccagtctaactgcaactgtgcatttttttcttaactatccccctattgtttgattgtgtttgccattttctctgctataaacagcactgcaatgaacatctttacatgcctgcatatgggtgaagggaaaacttccccttttccttctgaaggttcactgaaaatcacctgacaaaaggcagattagtaggagaaaaaggatacacatttattaacattcatgggagagaattacagtgtgattaccccaatcccccaatggggtacagaagcttatgtactctttttcccaggggagcgaggagatgggaaacatagagcattgttttgaggagcagtaaatgattattaaggagaatgaatggatcagggagacagaaatcaacttgtgaatggaatgagtctgagaggcagacattatgttgtggaaaagtccatccagctgtggttggacttctgacttcttttcttccggcttcttttctgcagtggataatggggtatcagacggacagaaggcaaatgtgtttcttttggcaagacactttctaggtcagataaggaaattccagagagtccctccaaggacttgaggggtgagagggagagaacgagacaaggttagagaggccttgatgctgaggcttatttgtgaggcctttcagttttcaaaagcactcagcatgcccaagtgccacattttggggaatcattttctgtaccccaacacttatatttttggtttgctttaaaaaaattatttctctgggataaatcccagaggaaataattggttaaagcatataaattgtttctatggcttttcaacctgataatcaaaaggatcagaatactgttctaaagagttcatgcggctgggcaaagtggctcatgcctgtaatcccaacactttgggaagccgcggcggggtgggatggtggatcacctgaggtcaggagttcgagacgagcccagccaacatggtgaacctctgtctctactaaaaatacaaaaactaaccaggcctggtggcacgacgcctgtaatcccagctattcaagaggctgaggcaggagaattggttgaacctgggaggtggagtttgcagtgagctgagattgcacaactacattccagcctgggcaacagagcaagactccatctcaaaaaaaaaaaaaaaaaaaagagttaatgcaagtgcaaagtttaaggatgactgtccgggagacacagactccagaggaatggaatcaatgctctgaaatggagaagttaaggttttacttgcataggtagaaacaaagaagtttagcaggattactaaagtttagcagccttttccatacgaggctgatctatgaattacagcaatctgattggttgcagcttgttctttgtcaggaaaggtatagtcaacatctatcttgagtaaattgattgtcacagagcctattgtgctatctggtcggagtcaggtacaagagaggaaagaaggaagttaacctacaaggagagtcagtaatgaggaaaaaggggtctttcctccagtgccctttagtcttttacgacattttacaaaagaatgtaggtatggaaaaagttgatctataatcagagaaacagaggttgtggctgcctgttatgtgactcaggtcccacagtcacatttcctttaaggctccaaataaaattccaacaggtttgtaagcagacagggagggtctccagggactataggcatttagtcaactggcacaataagcctgtttgacagcctcctgctttgcagcttgttttttcccaaaccctgtgttgaatgtggtcacctagttgctggcaccagctcctgacagacccaggcaacttctagatcaagcttgtccaaccggcggcccaggacggctttgaatgtgacccaacacaaattcataaaccttctttgaacatgatgagatttgtttttgcgatttttttagctcattagatacagttagtattagtgtattttatgtgtggctcaagacaattcttcttctagtgtggcccagggaagccaaaagattggacacccctgttctagatgaacctgagtacacattcctcatgaccatgctgaccatgagctccacctcaggaggagctacaccttcatcaccatcacaggcaacctgtgggctggcatgatggtgccctgcgtctgcagcagcggggcccctcgtcccctccatcactgcataaaaccctcctgtcactttccctcagggagacactgctttggagaatcctcccagggctcttcttacctgtggcgagtcataaaactcctactgatccaaacctgcgttctcgtggagagccgtttgagattcaccaggtgaatgaaccccggtttttttctgggtaacaggtcgaatgtgaattacttattttcacaagctcttgacatgttccgtcaaattgctgttccccaaagagtggactctggtgacatataagtgtgtgggaccattgcatcttaccccagagatccactcctgatctggcattattcaaaatctgctgaattcaaaacgatcctgtacttcctgctcaccaggtctgaaaagaaaaaagaaaaaagaagaaggaaagactacacctgacaaaagacagggggagacatttatattagtttgccagtttgaggaaatgccttacttggcaatattgtaaatccagtttacagctcacttaactggacagcttcaaaatgacttttttttggtatacattttaaaagtcaggagagctgagacaaaaatgagaatttatcagtatttaacatttgataaaataccttgaatatttaaaatgctcataaaatgctattatactgtgctttattttatgtattttatattttgagacaggatctcttctgttgcttaggctggagtgcagtgttatgattacagcctactgcagcctcaacttcctgggtcaagcaatcctcccacctcagcctcccgagtaactgggactacaggcatgcgccaccacacccggctaatttttgtatttttagtagaggtggagtttcgccatgttgcccaggctggtctcaaactcctgacctcaggtgatccacccaccttggcctcccaaagtgctgggattacaggcgtgagccaccatgcccggctgacactgtactatttctgcatggcattctccagcattgggcactattattttgttttgtttttcattctaaacaaataggatgtctaacaaccaagtttgtagctccaggccttgagatccatttgtaagagtggggaagaaggaggcaaagtaatatatgtgctagctaataattacatgttctgcttattaagaatttactttcttttgggccgggcgcggtggctcaccgcggattacagtgcctgtaatcccagcactttgggaggctgaagcaggtggatcacctgagttcgagaccagcctggtctaacatggtgaaaccccgtctctactaaaaatacaaaaattagccgggcacgcacctgtaatcccagctactcaagaggctgaggcaggagaatcgcttgaacctgggaggcggaggttgtagtaagctgagatcacgccactgcactccagcctgggcgacagagcgaaaaaaaaaaggaatttacttttttcttccaggccctatgccaagcacttgtgttatctcatttatccttggatccttttaatatgggggttcagttacccccatattacagacaaggaaactgaggtgcagatcccagagagggggagagagagagcaccattctggtatgtagcagggggagtcagagaacaaaaatcggactgactgataagaggcaaaggcactggtgcaggctcttccccagcttccagctctttcaaccttctgggcctcgactctgccctaaggagaggctgaggaccaggtgatgggcaccaatgtgtggcttcttcacatcccacaggccggaccccctgggcctcaccttccagtgagggaagagagaggtgactgccttttctttctctgcacagagcagcaggggagtcgtgacccccaggggctcagtagagcatgagcctggccattgccaagcggcccgcccatgcgtgctgtggttacacggtcttcatgctggctggggagccccgagaactcgggtttggttcgtcctccaaacacgtgaacacgtgttgagcactgactgtgaattcggcagctgtgatgggggctgaactcagggccaaggagccaggctccactccactgtgacaccaggtgtggggctcgggtaagtcacctctgtggcctctgaccgcagtttccttatctgtaagatggggatggtgatgactacctcggaaggttgttgtaaggcttaaatgagaagatgggcgtgtctgaggccagcatggggccctgtaaagtgtgagcagaaaggggctctccaggtgcactccgggtatgactcaggcgcccgctaggatgctcactggcccggcactgacatccagaatggaccacaagggagaaagtggcaggctagcaggagggaggcactttcactaggggctgggaagggtcctgggagggcttcctggaggagatagtgtttgcaccaaatgaaaaccggttctattcagtgatgagacttgctgcctgcagctagaacttccatttaaaaactggacagaagacttcccccaggaggtaactttagactgactcctgcacctagagagggcatccttagagcatcttaggggaaatctgcccacccctatgtattttcttttctttttttcttttcctttttttttttttttttttgagactatatctctctctgttgcctaggctggagtgcagcagtgtgatcatggctcactgtggcctctacctcctgggaccaagcaatcctcctgtatcagcctctggagtagctgggattacaggcatgcaccaccacacctggctaattatttagttttggtagagatggggtctcactatgttgcccagacttccctctgtcaatgacagacataattcaatcattcattcattcaataaatatttattgagcacctactaggaggtgccaggcattgttcttggtactggaattatggcagcgaatgaaacaaagcccctgctctcagagcttacatcctggtgggcatggagggaaactagacaataaacagagaaataaagatgtatcagattggtggagtgtccagggctagatgaggcagagtgagggagggggagaaggaccagtgggcaggaagtggtgccatcagggaagccagtgaagggccaccctttgagtgacatctgtaggacatgaggctcagaccctgtggacctggggggagtggagaatgttccaggcaggggaacagctggtgcaggaggtctgagtgctgggcagaggggatcccaggcgggatcccaggaaagctggagacagagggagggaggtcagaggcggtggtgtcggcctctgtgggccgtgattaggaccctggccttacccggagggagacaggagcctttggagagatcccttactggagcagaggcttggctctggctgtccgtgagaagggactggagcaggcccagggcagaaacagtggggcaaccaggaggctggggcagaggggcctcagcttggaccaggtgcaggcgacggagctgggctgggggacgagataggcttctgggtgtgtttaaagttggagccatgaggattgggtgatgagttagactccctacccctgaatgccctcacaggaccacaaggttcctggtgctctcaccaaataccatctggaagcctcctcattccacaggtgattgtgaaaataagaccttaattgtttcattttgtttttttcccccaaaacaaaaccaaatgtaatgactaagaaaagctccacttccacctccagggcgccgctccctctggtggagggttggctcctgatttagatgctttctatatatgaattacagggaaagggaggcctgggagcaggtccttctggccagctgggcggctctcaggggctgccaggatgcctggcttctgcctgaagtgagcagctctcagtccctatgggccacgcctctgcatcatcaggagagggcttgggagcacacagggactttggtctttctcctgagagcagtgaggagccacggaatgcggcaggcaggggaaagacaagaccggatttgctttttagaggagacccttgagcaaccccaggagatcaggttggaggaggcaaggccggaggccaagcggtctgggaggggccttcagggaggggaggagggaagggaagtggggcccactgaaggctggggagtagctccctgggctgccccctgttggtcatgactctgccctggggcccaggcccgatgtccacctcgagccttagctcctgcaggtgcagctagatggagtctgagctggtgcagctatgtggggcctgttctgggctagtgactcacttctgaacggctttggcagaatgaggcagttctccctttcacaaaattcatcacagttcaagcttttggccccaaacagcggcagatgacagagggatttcctgaggtggtttatgggacttttgctgaaatggtagcatgaacttcacctgggcctgcagggagccatcccctgcctccatccccttgctcctccttggcctgtcctaaatcagggatgggaccttggtccttacccagagcaaccttggccttcaagcagcatgcctgagctcctccctcaggttctgctcaaaccctttttcctcagaacctgcacaccccgctgggtcgtcacacagcaaggcccatgcctcctcctccaggaagctgcactctgcccagatctccttggatgatgctaactcatggggtgtggggagtgtggaagcccagcttccttgcctggggtttcaataaccctgagatgtaacttgcattccagagcggccctcgggatcacaatgaagcacctgcctgctggacttggccagacatggcactgttggtcttccttccctcccctctcctgcttcccactcctttcctggtttattctgggggcacttccttaatcaatcacttgctcacaaatcctcagcagagagcctgcttctggggacccgacccaagacacagcttccaggggtcactcctgctgtttctcagcttggacggatcctccttgactgcacccctataaaacagaatgcaacgcagagcttgtctcctggggagaagcttcccagtgggaccagtcctgcactgaggtcccatgacaccttggcaggccctgttcctggtgcccgaagactggcctcggtcctgggaggtagcccctccccttggctccacccacagttgagtctttgcacacaaagttgttctgcccaccttggctcttgactccaccccacctcacagcctctctgggcctccgtggctccatctatacaatgagggcacaggctctgcccctgtgagcggtggtgtgacgctggttctggattcctgctcccaacctcaccctgcggtagctgagccaggacctctggaaaagaggagcccagcttgttcaagaatgaacagctgggtcctggctcagagaatcaaccattctggctgttacaactcattactaaatcccagctatgccctgaggaggattaaggaaactgctccggtaaaaaatccccaacagaaagaatgcactccctcccagggagccctagaaatctgaccacggtcatcttctcctggcggtctctaaccaatgcacattccgggtgtttgcgtgccagaggggccagctgggcatctgcgcgattggccaatgcctggcagaaaagcagcccagggtgctagctttctgattcacgggcaggacttcaggtaatgccagctgctgagggagtttcgttaggctgcatcgccccagggaggaaacctgaggctggatggcaagaagcctggacagggcactgctctgcctcgaacttgctggtgacccaggcagggcactgtcccctgttaactctcagctttcctacttaaaaactgggaatggtatccccatttacagggatgtactcacttacacagaatatgtctatagagtgttcaccctgtggggacccatgttgggcactggaaccatgaaaaggcttggaccctaccctgtccttgccctgtgtcgctcccaggcttgaagctgggaaggttaaaggagagggtccgagggagaagtggggtatgtatgtgggggccacattagcacaaagccagaggcctgcaaccatgatgccttgaggctatggatgaataagcagatgtagctgaaggagccactggggttggctggcaggtcaggacagggcagccatgagggttgtggtcacatgcctcagtgttactgtcttaatctattttccgctgctatcacagaataccgcagactgggtaacttatacagaaaataactttatttggctcatggttctggaggatgggaagtctagaaaaatagtgccagcatctggagagagtcatcctgtggcacaaggcatcacatggccagcatgcacacaagacagagagagaaatggggccaaacttatccttttatcagaagctcactcctgccataagtaatccactcttacaataactgcattaatctcttcatgagggcagagcacctcatgacccaatcacccctaaaggacccatttctcaacactgtcacaatagcaattaaattttattttattttatttttattttttgagatggagtttcattcttatcacccagcctggagtgcagtggcaccatttcggctcaccacaacctctgcctcctgggttcaagcgattctcctgcctcggcctcctgagtagctgagattacaggcatgtgccaccatgcccagccacaattaaatttcaacaggcattttggagaggacgttcaaaccacagcagttaccttcacctggatttgagtccagctcaagcgtggtgaccttgggcaggtccttcaggcagaaggacttgaggctctctgagccgcagttatcttgacttgaaagtgagaatcctaacagtgcccacttgaaggcttgttgtggggtgaacaccacatagtttgaagcccgatcctgtctgagtagcggtggctctcttgcccctctgaatcttccaggctggggccctctgctccccagaagagcagactgaggggctgagaaaggggcaagtggctttctgtgtggggtgcaaggctgcagcaggctgagtctgggggcaacccaggtctgctgatgagctgttaccctgccccccagggccacacctcactgggagctgaagcctgagcacatttcccaggggtctgggctggccaaggggtcccgactgggctctctgctaccctctgtggccagctgctcatgtctcttgtacgagagcatcagcttccagcagtcagacaaaagcccaggcagggccggggtgaaagccacactgcgccttgcctgctgcgcgtcatcggaaaatgttcgccccatctgggcttcagtttccatatctgtataatgggcttccagcatgtgccctgccccacccctcaccaagcacagaccagaggcagggccccctcagagaggagacagtcagtcagatgatctctattcaaacccagttctgctccttaccagctgtgtgaccgtgggcaagtccctccactgacctgagcctcagtttcttcgtctgtaacttggggttcctaaaatcaacttcactggcctttgtggggattaaacaaactcttgtgtgtggagtgcctggcacggatcactcactctcagcgcaagttcccttccgttggggccgctctccgcctccttacaccctgatctaacctcaccttccactgcccatctcagctgctgctgcttctcctccctttggcgatgccgacgcgctccagcctccaggcctttgctcaccgtttgttctgccagaaatgccttttctccctctcgcattcctaccattccaaagcatattgtcttcattgctcagctcaaatgctgccttctccaggaaggctctccgaggagctctgtgcaagcagacaaaaacacggatacaggggcaccagaaggggcatctctctgcccacatctctctactttcggcctggatcaggctcaaacatggacatttttctcccccacctcgcagtacacaaaagtgcccactaggtggtgaaagaatgacgaagtccccgtggggatgggcgataagggaggccaaccaggcaccgcctgcatcactcattcgtttatttaacgaatattgactgagcacctgcatggtgccagactgtggggcaacccagcaacaaggcccgactctcaaggagcttgtgttctagctgggggaggctggactggcgggagacacaaaaaacaaggaaataaataaagcaggaaaaacatgggacagagatgaaggttacacagaaaatgctggcccaggatcacttgaggccaggagttcgagaccagcctggccaacatggtgaaaccccgtctctacaaaaaatacagaaattagccaggtgtggttgcgtgcgctggtaatcccagctatttgggaggctgaggtgggaggatcccttgagactgagaggcagaggttgcagtgagctgagatttcaccacagcactccagcctgggtgacagagtgagacccctgtcaaaaaaaaaaaaaaaaaaaaaaagaaaagaaaagaaaaaagaaagaaaggaaagaaaaggaaaggaaaggaaaaaaaaaaattccaggcccttgagtgtgtccaggcttctgactgagcattctttcagtgcagagccacactttgaacctgagagagtggctgagctggatgattctcaaagtgcgctctgcggaccagcagcagcaccaccagcagcagcatcacccgggaactcaaaggaaatgcaggttctctggcctctgccgaatgcactgaatcagaatctgcattttaacaagatccccaggtaattccttttcaagttaaagcgagaagctctgcccaagtccagaggcttagggaccaatgacacacacaagccaaatctggccacctattttcgtatgaatcccatgctaagaatgggtcctgctcagaaaaaaaaaatctagagagtattttgtgataaataaaagacatgcgaattcaaattttaatggccatgcataaagttttattggaagccggctgcaccctttgtttatgtattggctgtggctgctcttgtaccagaatggtgacgttaaggagcagcaacaaagacagtatgggccacagtgttaaaatattgactccctggccctttgaagaaaaagttggctagtccctgctctagtacatcttcctcacactttatgaatgaagaatcagggccccgggggaggggggcagtatcttgttcaaggcatcatgggagccctgctttctctacacgctcagggtcctgtttccacaggctcaggcctgaagagactgaaagcccccactttttctgtctcttgggttggcccagggttgaaacccaggttccaggctgtgaggaagtccaggacacactgagaggtcatgtgtaggtgttcaggccaacagcacagccaggggctcagctgacagccagcatcaatgaccagatgtatgggtgaggaggtcttcggatgactccaggccaactcctatctgactacagctacaactgcacaaaagagcccgaacgagaaacactggctgagcccagtcaaccctggaaccagaagagatgataatgccatccagccctgagatttgtttggagggtgacgcggccaaggatgacacccactgccccagaggctgggggactggcaggtatatcttagggtttgggggtgggagtgaaggtcatcctgaggagagtcctttttgagtgtgttaaggtgtctgtgtccatgtggacgggctgtcagaatgggctgggggatgcggtcagggaccactcccattcccagggcctgggtgtcctgaccatccatgctaggtctgttccacgttggccacactgttccaggcaagcgcctttggtcacacggactggtctctgagactggtctgatgtgtgtactctcaggagcctggacaggggcagtctcaatccagaaatgacctcttcaatacttggtgtagttccctgtatgaaacgcccaatattatgagccacccaggcctgggtcacctgctgactggctggaggaagtgcatgggaccatgtgaggtcacggcagccccagggtttgcaggtcgtctgcatcctggctcccccgcttacaagctgtttgaccttggtgaggttagatcatcttcctaagcttcagtttcttcagccacacaatgggtataacacttacccttgagggttactgcgattgtcacacaaggcagcatttgcatgggccctgggccatgctagacattcatcaggcactgaagctatgggggagagaagtgaggggcccaggctctggagccagtgggtttaaactccactctaccactaacaagacattattaaaaacttctgtgcgcctccatttcctcatctgtaacatggggataataatagcacctgcctcctggcttgttgagaggatatatgtagtgcttacaacagcacaacacacatatatgggtacttcacaaatacaaatccattcaaggaaaccaaccctggtgccctgggatggccgttggtcagagacacagaagccgaagccagcttaggacaagcggaggggcccaggcctgcccctcggttccgggggcctcacttctgttccagggctgttcagttacctgctcctaggcctgggaggcccagtggacaacagagtgacctcttctccactgatttgatctgaatacattctgccccatgagggcccaaatgagggaactggtatgatattcacagagaggtgacatcacccgctgaagatcacacagcaagtccctgggccacctggatcccggccacagctccaccctgctacctccctctcttaagtaacacattaataagtgtcttaccctcaggccattatctgtgttcccaggccagggaacatttctgaaacacatcaaacattgacaaaaagaggtgtttttctgtccccaggccaggcccttcggcctctgttaaccagtgagtgttctctgttaatcctgagcccagctcctcctacacacaagtacaaacaagggcattgggcatgggagaaacctgtccaccagggccaggaggggacacggaaggttaatgggtcccctcccccaaagcaatgcacacagctggggctcaataagtgctactgggtggtaggaacagagccagctgagggcacaggaagagggatctgctaagcagaggaggcctgacctgggcttcattgggtaaaaccagtcatcataataagtagctggcatttcgggagctcttagttagttccagacactgccctgagcactggacatggtcactcactaacgtttccatgtttcagtatctgtggggtgcatatgttgctctccccagtctacagacaggaagctgcaggcaagaaagatgaagtcatttgcttaagtcacaccattaccaagaggccgagcttggattcacacccagcaccctggctccagacccaagctctcaaccacaatacaagcctgtggagtgggaggggtgaaatacatgagtgaggggtgacttctaggtattggcttggggtggctgtccctttgatggatatgtgggaggagcgcaggtgtcaggtgaggtattggggagaaggtggatgaattgggtttggcaggtgttgagttccagatacctgaggatgctcaggtggaggaggcaggagagaggcggcttatggctctgaagctgggtgatgggggctggagctgctcactccagagtcatcagcgtagaagcgcagcctgggagacacctgagcgatgaaggggcaaggccacagctaaggcaggggaattgatatttagtgtgcaaggattcaaaatgacagcaagaaaagaagtgttttagagactattactattattattattgagacagagtcttactctgttgcccaggctggagtgcaggggtgcaatcatagcttactgtaaccttgaactcctgggctgaagtgatactccggcctccgccttccgggactcagccaccacaaccagctaacttttaaatttttctgtaaagacagggtgggggagcctccctatattgcccatgctggtcttgaactcctgacctcaagcagtcctccagctttagcctcccaaagtgctgggattacaggaatcagccaccaaacctggccaaatgctatttttatttattttattttatttatttatttttgagacggagtttttttgtttgtttgtcttttgttttcttttgagacagagtctcgctctgtcgcccaggctggagtaaagtggcgtgatcttggctcactgcaacctccaccccctgggttcaagcaatttcctgcctcagcctcctgagtagtttggattatgggcacctgccaccaagcctggctaatttttttgtatttttagtagagacggggctttaccatgttggccaggctggtctcgaactcctaagctcaggtgatccacccgcctcagcctcccaaagtgctgggattacaggcgtgagccaccgcgcctggccaagtgctatttttaaatgaatgttttctttattttgagggtagataataaatgcacaagatgcaaattcccaaagggtgaaaattgtgtctctcttactctgtcccagttcaccaggtcttctccccagaggcagccactgtccccagtttcttcttttttctttttctttttttttttttttttttgttagagacagggtctcactcactctgttgcccaggctggagtgcagtggcacaatcacagttcactgcagccccagcctcccaggctcaagcaatcttcctacttcagtttcccaagtaactgggactacaggtgtacaccactacgcctgggtaattaaaaaaaaatttttttttgtagagacagggtctcgctatgttgcccaggcttgtctcaaactcctgggctcaagcaatgctcctgactcagcctcccaaagtgctggaattacaaaccatgagccactgcacctggcctgttcccaaagaaacaagaaagatgtttcttgtacatctttccagggatatttaacacacagaaataggtggccaggtgtcgtggctcacgcctgtaatcccagaactttggaagtggatcgctttgagcccaggtgttcgagacaagcccggtcaacataatgaaaccctgtctctacaaaaaatacaaaacattagctgggtgtggtggcacatgcctgtggtcccagctgctcaggaggctgaggcgggaggatcattggagcacaggaggtagaggttgcagtgagccaagattgcaccattgccctccagcctagataacagactgagatcctgtctcaaaaaaaaaaaaaaaaaaaaaaaaaaaagaataggcatatactttctcctataaatggtaacatatgcactttgcatcaccctgttttctcactggacagtacatcttggagatcattccacactggtacgcacagagctgcctcactcttttgattgatgcagagtatttcactgtgggaatgaagcatacgtaatgaacagtcccctatgagtggacctttaggttgtttcccatattttactattccaacaatgccacaatgaagagcctttggcagatggcattttgcacatgtgtgaacgcgtctgtaaggtaaattcctaaaagcaaaatttctgggtcaaaaaagatgtgcagtctaaactttgatagctactgccaaactttcttattgaagttgctgatttacactcctaccagcaacgtatgaaagcacctggttccccaatgtattattttttacattggtatcttgctgtaattttaatatgcagttcttttgtgagtcaagttgagcacttttcatcttttgttttttttttttgtttgttttgtttttttttgttttagatggagtctcactctgtcacccaggctggagtgtagtgatgggatctcggctcactgcaacctccatctcctggactcatgagcaattctcctgcctcagcctcctgagtagctggaattacaggcatgtgccaccatgcccacctaatgtttgtatattcagtacagacagagtttcaccatgttggccaggctggtctcaaacttctgacctcaagtgatccgcctgcctcggcctccgaaagtgctgggattacaggcatgagccaccgcgcccagccatacatttaaaggccattttcttttctataaactgtccattgatatcctttgcttattcagataagctgggcatctttgtcttaggaactatttgtgcaataagtaaatcaaccccttgtctataaaatgagttgcaaatatatggtatttttcccggtttgttgtcttatgattttgttaattttttttttttaagataaacataagcctggtatttccaggcacctggtatttccaggcagtctcccatacaagccctaaccaggcttagtttccaagatcagatgcattcaggatggtacggttaatttttcaatggagaattagttgtactcttatggcttctggctttcgcacacatagcgtatcacttatttattgctgcataaagaattactccaaaattgaacggcttagagcaacagcagtcagtgcattatcatctcttatggttccggggttgactgggctcagccagtgattctcctaaaggctctttcttgcagttttagctgtagtcaggtgggagttggcctggagtcacccgaaggcttcctcactcatacctctggtcattgacggtggctgtgagccgggcccctggctgtgctgttggcctgaacacctacacgtgacctctctgtgtgtcctggacttcctcacagcctggaacctgggtttctaccctgggccaacccaagagacagaaaaagtgggggctttcagtctcttaaggcctgagcctgtggaaacaggaccctgagcgtgtagaaaaagcagggctcccatgaggccttggacgggatactgccccctctcccccggggccctgattccccagtggcacgaggcgcacccccccacacacacacaaggacactgtgtagggtcactgttactgtcactccccgagcacgcacagtcaccgctcagccgcaacccggcgctccctctcgcgaagccacaccccctgcgcacgccgcgcgcgacgtctctcccgcccactccagcctggccccgccccggcccagctacattcccgggccagcttctgtactgccaggtccgggtcggcggctgcactgcggatgagaccggtgcgactcatgaaggtgttcgtcacccgcaggatacccgccgagggtagggtcgcgctcgcccgggcggcagagtaagagcctcgcgcgccgtggaggagggagcagggcggtcccagggaccggagagccgggcggggcgtttgggccttgtggccggctggggcaggcttggagttttggggagtctcggagaaagttctctggggcccagttctcctcttaagacgacgctgggacctgcagttccggctttggagaggggagattgcccctgaggcaaggtccaggctaattctccacgctcccacaggacatgtggggtcagggacatggcggtcactgaccaggcccttggacgtttggcagggggctttgatgactcttcttctttatatttacttatctttttttttttttttttgagacagtctcactctgctgcacaggctggagtgcagtggctcgatcgatcgtggcttactgcagcctcgacttcttgggcccaatcagttctcccacctgagcctcccgagtagctgggactacaggcgcaaacaatcactaccggctaattttctgattttttttttgtagagatgggggtctcactctgttgctcaggctggtctcaaattcctgggctcaagcaatcctcttgcctcagcctcccaaagtgttgggattacaggtgttagtcaccatgactggcctgaggaccctttaatttttaagacagggtctcactctcatccaggctggagtgcagtggcaccattatacctcactgcagcctcaacctcctggactcaagagatacttccacctcagcctcccaagtagctgggactactacaggcatgcactaccatgcctggctaattttttatttttttcaaagacgagggtctcactgtgttgcccaggctggtcctgaactcctgtacgaagggatcctcccacctcagcctcccaaagtgctgggattacaggcatgaaccactgcacctggcccacccttgctaaatggaaccctttttgtgggccaaccttgccaggtgcttcatatacataaacttttaatcctggtagcactgtgaagtcagtattataattcccattgcacagattaaaaactggaggctggacttagggttaagtttcttcccaaagccatgcagctcccaggtggaggagctggggcttgtactcagaagtgtctgactgctgtctgatcactgcatttgatcaggtttgtgtttccaatgttagataggaagaggatgcaatccagcctcagcagccagttctaggggcatatgagattttcaaattttgttcactgcaacaaaacctttgccaaggacccactttgtactgagcaggagaaggtggaaggcagcaaccgcgcccatggtaacagtagctcacgctgtaccctgctcatggggaggtggatgaaaggtggtcagtgccctgggctcagtcaggaggtgcaagtagctatcctgtgtcctgccacatagaggctccacacgtgctgactgtactgaattccatggcaagggccaggaggcaccgtgcatcactgggacaaatatctggttgctgtgagctgccgtggaagcgttgggtggccttgaccttatctttcctggcccagtccaactatgagagttttctatttcatggactccacggacaggaagagatgcaacaggccattgaatccaggccccccacctgaggcacaccctgccccccacgggccttccctgcagttggccgcctgcttggccgcccagcccctgtgaatgtgggaaagctcttctctgtgctgacctgagagctgtccccatgccttcccccttgcagcttaggctctgctggggggcccctcagcccttcacctgtcacctgctgtctcgggacagttctgagaccacccctgcctgaccctgcctcccctcagccagccccgggcagcctgaggccagggccatcagaggccaggattcccagctgggaggggcggggacaggtgtgcggctcctgcttctcctgagggcctccctttccccgcagctgtgaggtggagcagtgggactcggatgagcccatccctgccaaggagctagagcgaggtgtggcgggggcccacggcctgctctgcctcctctccgaccacgtggacaagaggatcctggatgctgcaggtgcacactgggtgggcaggggacttgagggtggcttggccctgtgggcccctcagcctgtgctgctggctcctggctgctctgcagtgctgtctgggttctgagggcgtttcctgcgataccaggcccgagcgggcagatagcttgctctggcacaggcactgcccctccctcctgctgtgaaccccttggcgggggaccctaggagggcaaagaccgcggtgtggagactgtgggtgtggggaagtgcatccaaggccctgggttctccagccctgccacaaccttgctctgtgacctccagcaagaccctgccccttctgggcgtgtgcgtagtatgagggaggacctagctcagtgccaagccccagcaggatgtctttcctcaaccgcagccacgggtctcagcccatggaagaataaacctccccctgtgaggctgttgtgacagttttgagaaaaggttcagactcagaggctgccagatgggaagggacccttgtgagtcagtgctgagccgccccacatcctggccttggcctggaagctttgtggtgtcctgcttgcaggagagggtagagagggtcacgtcccagccaccttcttggcactctcagaggtgtccatgggggaggccccagcgtggctaaagaagaccggaggcctcgctgggtggacagtccagtgggtaagagcggggccttggtggcagaggccctgaggtgaacccggctctgcctgtgactgagccaggccacttaacctccctgaactgcagtgtctgaggctgtcaaaggggattattcagagttttaactgaagaacagagatgtcagcctcttattctaagaaaacaataataagcggtgtccccatgatagtccccagtgctgtggctttgagttcctcgaggaaagatactaacaatgcactttctgcacaacaggggccaatctcaaagtcatcagcaccatgtctgtgggcatcgaccacttggctttggatgaaatcaagaagcggtaactgcagcttgggatctggagggggcctagagagaggggtggctatgagagaaagaagagctgttgatttgtttttactgcatatccctcggccattcagggagaatgtgaggtggctgatgatagaatctgtccacatgtgcacaggtcagttacaataaaccccagcagtcagaaacagtgggtaacttctgtgtaggtggcaccctttcacattcattatcttttttgatccccacaacaataccttgaagtagcaaaggcaggtgttattctttctgtttcagatgaggaaattcagaaaggttaagttacttgttcagtccctgaaccctgatcttccatcttcatatccttccaaagtgggagataatctaaataggaatgaggactgcccgtttttgagtgctcatttatagttctgagcttcctggcaggcagatcaaagagggagcaaagtaactccatggaaatgtcccagcagtagacattggtaaatatggttgaggctgatgttaccaccagatgtctgattcgtagtgggatccgagttggctacaccccagatgtcctgacagataccaccgccgaactcgcagtctccctgctacttaccacctgccgccggttgccggaggccatcgaggaagtgaagaagtaagtgaacgcagaccaggtgcggtggctcacggctgtaatcccagcactttgggaggccaaagtgagcggatcatgaggttaggagttcgagaccagtctggccaacatagtgaaaccccgtctctagtaaaaatacaaaaaaaattagctgggtgtggtggtgggtccctgtaatcccagctacttgggaggctgaggcaggagaatcatgtgaacccaggagacagaggttgcagtgagctgagatcacaccattgcactccagcccaggtgacggtgtgagactctgtctcaaaaaaaaaaagaaaaataagtgaacgcctggcaggaacgttggctctgctcagcactggatcctgatcactgtgccagtccagcccacgcatagtccctgaccccaggtgtgccccattgagtgaggactcagctaaaataaagcacaaagcagagctgcaataagggcagaaagggaagtggtgagagaagaggatgagggaggacaaacaagttctgctggtgggtgagggctggcagggagagtgtggatcagggagggcttcacagaataagtagcaggtgggcgtccgcttgagtcctgaaagctgcaggtccaccatcccttagatcccaaaatctaaaaagctcggacagctgaaagttctttcatactaacaggagactatttaaggcttttatttctcccatttaatgtgactttcctaagttttgctgcagatgtaacacttttaaaacaggctgctgcccagacactgcagagggtgatgtgtggaatctaccacgtgcgccatgctgcctttctaaaggccaaacagttttaaaatctagcctgaaggtttcagatcagggatttcggcctgtatatcaagagttagagttggccgggcacggtggctcacacctgtaatcccagcactttgggaggccgaggcgggcagattgtttgagcctcaggagttggagaacagcttgggcaatgtggcaaaagtctgtctctacaaaaaatacaaaaattaggcaggcgtggtgttacacgcctgtagtcccaactactcgggaggctgaggtgggaggattgcttgaacccaggaggcagaggctgcagtgaaccgagatcatgtcactgtactccagtctgggcgacacagcaagaccctgtctccaaaaaaaaaaaaaaaaaaagttgggggaagcattccatgtgcagatggagggactggcccgagtcaaggtgggaggcgtgcaaacgcaggctctcacagtgcgtggccagcagcgtgggccccggcacggggcatggagcagagtagacagtgctgagtcctgctcactgtcctgtctggggagtcatcacatctactggaggtggctcagggcaggctccatctcttgcccagggcagcagggtgggccctgtggctgtactctttgttgctgccctaaagtgccaagagaacttgttttggaatcataaatcctgagtttgcagcctgttgctctcaactcttccctggttgtgtgacctcaggcaagtcaccctttctggtttgttttcccatctgcaaaacaggatgagagccagtaaggccccttcccgccctcaagttctatgtctctggtggctttaaaggtggagtcgtttctgctgctcatctgcagtgccgagtggcagtgcctcatcccactctcagtccgtgacctggagggtgggtttataccttggaccacagtcagaggtgccgggttctcagcggcccccatcttggtccaaggctgggcctctcacctgcccctctctctcccctcagtggtggctggacctcgtggaagcccctctggctgtgtggctatggactcacgcagagcactgtcggcatcatcgggctggggcgcataggtgaggctcccaccggcccgcttgcccgccccggctctcacagcgtggtttgcatccctggcaccacgtgtctgaaggctgagaagacccacatgctgtcagggcactttgcttgcagtagagatatctctaatgagggatacagctttgtaaaacacaggcaaatacataaataaaccaaagcaggattccttaagaactcaccaggtgataaaagcaagttgcctaagggtcagggggcttcatgattccggctccataaagaacagatgaagactacaaatgtgttggggccgttaggagtggttaccgtgagagagcccattcccccgacacctactccggcttgcgttctggaaggtatgtgactcacaaagccctaactcgggccggagggctcagtgggcagagttgatctgcagttctgcagatgaggcagagacacttttcttccagtggcccttatttggagaagcctggcagaagggcgtgagcctagccaagcagctatctattggtggttctctgtcatcctgcctggtgcaggggtgcgggtgagggtggagagtgtggagaacctgtctagccaacgaacagccctgcctctcactagagagttgcttggaggaacccaacagctttggggcacgttctgagcctgaaaatccaactgtacaaatctgtctcagcagcagcttacatgaaaattgtaagtttggggtgagctggcagtttggcagtgccaccaaaaagtcaaatggggtctgagactgcattcacagaagcagagggtccaggacaaaggaggggactgcttgaccaggtgtctcccttgtgaaaacctctccagttctcagaggttaggaaaaacctgagtggctttccagatggcttggaccatgtgaggacagcatcagccagtcacagcctcaggggagctgaggtgctgtctccagatccctggggcagtgtgggctggctgggggctagttacagtggggcagccagccccccacccgctttggaggagacaggagcaggcaactcgggctgtgctgatgaaaagggtctgccctgagggccgctgttccagaaatgctgggtggtgtccctaccctttgcgggactgggaacgagacatggactctccttgctctaggccaggccattgctcggcgtctgaaaccattcggtgtccagagatttctgtacacagggcgccagcccaggcctgaggaagcagcagaattcc

SEQ ID NO: 55 - DNA, 175673 bp, Homo sapiens
gaattcctgcttggaacaaaatacgggtccttcaaggggacccatctgtgtagtggcttcttttttattattattatactttaagtcctggggttcatgtgcagaacgtgcagttttgttacataggtatacacatgccatggtggtttgctgcacccatcaactggtcacccacattaggtatatctcctaatgctatccctccactagtccccccaccccccaccaggccccagtatgtgatgttctccaccctatgtccatatgttctcattgttcaactcccacttatgagtgagaacatgcagtgtttggttttctgttcttatgatagtttgctgagaatgatggtttccagcttcatctatgtccctgtaaaggacatgaactcatccttttttatggctgcatagtattccatggtgtatatgtgccacattttctttatccagtcgattactgatggacatttgggttggttccaagtctttgctattgtgaatagtgctgcaataaacatacatgtgtatgtgtctttatagtagaatgatttataatcctttggatatatatccagtaacgggattgctgggtcaaatggtatttctagttctacatccttgaggaatcaccacactgtcttccacaatggttgaactaatttacactcccaccaacaatttaaaagcattcctatttctccatatcctctccagaatctgttgtttcctgactttttaatcatcaccattctaactggcatgagatggtatcttcttgaacccaacatgccctgaaagcaggttgtcacaaggggttggccggaagatcagctgctccatcttcccagtgaggtttcacctttcaccctatgcctagggcacattcatcatactgagtgcctcaaacattgaaagagatgggattatagatggcaccaggagaaaaatggagctccagctcctgagtaaaatgaatttatctattcccagacccaggtcagacaacgctggctggaggaagtcatttatctctttgagagatgattctagaaatacaatcgtggatgtgtcaattccatgctttccgacttaagggtgagacaggaagaacggaagtgtcttctgcctctggaagacagcgggaggccccatggtgaccaactgcgctgcctgacagcggggtccaggcctcgggttctgattactacagccttttctgaattggaggctgtgttgttcctcttcacttccttttgattatctccgggcaattttgagagagccagggatgaattaagcagagctggtgtgcacattattatggcctctctctgggcttaaatggctctcttgaaaataggcctttttatttatcctctcatctcctctccttaaattgtagcccagccctaaaggtgtggattgattgtgcatatcctttgccttgtaatgagcctgtttatcacttctgtggatctggaaacaggagaggagatggggccactggggactgcctgctcccaccaacctctcctgcccacttagaccaaaggcagctctgccttcaaccctttaatttttaaagaagccacttgcacttcgcgttaggaactggtgggtgcaaggtgtatatgatgagtaactagagtttttgtttatttccttatgagtagatggatcttggcccaggacagctgctgtgaaaggtccctttagacgagagaagccacacccattcacttactggacccaggctggtggtggagtcataaaagtggccctggacccagaagaggaggccatgcccagacgcactaccatcagccaggggcgttgagattccgtcccaggacaatgatcatcagcctgacttccgattctgattcagggagttaatggcaaagctgagactggaggctgggccactggacctttctacaagatccttccagtctctccttgatcttgactttgttaacattttaactctttcataactgtttgcagaggatcagaaagacagagcccacactgtgtgcctgggcttgtgccccttgcagatacgggtggtcctgcaggcaacatgatcttctcagggcactttgagtggacttcgggtcagagggaacaacgctggctaacggggctgttactctgtactgggccctgggccagatgcttcatgtgcattaactcactggatcctcacaacagtatccccactgtgcagatgaaaacgccgaggcacagagaggttatgtaatttgcccatggtcacacagctagtgagtggtgaagccaggatcaaacccaggcagtctggcgcctcagcctgagctcttcccatcactccagagagcctgtgccaggtcttgggaaacaggcagggaatagtctgttgatgtttcctgggtgccctgctgccactgccctggctcagcccacatctctcgcacctgaccgcattccagcctctccactgagtaccatggctgtagcgtagcccacccaaccatccgctactcccgcctgcaggaccatgccaacacagagagcctcctgacacgacactcccgttgttcctccccagccctctttaatggctcccaattgtctgatttctgggtgttcccaacccatctagtctgatctcccaccacacctttcatggatcctgacagccaaacaaggatttaccaacttgttcatacaacacttttcccaccttccagcctttatccaagctgttcttcctgcctggaatgcctgttctcacccgcccatggctctttcatgactgcttcccaggccctgtgcttggcaggtgctcaccaacgggatactatgtgtccatgttgctttgttgcagaggaatttttattttttctctttctggatcctaaaaagaatacaagttcacattagaaaatctggaaaattgagacaatctctcagagaaaaattaaagatagcctgaaatcctacatccactgtcaatattttgatatatatcttttcaatctttcttttcatttttaatattgtgaaatatttcaaacacagacagaatggagaataatataacattctctggtgcatccaccttttcttttatcaacccagtagtttttcttttcttttttttttattattatactttaagttttagggtacatgtgcacaatgtgtaggttagttacatatgtatacatgtgacatgcgggtgtgctgcacccactaactcatcatctagcattaggtatatctcccaatgctctccctccctcctccccccacccgacaacagtccccagagtgtgatgttccccttcctgtgtccatgtgttctcattgttcaattcccacctatgagtgagaatatgcggtgtttggtttttttgttcttgcaatagtttactgagaatgatgatttccaatttcatccatgtccctacaaaggacatgaactcatcattttttatggctgcatagtattccatggtgtatatgtgccacattttctttttttttttttttgagacggagtctcgctctgtcgcccaggccgggctgcggactgcagtggcgcaatctcggctcactgcaagctccgcttcccgggttcacgccattctcctgcctcagcctcccgagtagctgggactacaggtgcccgccactgcgcccggctaattttttgtatttttagtagagacggggtttcaccttgttagccaggatggtctcgatctcctgacctcatgatccacccgcctcggcctcccaaagtgctgggattacaggcgtgagccaccacgcccggccatgtgccacattttcttaatcaacaacccagtagtttttctatggatattagcaaatttagtttgtttgttttccttgagacagggtcttgctctgtcacccaggctggagtgcagtggcttgatcatggctcactgcagcctcaatctcttgggcccaagcaatcctcccacctcagcctctggagtactactactctaggactacagatgtgcaccaccacgcccagctgcaaatttagttttaaacattttgggataatgatctacaaattatccacactgttttgaaagctgattgtcccctggccccttccccatatgataaatcacaaatacttttcaatgactaaagaatattctctgaaaaaatatacagtaggttagtcagttaaccagtccctaattttggacatttataattattataagcaatactgcacatccctgactatttactaagaatatattcagagaagtagaattacggggtcgaatcatataaacattttgatacattctgctaaattggcttttcaaataattttactcatttccatttccataagcagcatatgagaatatcaatattgattcatcttagtgagcactgggtattatcacatttgtaacatatcgtctcttatgaatgaatgaaggaatgaatgacaagagcctttcctgggagggataatgtctccttgtggtgctgctgtcacactgccactctccttgtgaccagctcagatcccctgcctgtgcgaatgtgtgtgttgctcaggaggggaggtggggaggtgaggatagggggctgacttccagactatttcagtgtggcttttagatctcagccaattctgtgaagtgaccgtgcagccaaactaatcacccttccttgggccaggttaatgtgctcctctcttgctgcttggatcaataccgtacttactgcagattagctaaatgagccagtgcagctgggaatgagcttctagagacaattactatggaaaatgcagccatattttagtgggcaccacatgcatgaggctctttgcaaatatcaatatatatttgcttgcttgacagaaatagatcaaacctaagtccggagattaatccagatgatcagagtgtacatgcttcttgttgtgcatagtgtggcggaaccttgaccttttccatggttgctattgttcggattgtgctggaagtaacccaaaatgggctggtggttggcccatgcgattgtctgcaagtttattgcaggtacaaatagtaatgaggctgcttatggtgataatcgtttatctcacttgatcttcaccacaaccttgaaatgctcactaaatgtttatttaataaattcattcattcccttaacaaataatgactgagtagcctttatgtacagggccttgttctaggtgctggagaaacagtagtgaagaagacagggcctttttcagtggaacttgcagcctggtgggacaagagtgacaataaacaaggaagccatgcgcatggagaagtaatcacgcattgaggcaagtgctgcaaaggaagacggtgccgtgtaaagaaaatatatagggtggtggtgcttaatttcaataggggggttggagaagtcttctccgagggggtgacattgaggttgagatttgatggatgagaaggagcgagctaggacaagagaagaagagagacagtgttctcagtggagggaccttcttgtgcagagggcgtgagctggaaccagaccagcagttccaaggaacggagaagctgccgtgcagggctggagtgtgatgagcaaggcaggaacagcacatcatccggtgagagaagcagacagcggccaggccacacagagccctgcagggcacggtaaggactttggattttattttaagggagaagggaagcagtcaaaggactttatacagggaagggatatgatccaatttacattttcaaaaggtcactctaggtcctgggtacggaatgaggaatattctatatccattttgatagctagttccagaaaaataacaattataagtagacaggctggcaaggtggggggagccttgggtagatcctccgaatggctctttgggaggtgaggatctgccacggctgcgggctctggttctgaatgttgtctgatttcacaacccatctcacagtttctctttcccgtaggagggcttgtcattggcagattcttagcccagtaaaaaggagaggcaggggatggagaggagagagctggggatctttgatgtcacccccacgatcccagccctggctgtcctggtgtgctggctttcatcccaaagaacagcacggagccccccctcactgcatgcgggggcccctctggcacagtggggaggtgccccgaagacagctcctcctcactcagtcactggggcgctggtggccagggctcagagagcaggagacctgaagattgggtggctggtcggcctggacatttagactgtgcctgggttcttccgattgctcccccacagtcctccagccacaatccatttcctgtccttgggctcagtaacctcccccttgcttttccccctgcagtcttcttggttctcacccatacgttccttactccttcacacaagcatcagctaaaaaaagccagcagccttttgtgtacgtttgaaaactggtgaccctcctaggtaaagaagtttggggtgtggggaatgaaaggagcatgataggaaagattcccattcccttcagtcgttgaaaagtgtaacattcaggatgtgtttaaatgttcaaagagtcagcactaaacaaccaggaatagaatgtgtatcttccaaactactggggaaagagaccggaggaagcataacccaacagatggctgagtgacttctaagatagaagaggcagagggaggaaaagcaggacagagaagaagttgaattcccttccataaacaggttgaacattcttctctgcccgcaggaaacctgggctgtgttctttcaggtggtgggtggagggggaggcatggccggaatccccagtgcccgtgggtgccagccaatgacttacacatctgctttcctcagttttaagttccctgggggcaaggccagacctagttcatctgtctatgtccccagaacagggaggttccattgctggagaagaataagagcacatgttgttattacccaacacaagctctgcccatcttttcggctaatgccatcttatgaaaggggtgaattcagatcctactctgaaggcaaagaaatggggcaaagtggaccatgaagctcagagacccacatgaatgtgaaccacggttgagaccagcagacagaaagctctgagtgtctggggatgggaagctttcttattccactgacttctctcgccatttcttctctttgtcttcctctgcttcctcctccctcttttgacttcagctggcagagttgcttgaaatgaagccgttccctgaaaagcacacatgaatttcccctgcggaaaattcaaacagacacacttgaggatttccactaaattctctctggcccccagagcactggggaagcatgtgagacctgtgccatcccggaactgtggcgacaatggtagttaacgtccatcatctgcaggcaccttcaggatgtggagcatgcagagatgactcacgcccacaccggtgacctccaacacaccagggaaggcaggaaaaggctgtgtgccaggatcttgttctgggctagaaaagtatgcctgttcgttacccgacctttgctaagtacaccaactaatggagcgagagacatgaaagatcttcacaggccatgtggaaatgtaattcaaacccagcccgaggaggtcatagtacgtgagtttaattttcatcctgcctttccttacaatgctaacctttgccttacaaaaaaagttgtttaaaaagagataagtcagtgtctatttggcatttgaaggagttttaatctgagcaaccctgttggaagtgtttccatttccttaggattcagttcaggaaaccgtgaattgatcctttacatcagaagtaattgttctgggtttgaaatctatcaagtattggaaattcaaattaagccatttgtgaagttctgtttaatgagggttatcaagtcgcttcttaatggcatctgtcggactcctagccccctctgctattcatacaggcccaaggcctcccattatatgccccatgatgcagccggatgggccccctctttgatctgggcatctctgccctcatacgtggtgggcagtcccaccctcccccactgctctgggagctgttccgtcccagcycctccatgtcttatctttctcttccactttctgttttctctcctgtcctctcttcccatcatcccattgcttctgttttctgtcttccttcccagcctcctgcctcttccttctttgtcacgcattcamcctgtctctcatcaacactaaggccagcacgtgtcaccaaactgcctcccatcagaggcctctgacattctccaagtcctccttcaacatgttgcattctgacagtatgagatcctgaattataaacatttaccacccactatttattaatcgcacttttatcttttggcctgaaactttgtctctcacctgctaccagctgcctccagagcatgggggttgggagctgatggcaagttccctgtgtcttttctgcagccctctgggttttacataatgtgattttgtgttctcgcacaaaatcatggtgctccagactgaaaaattctactcatcaggaaatctccctccccttagagcgctagaactgtctttttgtgggacttggtcagccctgagatttcttacaggagataaagggccgaattggagagatgcttggagagaaatggttgacagggcctggagagcatgtcgtggaggaagacattgacaaggtctcctcctcgtcctctttcctccttccatctctcccagtcaacccccaagccttggttgatgcccagttccctaaggtcactcatgaacttctcatgtgtttgttgtcattcctctttcctttaattctctctgcttcaaacttgggagaragattttctctgatgaatttttcaagaaactcccttcaggctccctgctgccctttccagccattctctgcttttggatccctgaggaccatccagagagcccgtgtgtcatttttaagaaactctgttacaaggcaagaaataaaggacatcctcaaatggtagtgcacccaggggaggtgtggagagggtggaatgacgaagcgcccgagacatatgctgtacggcaaggtccacagagctgggatgcccatggggtggggtggggtggttagagacggaaaaccaaatcaaaagaatttaagcaataacctggcggggcacggtggctcacacctgtaatcccagcactttgggaggccaaggtgggtggatcacttgaggtcaggagtttgagacccacctgtgcaacacagtgagacccaatctgtacaaaaaatacaaaaattagccaggtgtgatggtgggtgcctgtggtcccagctacttgggaggccgaggctggaggatcacttgagtctgggaagtggaggatgcagggccatggtcacgccactgcactctagcctgagtgaaagaatgatagcctgtctcaaaaaaataaaaaaccaaaaccaaaataaaacccctgaacccccaaaatggaaggaaaaatgaatatctattgactccatcgctgacattgcacctgtgggttctagggctttaccagcaccatcaggacaccccagtctcttgagagacaatattttctagtagtcatcactgcctggacttggagcctggccccacctcttatgarctctgtgaccttgggcaagtgacttcacatctttgtgcctcagtttcctcacttagaaaacgaggataaaagtagcactaccttctagggctactgtgactattaggtgagtgactatttgtaacgttcttagatcagtgtgatgcacacagtaggtacaaagtgagtgtaagcaactggatgtgtttcctaggcctccataacaaagtgccatgaactaggggcttagaacaacagaatgtattgtctcatacagttctggagctggaagtctgaaatcaaggtgctggcagggccacgctccctctggaatctgtagagatccatgcttgcctcctcctggcttctggtggtttgccggaattctttggcatgcttgacgtacaggtgcagcatgcaatcctctgtctttacatggtattttccttgtgtctccacccaatcttcctgtgtctgtctctgtgtccaagtttctctgttttataaggaaggcagtcatattggattagggattattctaatgacctcattttaacttgattatgtctataaagacccaatttccaggtactgaggattgggacctcagcatctcttcctctctttctctttttctttgtcctctttctttacttttctcttcgttggcttcatttaatagcagatttgccctaggctttggtaaagacgttcattgcagttctgggcttattatagtctaccatcttagcagcctaccgttttttctaatagtttcagtgaaagcccccgactgtcttttgttggctcagcttggatcatgtgtccactctggagcctgtccctgtgtccatggtgctcccattggccaaccctggagcaggtactggggtcagtcccactcaagtcatgttgattgtgaatggagttgaggaggttgcctggaatgaaaactcaggtcttgcttcctggagaaaggattgctggcaggcaatagaaatagatgagccccgaagccttgaaaacacggtcacgagtcctgcagggttgtcttcaattctgttaatgcagtcatctgaaatgggattgaatttattgggggagatattcagagagctagagaagaccaaggggaagaaggacaacaggcagatttgagctcagtgtgaggagatacttcttaggcacagagcagccaacaaagagagggcttgtgccttgggaggtggtccacatcctcttcctggaggcaggcaagagtggccatgtagtttactgagaatgttgtaaaggcaattcacacagtggaaaaggagtggactaaatcaatggctttcaaatatttattaccgtgacccacagacatggatttatattgtaaaccaacacacacacacacacacacacacacacacacaactgaaacaaaagtttcgcaaagcaattttacctttactataagtgatgtactctgacatagtcctttctcttctatttcattttaaaaacactcacagctcagtaaattgatttcccagcctggtgttcagaaacctggactagatgacctctgaggtccctgcagctcagtgactctgggggtctatgacaggtaccagtgggccaaaaaggaggaaatgtggtttggtatcaccaaatatcacctgcacagttggtgatgacactggactggagccagctctctggaccctgcagcccaacttctgatgttccttctctgccatcttcgatgactgccctgtctgcctgtaaactagagtatttgtaaccatatcagtcctttgcatggatacgtttatgggttccccatttgtctgataaagataaaaggtttgatgtcttcatctgctgtcctcactaaccatcccaggagtccctcccagtgttttccaaagctctgtgccctttgagctgtcctcccgcaacacacttaaatccacacctttgatcctatccttcccttggcttgagtgtcctccctccatgtccccctctctaaattctccctgtcctcccatgttctcttttaggaaggctcccatggttcatttcccaggtggcaggatcttcttctcctctgagtcctttcagcctcgtactgttcctgttcttcctggaccatgaaaccattaacagagagacttgggggtttgtgtgtgtgtgtgtgtgtgtgtgtgtgtgtgtgtgtgtgtgagtttcccgcaatacctgcctggtatgtccacagaggatgctcagtacctgcttgaagaatggagagatggatcgatgggtgggtggataactgaaaggatggatttcacaacattgaatctaattcatttattcgacatatatctaatgagcacctattatgtgtcacacactattctagttattggggacaccacattgaacaaaagacaaagattcctgccctcatggagcttacactctactaggggagacaatgaacaaagcacagtatatgcatctgatggtgatggctaagaagaaaactaaatagggaaggggatagaagtgttagggctattgcagttgtagatgggatggccaaggaaggcctccctgagaagttgatacctgagtaaagacatgaaagagatgaggagtgagccatgtgaagacatgtggggagagctcccaggcagagggggaacacaggcaaaggccctgaggcgcagcatgcctgtcacgctaaggaacagcaaggaggccagtgtggctggagcaggaagtagactctgagatgaagattagtgggcagaaggtttattagggagttcttttgggatcaacacctaaggaagggaaaggaaggaaagggaaggggcaaaggaaagaaaaaggaaaggagaaggaaggaaaacagacaaggcagaggaggaagctgagctgtgatgcagtctcaagggaggcctcagccaaccctgcatggaggtctgaagacaggctcactttctacaggcatcctaagttggggtgagatggccaggtcttatactcctgtgttaatcaggcactgggtgcaggctgcctggaagagggggcgtgacttttagttgaggcagtgcctgaggagatgatggctgtgggctggtggttggtgccactcccaacatctggggggataaattctatatccatgaagaggagtctaaggggtatgtcatggcatccagcatagccttgtagaccaatatgagggccctgttgctacactgagtgacatgggaagacactgggggtcttgagaagagtggcataactggactgatactttcacaggctcacccaggctgctgtgagccagtggcacacgatgcagatgagagagggtgggggctggaccagggtggaggcaggggaggtgtgagaagaggtcagactttggacttaccttgaaaaacgcagagctgatgggacttgctgacagatctgatgtggggtttggttgaaataaaggaagtaagaatgattctgaggattttagtgggagcaactcaaaggacagaattgtggttagctgggatgaggaagcctaggtgtagaggaggttggggagaagatcaggtgctaagtttgggatgcccattagccattcaaggaggcatggcccattgacttggacacttggagtgcagggcagaagtacgagctggatgcactggtttaggagtagttagcatctagattctccattggtggagggtgtgtgtgtgtgtgtgcacttgcgctcacatgtgggaaggatatggggcaatggttgggataacctgtgtgtggctgactcatacatggggctgccctttcctgggctgttctaggcctggatctgtggtctctctagggagtcttaggccagactctgaaggaacattgtaggggctgcccacaccccccgagagctgaagtggtctgaactctgatgggcccctgtccttgaattgtgggactgagtgtggggtttgacatcagggcaggggttgagcagatgcctctaaggtccttccccactgtgactcagggactttctgtggctcttctccccgagggcttttctctcatcgctgctctcccttcacactgcctttgtcccctcttgtgccactctggagtttgttccacttgggagccacttccccctggagaggttgctggcatttccctcactttattctcagtctcctcaaacttcccaaagatattagtagtgtgcaacctgaaaaggagaggggcattgacaaaatgaattctgacagagataattgcatgaatcctttgtagctcagccctgaacatggctccacactgtcagtttttattttattcaaatgctggagtcaaacgtccccctgcaggtgagggagtggtgggagatgaggagaaggggaatgaacggggctacaggccaaaggcaagatctaagccctgttgtgcaagcctcctggggtctgggctgcagtgccatgtctctgggctttctctggtctggggatctagacagtctctaggatggatagacagatgtgtgaagggcttaagagaataccactttggcactgcctgcaaggctgggaatcacagccttaatgaacattgagtttcttgatgaagcaggcacagtcttgtccctcctgggtgagaagagggagcccctggcaggagggggtcacagtgaccttgcagaattgcattgcagctgactctcctcagggttccctgccatcatagctgacagggaactacagtgggccaccactgccctccaggcgtgctctcactcaaatttcccagcggctgttcgtgggactgcaccccaaccctcaggcttgtcgtctttttttgggtcaggaaccaagtgctcccagggtgcttgatggggatgtctccatggatgggccatgtggctgagcgtttgcccagcccctttgctaaaatgacctttctcaatgtcccaatttctactctgtgaaatccaagtcatccatcagcaccttactctggacctccctcaggatccttcttaacacaggctgtaagtaactgccaccaaacaatgaccactggcaattgagaggaaacctatttatcatccctgatccagaagacagaaccaaaatttaatcaatatttagtgtttttgtgctgttggtttagtttacatgtaagctatgccataggtatcagaagttaatctggtccttattatgatggttttttatatttggtgatgaatatttgataattgtgtgtatttttttttttttaggtagagttttgttcttgttgcccaggcagaagtgtaatggtgcaatctcggcccaccgcaacctctgcctcccaagttcaagcaattctcttgcctcagcctcccgagtagctgggattacaggcatgccccaccatgcccagctaattttgtatttttagtagagacagggtttctccatattggtcaggctagtctcgaactcctgaccttaggtgttctgcccgcctcggcctcccaaagtgctgggattacaggcgtgagccactgtgcccagccatgtgtaatgttcttaattagaaaagcatgagcttaaggagctggccaagaacccatccttttggaggtcatgttgaactgccccttagctgtttaatgacatgagaaagtgcatagggacaaatgcttgcattccctacattaaaggtccaaaaagccacaaacagtgcttatgtcccatcaatcatttcagtgagcagatctgtcaaactaggggaacccaccagtttcactagtgaagaactggggcttcttcttaattctttatctggaatgcctcccttggccatcattacatggaataacatctcacagagctaggctgggaggtgggagatgtttatgtcaacggagagcgtctgagatgacttctcagagaagtgagattagctgtatcaggaatgcagaaagtcaaggtgcatctctcagtgacttccctcagcctcagtgtcctcctttacaaaaacaggaagttgcgcccagtcatactccagagcattctggagacttggttttgatgccatggctttgtgtgaacacctatgaggctacattcgtcaaaaccatatggtctaaacatcaggcaatccagccaaactggttaggtgagcagaagccagcttctgtccccaaggacctcacatgctagtaagggacaggaccagatgcacagaactgtcacacaaggcagaaagtaggaatggccaaatggaggtgccgagactatcccctgggagttgggagacagcaagccttgctctggctggggtgtgtgtgcatgtgtgtgtagatctgggaaggtcttaaggaagcagcggtgctgagcagagccctggagccaggctaagatttggaaatggaaggggaagggtacccctctgtcctttacttaggcctggcacacgagaggtaccccaaaatgcttgctaacccacccttgagtctttctctacacatctagtttcctcctttggggacctcaggccatgatcaaacagagtttaaaaaaattaacctggccggtcgtggtgcctcatgcctgtaatcccagcactttggaaggtcgaggcaggtagatctcttgaggtcagtagttcaagtccagcctggccaacatggcaaaaccttatctctactaaaaatacaaaaattagccaggcatggtggcaggtgcctgtgatcctagctattcgggaggctgagccaagagaattgtttgaacctgggaggtggaggttgcagtgagcccagatcacgccactgcactccagtctgggcaacagagttagactccatctcaaaacaaaaaataacaacaaaaacaaaaattaaccctggaagcagaaaggcaaagacaagcaaaatccattcattttatcatagctctgttttgagactctgagagcctgggcgggaatcatttcaaggcaagaagcccactgggagctcaggtttaaaaaaagggggaggagctatgaaggcactgggggctcctgtggcacccagtcaccaaaggtacagatgggcctctcaggaactggaccttggccatctcccctttccacattgccactatccattactggatgcctggtttctcattttgcttctgtctgagctcccatttcattctactgctctcagatctggctttgctgcttatcatctgcttgcacaaggcctatcaaggcctccacaaaatggtagcttcagccctcaaacttccaaggccttcctatgccattccctgtggctcattggccagtgtcggagtgccctgattccagattttcagaggagacagtctgatggggtcagcttaggcagattctgcctctgacccaatcagctgggagcaggggtgtgtcaggcccccacacactgtaaagcgatccccttccaagctgtttttccaagaaagggcggagcgaaaatgatctgcttctccaggaggaagggcgtctgactcctgggctgtcacatatagtgtggacacccacgctatctgccttgaagtacttgattacacagaggaagggcacagcagcctaggcctattcctgccgttgtcaatgggattaacattaacacaccatgaacagctgaataaatgcaggaacacttgtctttgtctaacaaagtctacctggcaccttttctctctagtgctaatcaggcaatcttaaaagcatattttgtgtctgtattggaagaaggaatgacagtaggcattgctcactgccccctccctggcctccaggccaagcctttagtcatcatcatcagctgccacaggttcctgggcttagagcactgagctctaggtgctgactgccccaacggagacatggccagtgtttggacctcagagtgcgtgttcctatagaaatagatgtgaaatggtcagttggttcccacaccagcccacaaaggctatgtaaccaatactttgtggaccctaatggccatgtaatataagcttctttacattcatgagatgaaaaacaactctagaagcaaaacttttcttagagctaaaaggggactcagtaatcccctgcaatcatccctttgatggcagttccaggagagtaaggaatgtatacaaaatcacacagctattcagtggctggattacaactgaactaacatagtagctacattaccagtgaggaaacaaaattctaagtctacaaagctgtataagaaataggctgttggctaggcatgggtggctcacacctgtaatcccaacactttgggaggccgaggcaggaggatcgcttgagctcaggagtttgagaacagcctgggcaacatagccatatctactaaaaataaaaatgaaattaggcatggtggtgcatgcctgtagtctaagctactcaggaggctgaggtgggaaaatcacttgagcctggtagattgaggcagcaatgagctgtgattgcacctctacactccagcctgggcaacagagcaagactctgtctcaaaaaagaaagaaggaaagaaggaaggaaggaaggaacgaacaaaggaacaaaggggaaggaaggaacgaaggaatgaaggaatgaagggagggagggaggaagagtttgttgttgtttatcttgaatattgatgctctagaaaaagcaggttgaattagatgagaggtgatagtcagacacctttatgaagttccaagggcttccaaatactttcaaaaggggttagcggttataatgcatgaaaactctctctctctctctctccacacacacacacacacacacacacacacacacacatacacacacacacacacacacacacacaggcatgtatgtatctgtattgaacatatatatagagataaggaaataactggttctttattatgtgttttccttttagaagctgaaaattgcatttctctcttatttagaggaatgtagagcagtgttgtccaatagaactccctgaaatgataacactgttttatatctgcactgtgtcaccactaactacatgtggctattcagcatttgaaatacgggtaatacaacagaggaactgaatttttaattttatttaattttagtgaatttatctaaatgttagggaattgaaatttaaatgtaaatagccacttgtggacttgtgaacagtgcagcatagcgttactagtacgcttatcagcccaaacagacttcagcctctcaggtgtaacaaaatggggtagggtgggaggaggaaaaataacagagacaaaggaggaagtttattggaaggtagctggacacaagctagagaggttgtgtgtctatgaatgaagtgccacttggggagcatacactgagttgtgaacagtaagaggcaaggagaaggggtacttggtatattcagtattcttctatgggattaaataaggacagaggtggtgaagaaacaatggtaggacagttccacaacttggccaccaggggcccccattgacccagagcagcttggtttccgaggggagagaggccaggtgtctgtggcagggatggggaggatgagacacagaaaagcagcagactttgagtgggtccaagaggagggggatattgactcattatgttgtgctaagcaccgctttaagcactttacaaataacaccctaagaggtaactattttatcatccttattttacagatggggcaactaagggtatatttggacagatgacttggctaaagccacagaactgttaagttccgagttgggaaataatctaaacagccaggctgcagagtctgggttaactgttgtgctctgctgctcccaggaagagcctgcccctacatggttctggagccctgtctagaatgtggacatgtaccgccactcagctggggtatctccacttgcctcccagtatgaggctgttgggaagatttgtgtgaaatattgtatccttttgacttttttttttcctacagccacttttcattcatttatccattcaggtgttcagcaagtaaacatggagcctgctgaagctgggaatgcaaagtgtgcaagaagcctgcctatgggaacctacggctcagcagggagacatgaaatagctgggaacgccccctgcacagtgtaaagggcgtgctaccttgggaaggggacagaaacagaggagaggggggatcctggccagcaggggtgtcacagaaggctttttaaaggagggggccttggagctgaactttgaggccagtggcattcgaacacatccacgggtctccctttcggatttcagtgccctcttggccttgggctgatgagctaagttgctactggagaatgacctttcacaggaaattcagaaccccagtcatcaatgtttgactaccctgtcaccaagtccctccattgccctggcttgatgtggctgcgagaagtcacctgttcaggcccctcctgcctcctccacacactgacctccctcagactcagaacagccgatgctgccctctgaggcctgcccctttgcacaggctttgcccacatctgggctcctggattcctcagaagccggctcctggggcctgtccagcaaggcttggaagcccgggtccccaaagacctgctagttaatgagttctgcaaaaactaggtctgtctgtaatcgaaatgggagtacaaggctcacacggtccctgaattaattcagtcctgttagaaagggagcaaggcagagtttctgctgctgtctgcaggacccatggaggggttctatgcaccattacttccatttggggacccattgttttccatcacttcagcacaatctggaaaacattctccaagtctattattcctgtctcctgctgccacactgaggcagttgttaacaatgccctctgcccaccccggacccctcctccatttaaataccagtctgatgggcaaagagagcatttaatgactgctccagactaaaaagttcctattattttattcccttcttactcctgcccaatttccttccagatggggcaggtgggtataaaatatatggagctggaattacaatagcaagaagacaggtggggaaattgaatgtggttggaaaatttgtccgtatgcctacaggtgtgtcttatgagatcttgcaggctaccaccacccccgctaccccagcctggccattctccaaatggtctgggaatggggaatatgagtggccaagacttcccctcctgttggagtggtctgagtatccaggcagaaggaaaggagatatttagcaagggggcgcttagaatggcagccttgaagaggtgcaggcagtgctgacttgacactaccttcaccatcaggtgttgggcccccagtacgataccacagagtctttatgccttccttctggattctcttctttcctctccttactcagatgccacctccattgggaagtcttccttgattaccccagagttagtttctccgtcctttctgctcctctctctgcatccctattaaatgtgttattggtctatgatgttctgcattacaacctgtgtttgatggctggtgacttcctgtacagaggagatttagggacatgcatgcttgagaaagactcctgttctccacttgcttgctgtgtgactgtacaaatttctattatctctgtaactccatctgcaacatgaggacaaaaaaatctacgtcacaaggctgctgtaaggagtaagatccagcttccttctctccacctcagccatttacagtcactactattgggaaactagggctctggagtcagatcagcctgggtttgaatcctggctccaccactttccagctgtctttggccctgttacaatccttctgtgcctcagtttttcatctgtaaaatggtggtaactcctatcccatatctcatacacttcttgggagaataaactagggtaatgcacgtagattgctcagcataggcctggcaacattctgaaagttagctatcattattggtagtgttgtcactaaaactgtgagttggtggagtccgaaatctcagcctagtatagtgcccagagcccagtgagtactgagtatataaaaaggaaaatgtttcattgtaaactgggaaccatgatccaaatgtaatgctcagaaatgtcaccccttgtcaattatgaatgattaggacatgatgcaggtgacttgagcctgcatcagagaccatgggcttgggagatgcccaggggtgcctgcccctttggctgtcacagtctccagttcttccagactatgccaggtgcaggtgagctggaggtaacagacactcacccactgatagccagaagtctaacccaggaggaaagaaaacccagggctgccagttcacacacagttgggagcacttgctagtgagtcatggtcaatggccaaacagatgagaagaaccaaggaaagggttggcatttgctggggtctgctgattcccaagctctggcctgtggtgaagcagcagaaatgtgccaagctgaatcacaaagagcttgaggagaccttggccttccttccaggctgtgagggcctgggctgccctaagccatcctctggaaaggtggaaaggtcttcaggcccagagtcatgtccatgtttacatctatgcctatgtctgtagcgatctggggtatagatatttacatagctaacatttattaagggctaattatgttccagcttacatggaccaacactgtggtaacatcaatcatatccatgatatagatactacactttcctcaccatgaaacagggataataaatttgaggccccattggtctcagtcagaatgagccatgttgtgctgtggtaatgagcacctcctagatgtcagtggcctgaagttgtctcagtcacattgtttgtccttcttgtatcagccaaggacattggcctgtgctattgtcattgtcagcctggggcccagactgacagaacaaccattatgtggaacactgccagtcactgtgacagagggagagagaggcaagccatgccctgactcctaaggtgccaggtgcaagtgagctggaggtaacagacactcacccactgatagccagaagtttaacccaggaggaaagaaaacccagggctgccagttcacacgcagctgggagcacttgctagtgagtcatggtcaatggccagacagacgagaagagccaagggaaggattggcatttgctggggtctgctgattcccaaagctctggaggaagctccaccaggaagtgacagatgacgctgctgctcacattttattggctaaggcaagtcacacgaccgcatcaaacttgaaggtagtggggaaatgcaaccctactaggtgcctgaaagacaactggaaatgtttggtgaacaggaaaaagccaccatatcacctgctggtgtggtttagggatagaatgagttcatgtacttcaggtactcaaaatggtgccaaaggcccagtaatctctgcatgggtattagctaggaacaccactgctgtttctcttatttggtttaaagatgaggaaacacagcatgagaggccgagtaatttgcccaagttactgcccaggggctacccagaggttgcccttctaactggcacactctaccagcccactccgagtcgcaggccatcctgagagccgaggctgggtcaggacagacacgatgtgccctcggtgactttgaggactcccattctactgggggaagagaagggaccctatcatctagtgagtgccacacagaggatcttacggaattctcacaacagccccaaggtagggattatcattcccatgggtgggatgggaaaactgaggctcagaaaggtaaagtgacttgccccaaaccaaaggctagttggaggtggagccagggttcacatcccgcctgtcgggctcactgttggtggggctccctgcacgcacccctgtgcctgtggaggaggcacagacagaggcacacaatggtgaacggcttcgtggacgctttccttacggacagaggggactcaagggtcaattccggaatgaacgagcccgctttctactcccaaagaggagccaggggtgtgtgtgtgtgtgtgagagagagagagagacagacagagagagaagagaggccccctcatgaatcatcaggcaggcttcagggaggaggtggtatttgccctggactttctagactggcgtacgtgaaaatagggaaggaagggtaggacttctgttcagggtgtttggaagagccagagtatgagctggacaggggtgagcaagagtgaggttggggtcagtcctgactacagcagcattaccaccaatgattgtacaggccaacattgggccgccatctacatcatattgtagaatggaatgtttatcatgacattccggcagatggcagcaaatatctggaggaactggggctggccatctctacccccacacctgctctcacccttctccctgttgctctgtgccctggaaggccagtgtctatgggatctctgttcttgggcagagaagccaaggggaagcaccggcaggaggcaggaggtggtggagagaggcttgagtatttattccttttttccctccctgttggcttggcagtggctgtgcttgtctgtcaaaatctccccagctgcagccctagtgggatttcataactgctttcttctgtggtccctttgggtctaagggcggtaacagctcccctctgttgctagggtatttcaccaccttttgctagtttttcttagccatgaccacaccttcataaataatgtcttcggtaaactctccaatcaccccttctgagtgagccatctgtgtccttccaaaccctgacaattcaagggctctttcataatttacacaacgatcttctttatgccagcagcagcttcagaaacctcctggcattctctaggcattctgtaggcatttggggagttgttctgagcaggtcaggaaataaccccaactccatctctcatggggtggctgaagcaagcaaaggtgcagagaacagggcagaggcagcacggtgagaacttttgccttttttcaacacttctggcactgaccaggatcctgatgaatatttgtcgtgctgagatccattgaattctgcgaggcggggcaggagaggcggggccttgggggaccagcaagggctgctccctgccctcacctgcaggatggtgtttttgcctcagtttccccccttagattgtgagtgctccaaggcaaggcttgatctctcaaatctctgtctcctccagcccagcctgttgggagagcactggaaagtagctggtgggtgacctgagctagttgagctggtttgagctgacctgcaaacttcctttctgtggacccctggtttccactggaaggttcacctgcccatatcagaaaaagcctgactttaaaggattttagaaaaccccattttattctttttcaaaacgtacggcaagtaatcaagaacattcctcctgagtccagtgctatttcctctccagttcactgcccctcaagccaaatcccaagtctgctttaatgaatatagaaaactcacttgtcattagttggacaaaagctaatggactggagtccttgaggacagtgggtctcttgagcaaattaaacactccccttgcaatcttgaagtcaatgttaaattgtttatcaaacccttcctttccaggtagcattaaggtgaaatttcccaagttctggccattaggtcagaaaattatattgagctggagacaggaagaaggagaggcaatttcaaaactgttttgttttgaagaggaaaaaggcgtattggttagggtctggggaggggtccataaatatacttcacctctgatgtcactctggccttcgctcatggcagacattgctaatcaatcatatgctcctaactgttaactcaaaactaaagctacttgcaaaccagggcctagggttgatgggtctccatgattttggtagtcattaaagaggatgcatcatggggcagggggataagcactgggctgggtatcagaaagcctggtcccagttctgctgtgtgatcttcctgtttgggtctggttccccttctgctcaaacggggaagacttccttgcctgccaccagaggcccttgcaaggacctgtcaagggcttggctagaggagcttgccagggctgcagaacactgccatggcagctgcacagtcacggttgttccaggcagtgcccttcagcacacacagaaatgagctcttccaggagtggagacagctcttcagccattttctcctcacagggctgttgatgtttgggccctgtgtgatgtacaaccacatggtggcctatgaggtgaagatgtgacttgggaggatctcttgggtccagggctcccagggcagtgtcagaaaagcagaattatgatgcacggaagggaggagatgggagccttgtcctagagattccctcagttgtctatttattcacccactcattcattcattcataaatgttttctgcagatgcctaagctgggctctgatgactcaccatccactcaaattggagctggccaacgccttttatggacctgcaccacctcatggttgagaggagtcccacaacagggcttggctttggaggcagatccagtattgactggctgtgtgtccttgggcaagccatttctccaagtcccggtttccccatctgggaagcaggggaaatagtccccttcagagggttcttgtagggggtcaaatgagatcaaacatgttaaaatgcctggcatacagcactcaaggatcgccagccaactgctggcttttggaccaatagcctcagcaaacgcttacagaaatggaattcagtgcaaatacccaaaagaggagctttcagaatgccggaaacattttcatatttgtgcaggaagaaaacaaatattatttgccctaaaactgtgaggagcatgctaaaggctcagaatgcggccgctgaaaattgaataactccacttgcagacggtgcatcaatttcattcaatttgtaagcacttgtccctgtagtcaggaggaaaaatgaattcagctcaatcaatcagcctgtttctgggtggtttgggggaagccaccccatctcacaggaggttcagtgtcacctggagcagagtgactggagcttcgttgtttttgtggcaaattggggatagtaggagcttcattgattaccttattctatctctgtactaccacatcagtacctgcaaggagcgactgtaagtaggtgtctcagcctcatgtttgggggtgtttagagagtgtcagtaaggcatgctatggctacttctgcggccacagctcagtgccaagggagtaacacatggggaggagaggggcgtgtccacccaggaagagcaaagagaagatggaagggaaccccaagaggcagccactgtctcacttggcttttccttcttgcctctgtctcacactacctaacctgaactgccccggggcatgcccttggccatggtcaagcacagaaatattatttatttgggcatggacgtcgctgtggaggaactcgagcactgggtctccaatacccaccttgtcattcctcttgaggcctctaagtaaaggtgttgaaaccagaaaccagggacttgaaaggaaaggacagcctaaacacagacaccactttgactgactttacctgtccctctctgatcttctttctcccttctctcccctctttaaacatgccagcccacctgaagttccactgggattctttaggttaggactttgcaccatgagctacgtttctataaacggaacgctcaagtacaatgtttgctactgaaggcatgaagaagtaccgacgtatcttcccagttcctggccactgagtgctatgtagcgatgggtaggtgagaacccttaaatgaggccaagacatgccagaatctagaggcacaattgacaacgggagaagcgggcactccagtggggccaccatttgcatttgtcctgccctgcctcctctataaaaggaaaataggaaagggggaaggaggaggacggtctcatgagagaatcccgtctttaggcgtttgtgttcagttcagaagacaagccgtgtgctcagccctgccagtacacacacactgcccacccccaccatggaacaagctctgattgtgttaaatgttgactattttcgtgccacagcccctcggggacagattctggcaaagatgatagatagagcttggagtgggaaagcagatgatgtttgaaagcacagtgcccggggagaaccagcctggggctcagagagaagagcacgttttgtttgtttttgtttgtttcagctggatcgcattcaaaggagacagagggaaggttgcaaaatgccctttttttgcccactatggaagctcgggctttgggcagctggtgtttagcgtcctatgctgttatgtcagaagcccccactctggatggatcagaccttatggggtctctggggacacagaaagaaatcagatgtagtccctgccctgagcgcctcagtctgaggggagacagagcatgcatagaccaggctgatgcagagtgactcacactgagacgcaggcgaggactaggggctgggaatggagggacggagcaactgatgtgttgtgtgtgtgtgtgtgtgtgtgtgtgtgtgtgtgcacgcgtgtgtgtgactgtcagaagatgaaaaggatcagggaggagggaattcctacatgtttgtgcctgggacctcatgcagaggaaagacaggaatgaaaactagaaaggaagcaggaactggttcacggtgggccttgagtgccagcctttaatcctgaggagacataaaatgaggaacccagtgagactggagttttctggggaaggatccctcgggatgggaaggagagcaacaagtacaagagggtagaacagtgtgagaggcaattccatccacttccgcccctgcctttggagttcagcgtgcctttgtaaaaaccatggttgcccaggagtgtttccagagggcagggaagtgcttcctgctaagcggagtggagtgagacccttttacactctgagcatagttgcccagtgggtaggctggggtgaggaggcagtgaggcagagaactaaggaggtagaaagaaaggaggcagtgtaataatgtagcgggtggagcacagactttaaaataggacaaacctggcttcaaatttcagctccacacctctgtaaccttcggcatggtatggaacacttctgtatcagtcaggataatctagcttatgccgcagtaacaaacagctctgaaatctaagtggcttaaaatgaccgagattgatctcttgctcatgctgcgtgttcattaaagatttgctggggactctattcattgtagtaactccagaacccaggtttatggaaacttcttgttactccttccgcaatgaccaaggcaatgtgaacagggcatggtaattcactcactgcccttaaagtgagctctttcacttccattcacattccactggtcaaagctagtctggccatgcacatcttctcagagtgtggaaaagtgagaattgaaatagttgtgaacaatctgtctcaactttcttatctgtaaaatgggaataaaactaccaacctcagatgagcattgtgaatctaatgagataatgcatgcagcagtctaggtgaaatatagtcacactcaaacaatgacagccaaaacaacaacaaaaagatgtgggcaaaaaggagaaaaaagtatagcatttgttgcttctgggatttctgagacagcaaggttgatttatctggaaaaagctgctgtgtctggaacagctgtatcgggagctgctgctttggaggtggccccgagatcgatccctgatgctcctggaactccttcctgctggtgaaagactttccctccatgagtctcagggctgagctgggggtgttcttgaaggcagcttccggcttcctctccaagactgtgcatttcaaacactaatctaatgcctttcctgctgccaccgcagtcccatggaaacagcatttccattccaagtttcagttcccattcatcaccgtgaagcgcgatacctgaggggaaacggtaactgagactttgtgagtctccaaagacgggaatgtgtctgcaggagctgagtaattagagcagttttctgcacacatgcctagtctttatttaagacatttcacttaggtacacgtctaagttattcaaaagtcacttagatttgagacatgtatatcattaatttctcgtctctattgtagaatagttcaataagcaccaataaccatgactgcaagtatttattgaggctaactatgtttcaggcaactgtactcagagccttgcttgaaataactcatttaattttataacaatgccttattgttttctgtacccaatttgagaaacttgcaggactcctaaggtgtttccatatgaaggagctttaagtaatctttaaggggaaaaatggaataaatggagaatagttagtctgtgagactaagaaaagagcggtaactaacattcacatagagctgagtatgttccaggcacttaggcatattagctcattaattgtctcaataactcaaaaggtaaacactatggtcaccattttatagttaaggtacctgaggtatagagagagtacataactccatcaatataataatagctagtgagtggcagaaccaggatttgaacccaaataagtaggttcttatccactatactatactgcctcttggggtctcacaatctcagcatcttaaaatactgaggggactgtcatgtggaagacttttcactaacgtctagatcaacacaaccaatattgatggtgtaattgatgatgtaattgatagtgtaagccacagaaaggcagattttgactctatctatggaaggacttccactcaattggcattactcaaagatcagaattccttgttgatagcaagctccttgccaccagaaatcctcaagaatgggcctgggtgaccactcccagcgaggtgtgggtgggattccctccctgggtttgaggctgatatagatgacctgtgttaccctttaacataatttcatgaccacaacaactgccatgactttggaatatggccaaacatttccaaactattaaaactgggagcaggtgacaaaactatgtggcaaatatgaaggcccaggatactttacctgagctcagtggtatcatcaagttcaactcataactaagtgatgctgacacgtggtcatgatgcaaataagtgttgttacctggatgatcaattaacctcagttcatgtcatcaattctaagtagtaaaattttcactaatcaagcctacatttttgtttttcttttctagctgtattaatttacctgaattttaaagcgaggctaaatgtggtagtttttctcgatgctatgtgggtgtttttcttcttggtgaagctgtagaaggatgggaagcaggggcatcacttactgggccagaagagccaggtgagagccaaggacctacgcggtgagaggtccatgcaggccaagggagaggagacgtgacaggagcatgagtcggatgagctggggtctggagggagcagacactggcagcagaaggtacagaaactgtacccaccccacaatggccccagatcctctggggccaaagtccagggcaagggctaaggaagcagtcagaggccaggaaacagggcaaaagcaggaagtacacaaggaagaggcttggcccctgcctcagtctctgggcatttgtctggctcccctggggcagaagacagttctagctgggtgggcctaagctctggatgcagggacaagaaattggtggtaattgatgagagcaaaaagacccagcacaggggtcccaggaggtcctggtagcaagtccaggccagtgttctcaggcaaacctcctgcggccccagctcctacccccacaggaggccacagggccgggattccagtcccagcactgcccctgactcagcaggtaaccttggcaacatcccttccttctctggcctcagtttctcatctctacagtgggagaattggtctagatatttcctaaggacctcctgatcgtgaaataaacacaacagaggcagctttcaaagatcttcttccccttctccttccaaagggctggcagggagtttaaaccaactttgagcctctctcttctctgcttaagaattgaagatttctatgaactggactttttgatttacagtcccaagtggtgtaggagggaataataagctctttagacttggaagctcctgcaagaaatgatggatgtcctcgagggaacgtacatccaggaaggtgtccccaaactcccagcaggaatcaatctccctgtcccctgaatgctcgacatctccctaatagcattttctacctcgtgttttgtgcagctgcttgtgtgtctcatatcccccaactaggtcacaagctccctgaggtcagcgaccgtgcaccttgggctctcgggcaagattcatggcatggctgctgaccggctggacagatgggacttctctgatttttaaccaagcattcttcctgaagatgaaagtgtcccacgtcatcttgttgggatgatgtaccaggatctgtgctgctttaaaaatgcacaaaatccctggtactttggagttgtttgcaagtagaaaaaaaaaattgatggagggtggagcccgatgctaagtggaagttggaatgagacccctggaagctttgttgcttgtatctgaggtcctgactctattgacactacagcacagacccctgaagactgggcctcccagaagcctgcttgccaccttcctagtattgcaggtcccccaagagctgggacctggtggcatcatatgctaaataagaaaaataatctttaacagcgagcttacttttttgcaaagcctgctaagccctttagccactggtcctcattacagccctatgatggcagaaactattgtcatccccaatacacagataaggaaactgaggtccaaaaccacacagccagggacacttttcctccaactcctcacacgggtcctcctcattcctgaggcctctctttgagcatcacttcctcgggctggcctttttcaccaccctcagtcaagaggcttttggcagcctcatcattctgtatcggaggtcatcaaacttgagcatgcacctgagccacctggagggcttgttacggcacaggttgttgccccactcaccctagagtttctgactcagtaagtcgggggtggaacctgagaacttgcatttctttagtttttaaattataatttgtgtgggtacataaaaggtgttcatattaatggggcatgtaggatattttgatacaggcacacaatgtgtaatagtcacatcagggtaaatgggtatctgtcacctcaagccccatcctgtgttgaaaacaatccaattatactctttcagttatttttaaatgtgcaattaaattattattgactatagtcactctgttgtgctttcaaatactagatcttatgcattctttctatttttgcttttgtacccagaacttgcacttctaacatgctcccagatgatgtcgaagctgttggtccggggaccacacttcaagaaccattgctcatagcactccactgatttcctttaaaacactaatcagagtctgtaattatttaatttattgatttgcttaattgattattgtctcttccaccagattgcacgtttcaggaggacaaggacagtacctatttcgttcagttcgctattgctagctcccagcacaggacctggctcataataggtactcaatgatatttcttgaatgaatgagcacagtggtggagctgagactaggcccaagccaagcctgcctgactgcagaatctgtgctccaaacacgactcaggactgtctccctggactttaaaacctccagcggagctgccccattaagagataaatggacaccaaatctctcattgtggccaaagtgagagttccgccacagtccagtcatgtatctcctggagaccaccctagagagaccaggtgagcagtatgtgaggtcctgtgagaggcaaggcctttgatttctggtgtccacatgtgccagggcagctaagagcccagggtgaagtgactcccgccctcccacatcatcagcccatctggttctgctggggctgtgcagacacagcccaggaggccccaggtacccaggtctgaccacggagaacaagctgatggcatctgatgcttggctacacgttcaggaaacatccttgcagatgtttcctcctgaagaggaaggcacaggagaagaaaaaggagaggaaggacaaaaaagaatataataaaagaaaattgcttgctgtgcctctttttggcaaactaaatgctcgttgaaattaagataagcttgacaggctttcgttagcagttttttggggcctgagacgatcttgccttgagagacttctattagaaccggctccacaactaataatgcggtctctgtcacttaactcaaaagtccctgctggactcgtacagtgaagcattaaggaaatgaaatcttttttctttttttcttttcttttctttttctttcttcttcttcttctttttttttttttaacatatacagcaaagtttgatttgttgagaacatttcttcaactgacaagttacaagccatgtctgagaggcccactgggaactttcaaaatttgagcagcagtttctaatcactgacgatgattagcattttagcgaatagatttttgataagaaaaatctttgctctgtgagaagaaaaaaaaaactctgacatttgataatgcaaacagagtagcaattttaattaggcctccaaccctccttggcatagcaaacattgcacaagatccagatgtttcccatcttgcaggatgtgaacttaaggctgcgtcaaggtcattggtaccaggtactatgccactgattgaatctccgaggcaaacaataataaccattatttcatgagcacttactatgtgccagatgttctgctatgtcacatgcattatctcaactgagcctcatctcagtcttaagagagctaccatttttatggttcccattttacagatgggaaaattaagctgagaatggtttgctaatccaaagttccccagcttgttggtggtggagacactaacccaggtctgtgtgtgactccagagtttccacattgaactttactgcctcccagatgccattcaaatggggacaggctgagtgaccggggaggagcattaagatctcaccctggctctgtcactgagtgtgcgacgaatcatgtgatctctcctggactcagcctccttgtctgtagactggggatactatcagacatttctccttcactagactcttgtggggctctggggaagggctaatggtgcttaggaggatgttatttcctctcatgaaaccagacctagacaccgtcttctttccgttgatcttagccccaccctttgcggctacccagaagaactctggttccttgccctgagatcttcaggaatttatgatcaactcttgagtcttctcaattttatattctccagatcaaacatctctgattccttcaaccagtctccatatgccatgacattgagtttcaacacctcctgtagcagagatctgtcatcagcacagtggggataataatggtcattgtgaagattaaatgaacaaatgtatgatgctctgagaacaaggtctggcatcccaatattcattctccccttttacttagtgatggagccatgatattatttggaacatcttgaggacattattgcctggctttccttgctgataggggctgacccatgaggtataatttacatacaatgaactgtttagatcttaagtctgtctcatcagttttcatgaaagtagattaaatcagaactttttcaggcaatcctcaccctcaccccaaaacaaccacgaatctaagttatattactacaggatacttttgcctattttagaataagtggaatcacatgttatacgcgttctgagtctggcttcttccctcatcatatttttgagattcatccatattgttgcctgtgtctgtctcgtgaggataccactggaagacaatactgtagcttacttagttattctcctgttcatagacatctaggttgtttccattctttaactattgtggatacaatttctacgacaattctcctaccagcctttttgtggacataggtttttatttctcaggtgaatacctagaaatgaaatttctgggtcatagggtagatatatgtttagcttttcaagaaattatgaaagtgttttcaaaagtggttataccatattacattccaaattgcactatatgtgagttacgatttttctacattctctccaacgtctcgtgttgtcagcttttatcatcttagccattctagacagtaagtagtgatctctcattgtcacttgcatcttcctgatgaccaatgatgctaagtgacttcttgtacacttattagccacttatatatatcttcttccgtaaaatgtctgctcaagtcttttgtctttttaaaaataaattctgctgcctgtctttattactgagttgtgggagtttatatattctgcatacaagtcttttgtcagataattgtggtgttaatattttctttcattctgtaacttcccgatttattttcttgatggtactttttaatgagcagaagttttggttttgatcaaattcattttctcaactttttccttttatcatttatgctgtctgtgtcttttctaaggaatctttgcttaccccaaggtcacagagatattctgttttcctttaagaactttatttttttcacttttacctttaggtctgtaattcagcttgaatttatttttgtgtgtggtgtgagatggggccaagattctttgttttcatatggatttccatttattccagcaccatctgccaaagacatttttctttcccatttaacagtgttggcttccttgttaaaaatcaagtgacaatatatgtgtggacctatgtctgaatcctccatcctgttccattgatttgtctatgctttcaccaaagccacactgttttgatggttatagctttatagtaagtcttgaaatctgatagcataagtctcctcattttgtaattaattttcaagattgttttggctattattggtcttttgcctttccaaataaattttaaaatcttttggactgggatgaaattggtatttaaatcaatttatggaaaatggatgctataataatattgtctttcaatcatgattttaaaatttaattgttaatttgcttaatttgtttatgtcttttaaattcctttcagcattgttttatagtttcagtgtagaaggttttcatcttttaagcttctccttaagcatttgatgtttttgaatgcttttatacatagtatttatttttaatataattttctaattgttcactcctaatgtacagaaatacaattgatttttatatttattttgtatatcgatttattctaaatgcatttattagctctagtaggttttttgggggtagattctttaggatctcctatgaacaatcatgtcatttgaaaacaaagacaactttaattcttcctttgtaatctatatgtcttttaatttattttgcttgtcttattgcaccaggtaggctttttctctttaatgcatctcaagacactcttgattttggtacaagtcagtctttgcacaggtctcaggtttttctccttcctaagaaagcacaatccatcagttgcaaaaatccattttccctaaaaagttggtgtttttccagatgtaaggacacactcaaggatttggctttaatttttcttcttggcatgggatgaacttcaacttgcatagagtttttagttctgtttgtgaagtattgccagtcctctgcatcttccgggcacagaagatttgcaattcctgggtgccttttgggtaagtgggcctgtatgattggttttggccaaaaagtaagccctgaaacaatacgtcacctctgcaccaaggaattgaactactgataatgcaagagtttccagaactctcttttcctctagcacatttacctatgatgtttgaggtgaaaactacttcctctgcctgggtctctgaatgagcacaacactcattcagcgtcacaaagaggggcagataacatgcctgtccggggaagccgagaacaagttgctttattactaggggagtgagaaaggccacttataagaggtagtgcttgggccaggcctggaaggacaggagggactctcacaggtgggtgttcttctgcctgggtctacaatgagcataacactcccctcagctcctgctgacccacaacagacatttggcttgaggtggaaataaaatgctgtcttaaggcactgagattttgggattatttgttacagcagcattacctagcctgatgtaacttatgtgaatttccaaaagagaggtggccaagcaaagcactaagtggaggcaatgtaagattacatattgttttcttctctggatgagacaaagggcatacacccccagagaaatcagtggtgagctaaggcccagaatcttatgcaggtcttccccattgcccagcacatagtagatattctaaaaaaaaaatgcttatattcagttaagccagagttctcctttcctcttgaggtctgtgtaagtagaagcacagtacttccctcattctctcctactatctcctccttgcctgcaaatgggaatgacaaaaacaacttgccctcgagaactgttgggagaaattgtgctgattacaaaacgctttgcaaaatgtaaaatcctatctaagtggcaattttctccattgctctgccaattgtaataaataaatattgttttttagaactggctcctggcttgctttcccgcggtcgtcccatcaaacactccaacacgcctggggttattgtccactctggatttgcatgtgtgtgcgcgcatggtgcttatgtaatgctatttactgaggagttgagtaagcctatcttgtagcagtaaaactcgagaacgaggacgatgtcataccccattggagaggtgatgggtcagaacaactcactcgggacaactgtactatttgctcccaagggcaggggggcttgtttcagtcatttctgcagccctagtatgcctggatttgggaatatcctttgtggttattaaaatttttcaattcttgacccagcttggattggggccctaggtttctggctcatgttatagccatgggtagagtccaggaactcctataaactgcacctgctgatggttaaattcatgtttgctgaccacttactatgactatatgtgaggtacaatgaaggatataaagatcactgacagtccctgaccccagcaagctgccatttagtacagggctgggggagactttcatttattcattcatatacctattcagtcattgactctaccagcagtgattccactaattttgactggtgtttcaggtgccactctagctacaaaacaaagtctcaggcttcagggagcatatgttctaataggaggatacaggcattaatcaaatacttttaatagtaataaatattttaccataaaatgcaataagtactgttgaaaaagagtttagagtgcagtgaccacaagaaatcaaggggaagagactttttcagggggaggcagctaaggaaggcttctctgggcaagtaacctttgagttgagacctaaaagataaaattaagaatcacccagtctggagacaggatggaggtagagagagcaagtcaggcaaaataaacaatacatttaatgcaagacagactacatgataagtcacaaagaggggcagataacatgcctgtcctaggaggcccagaacaagttgccttattactaggggagtgaggaaggctgcttataagaggtagtgcttgggccaggcctagaaggacaggagggactctcacaggtgggtgttccagaggaaggaggaggaacagcacaagcaaagacccagaggtaggaaagagaggatgaggaattcagggcagactgtgaagagcatagactgctaggctaaggagtctggacttttccccattggtagtagggagtaattggaggcttttgaataggagagtgatgtgatcagaacacttgaatgaaagagactcctttgtccctcttggaaacagtcttgtgcataacccaaaaacatctcagagcctctggccccccttgagcctaaagaggacttccagtggtctggaaatttcctctgcccacaagaagaaacaccaacaccctgagaagacagtgcaggagaggcaggaagggacacaggggcctgttactggggccttcttccccagtgatgaaagaatgtgtgtgtgtgagctctgtacccaaagtgtctcagaggagggggctgtgtatatgccaactattgtgtaaaataggcggacagaaggaaaggccttgtacttgttttggaacatctttcaggtacaaggggggaaaatcccaaatcaatctaaaaaatagaataaagagaattaattggcccatgaccctgggtacctccaggggatggcactggcttcagacatggctgaatctagggcctaaaccaagtgatcgggtttctctttctccctccatttcttgggtttgcttccatttgtatattgacctcattatttctcattgctattgagtttcctcagcgcaggtaaagaaaagagcccttgaaagctctagcctggcattgcagcaggaagaaggagtttctatgtgtgtaagtcccagggaagcactctgattggtcttgatggctcacatgcccatctcttggaccaatcactgttgtcagagggaagaggtactatgggtggccaggcttgtcctgagactgactggcagttctagccaaatcacagacagtgaaggagaacagagcgccagtggaagcaaatctgagctaacaaaaataacccaagagccttatggtccttttctcaggctgtccaccgtacaagaaatgatccatgggagagtgtttataaatcacagtcttcatcccagaaatctgggagcccaggtcatttcaagaaataataataataaatatataaaaatatattttaatgagcttttgaaaacagtcatggtcatttatttcatatgacaagattaattaaagctgaggaattctgttttcaatggggatccaattgctcccccatagggttttgacaccaaggggacagtggttctgctatgttgcgggaagatccctggtgggaactcatgtgacctgggctttggctctgggcctgcctctggctcactctgtgatcttgggcaactcctttcctctctctggacctcagttgacctatctttactgtgagaagggtgatgtctgctggtaggcctcatggactttgacccactcctacagtgctggctcttagttaattctctttgcaggagacattcattgtccccacgagccctggatgcccctacaaggaacaggtgagttctgtccccaccagctttcttctgaggactgctggagcatatcatttgtgctaaggttaggaataaactaaaattcagtgtttctggaagctcccggccctggccccactaacaggaacccacaaaaagggcgattaccagctatgatttctaagaagcagatgcatagggtcagagacctgggctggaaggtcctgagtggttcctgagccaagactcccatcctatgctagaggctcctccccgactccaggagagtgctcctccagtcgctgttgtaaaccgctgcccatgacactgggctcacttccatccttggactccttgacagtccaatttacctgtgacatttccctacaggtcccagtgcacagaaggggatcccaggcagaggggatattgtgtgccaaggccccagtgttgggggtgaaggagaggagagagagatagagagaggtcagagggagctaaaagctcagtggcaggagcaggaaaaaaataggcaagatctcaaaggctgaaaaggagcctgaattctgtgcctctgaagggagtcaggggagaagctttgccccttggaaggtcacccaggtgtggtgtggaggagaaccgtaagcccgaaggaggtgagagatgtctgcgctggggagttgataggggatagacaggtgggaaggctgaaaggtgggctgtgccccctttggtgacacattaggtacaggatatgctcaagttggagggtggggctgcaagtgctgctggctgggatggggagcccagggaggctctgggaaggagctatgttcacttgggcacctggggacatgggatgtgcagggagccttctggtggtttcaggtagtagaggtgggaggttcagaccaaccttccagattcatgccagggccaacacaggcctcagcaatgtcttaccggccctgggcctctgaaagaaagagtttaccccactctagtcggtgccaccatttctgagcaggcatcctgtttaaaacaggaatttcatgagcattttgggaggctgaggcaggcgggtcgcttgagcccaagagtttgaagaccagcctgggcaacatggtgaaacctcaactctaccaaaaacaaaaacaaaaacaaaaaaacattggccaggtgtggtggtgtgtgcctgtagtctcgggtactcaggggtggggaggctgagactggaggattgcttgagcccaggaagtcaaggctgcagtgagccaaaattatgcccctgcactccagcctcggtggagacagagcaaaatcctgtcaaaaaagaaagaaaaagaaagaagaaagagaaagaaggaaagaaagaaagaagaaagaaagaaagaaagaaagaaagaaagaaaagaaaagaaaaaagaaagaaaagaagagagggaggaagggagggaggaaggaaggaaggaaggaaaaacaaaagaaagaaagaaagagggaaggaaagaaggaagggagaaagaaagagaaggagagaggagggagggaggaaggaacccaaacaaacaaaaaacaaggacttcacttccattgtggatcttcctctgggaacgatctggatcatggggtcctggggggcagtaggacctgtggagtgtggccaactggggacctaggcagcccagagtcgtccctgactctctggggacagagagataccctgccagttcccttcctctgaggcagctccaggccatcttggagggtggggtttggaggctggaaagggagggtggctgaggtgccagcttcccttgtgcagtctgcccagtgggcagggctggccaccagcacgatctgtgagcatccattcctagtttactaaacattcctgatggaacatttctcacatgggcaaggggccacctgagagaatattagcacctacctctgcttggaaacagagacaagctccttgggtctgaatgaaaggaaatcagagttaaggccctttaaagggcttaggaactgccaagaggggggaaagaacagatctgaaggctgtaaaagtgagtttacataaaaagaaaaaaagatataaaattatcaggcaagcaaaacagtattttatttgtgaatgagaaagtgtaatgtggaccaggtatggtggctcacgcctgtaatcccagcacttcgggaggctgaggcgggagggttgcttgagtctggggagttcaaagtcagtctgggcaacacaagatctccctgtctctacgaaaggagaaaaggagagcacgtaggtcacggcctcccgcttccctttaggcttggggcaggggagggactggggtccccaccctggtctaggaggcccagccgaggaggccccccggggagggaggctggcccacagctggcaggcctgacgctctctggccttggccttgggccgcctcttccggaaaatgggacgaggggaggcaccaacaggaacggggtaatggggctgttgctggcagagggagtaggggggccgggctggtgacgacatggagcagggacgagggagctgctggaagctggtaattaataaatgaaatgccctgggactgccgccgagccgcctcagatgacatatctgtcgcgggctcggcaaaccattaaatgaccattttctgacagaacgacttccctgccgctgcgagctgccaggacttgccgggactcattttctcttcgcgccctcttttctcgtccattccccccaccgtgcctctggcccttcctggaccgccccctccagcggcaacgcctctgcccccactcctgggccacctgtcctgcgtgcctctctccagctgtctctcctcactctgtctctgtgtgtgcttctgcctctctgtctctgtgtgtgtctttgactgtctctccccgctccctgtgtctatctgggagtctcttccttctgccttcccagtctctcggtctctctgtctccgtctatctctgtgtgtctctgtctctctcctcccgctctcaccctggtgtctcttctctctttcctgggcctctgaccctctcttctcccaggctgccctctctctcccaccccctaggcctgggctctctctcttgctctctctctctctctgctctcccctcccccccaccagcctttctgtgtctggctcagcctccccctccccgcgtcccccctccccggctgcctgacggctccagttcatttctgcctgtttaattgggccccggatgagtttggtcgacagggccattcatcatgtggccgcggctggcggcggagcccgggggagcggggctgacagctccgccaggctgggatgcggcctgcgtcgggaagttcacatatttgggcattagtgcagctattagtttaacaagcttcgtttatccttgtcactaccacttcagcttcccatgtaatcatttgaaatgtagattacagccagacaaatgggacagcgcaggacgcgcagggtggagggagtgacacgcagcagctcgttagggccgccttcccagtcccatcccttcccaagcaaggctttgattagcttaatattcgcatgatttcagtgggaagctcctgtcacctatgccggtggaggtgcctggggtgcgtccaggtgagggttcaggtcctgccagggtggggtctagtggatccaaaggtcccccccagccctgcaaggaaacacgggggtggccagggcctgccccgggaatcccttctgaaggggtcttccttccaggacgaggtggctccagcccttggttatctcctttctcctctccctgatcccagtatgctgcctctctgtgtgacctgagcaagatctggccctttctgggccttgtgtccgcgtccggaaaatgggggttcagattcactcgtgtgggttcacttcccccattcggctggcgagctcaccataccttagttcctctgaaggagtcacctgcctcctgccggatttctatttcccacgctgtggaccaagggctcttttacaaatgtaaatctggctgtgtccaaaggccctctggccctgaaggtaaagacagaaccccttagtggggcttggggtggggcagggagggctgcagtcctccagtgcccccttcacagctttctctccccgacctctcctctgtgaatgcacttcagctccctggtccccgggcaggggggacagctgtcaaatgcccccgccccctactcctgatctggctctcctctaggggtttgtacctgctgtttcctctgccagaaacaccactgtccctgcgtcgctcccccagctccttttctcagacatctctttcccgtcctccggattctcagtttggttgttccttcctcttggcccctccacccagctcctctcctcctctgctgctcaaagccctgtgcctcccacagtagcacctaacccctgactgtaaactccatgaggacagcgcctgcctagcatggaaacggacccctggaagcctcccagccaaggcttgttaaaggaatagaggaagcgcgtgccacgtcatgctgcagaagcctcggccacgggggcagccgtgcatcgacatttctcccggagcatttgcacgactccccagctcctgtttccatccctgacaggcacacagccctgggaggatcaggctcctctgagtcagggcctctcgggagaaaatggtcggcccactcaaagagtttaagggaggagagtttaacgatgagacagcgtaccgtggtgcaaactggcagggcccaggaagccaccgtgggagggtgcagccccagcggggagctgcgaccaccctgaggcctgaaggacaaggggatggaatgttgttgccagaacccggaggaagaccgggagccgtggaagaggggctgcaagaggatgtaactcctgaaggcagccactgtcagaactggggtgaggcaaggagggagtggggataaattatccgcctctcactcccctctctccagtcttctgctgcctcccattggctggatccatcccaccagaagctagagggcaagggggtcggggtgaggtggtccgcagagatcaacctcctgagctgcagagcagggctgaagagagccatggagctggtggggttgggggcagatggaaaatacccagcacaccagtcccctcagagggaggccgtgacctcttcagaagagccacggaaaacatatctcaggaccaaatggagatgcgtctacagagggctctgatggtgtggacgcaatcaccactgccttttgtattcgtcccctcactgtcacatctccctgcccaacccagcggggcaagagcagtcctgcactccgagcttcttttttcacctctcctcctgctgaggagtttgtctctgtttccttcctgacaccttctgaataatgacaccagaccttgaaaccaacgagtcatgaatcaaagtggcttcttgctatcataaaagagatgttctaaaccccaaacataaagatcgttttatctttattaatagtttaatgcatctgagaaagctatttgacattttttacacctccaactctttccttcatgcattgctggtcagattacaccagggttcagccacttacatccacttaataactgactaaattctacactgaatttacattgagctacaagctgattctaggatacagatgaattttctagtgggaaaagaaaacccacccaacaccctgactccaaagttgtaaatctgttctaataatgaaaaaggaattagtcaatctattgggattgatgtcgtgtttaacgacacttggtgaggaggactctgccgcacagagtgaagggatgggcctcgatcaataattgggagtgagacattttcttcacctacataattaaaacaccacacgtggaaacacacatgtgaaagtaattgaaaacacatggaatttggggcatggagaacaatttgacccttcccaactgctggcaggcccggcacacgtgcgtgcatgacattgtgaagagagaggcttggtcattgatgacatctgaattagaataacacctaattggctgatttttctattgtagacacacacacacacacacacacacacacacacacacaaacaccaccaccatcacatcacaaacatgtatccaatacatagcactatacttaacatgttcatgtccacacactgtagcccagtgccccctacacaaacatgtaaccccacagcctgcacacacactttcacgtgttttctcaataagagaggcacacgcacgggcccatatgatgctcacacatactttcaagcaagacttagtgggaaaaagggaaaaatgtgttctctgcctctccccaacttcccagaaagaaaaaaaaaatcataactgtcagaaatgtgataggactgtcaaagacatatggaagaaacccaaacaaaccatggaagttgtgaaacataaatcccaattctatttgttctacgacagtgtataaaccacacatttttcatcaagatagaaaattaaaaccctcgccaggctcagcattgctggggaagttggatagaaaccctagtgtcctggcagaaggagaagcagctgctggctggcctgggactgaaagatgcttctgaaccgtggactggaccacagagtttagctgcctccctgtctctacattttagtactgctgtgattgtgtccacacacccacaactgtgattagccaaacatcccatgggcatattccctattttgaaagtcccttgataaagcataggttcagcttctggcgagctcccgagcagccttaatgtccacgtggctcctgaactgtgtcttctactctcccaagcccatagcttggagttctttttccccactgaagctcacctgattcacttcagacctccaagtagcctggcagcccctccagagccttacttaattctgatgggcttaactcctttctcacaagaaattctccctaataactaccaaatattaattaaaaccagttaattccagtccctagagaattagataatgctactgttttctattcagagaagagtctattttcccctacttttggcttttctttccctaagccagtgtgttaatcatgaggaaatgtcccaagacttcttgaaaaattctgtgtttttagtggatttcctggggaatgtctccaaagccatttgaagactaaacaataacatcttttggtttattctcattcagacatcattcttcctcaaagcctcgcggatcagggaggcagacttctctttgcagaagccacactccttcctccatagtttggaccttatgaacccgcaagttaccatttttaatagttcccctttggaaaacttctgttgacaggcagtctgctgtattttactttctgcctagtctttgggtagatgctagtgttcactgagacctagctctttggctcagcagaataatgtgcctgggggcttcagacggccctttgagggatgagggtcaccacagggaaggccagctccaaggggcccttggtgtctttgaactctcgcctttgactttcaggcttcataatgaatgcttggtcccttgactatgagtcatttagaaccacacactcattgagattttgagatggaaggactggaagtcatgtggttcaaactcatatctccggccccgttgctcagatggaaagactgagtcctgggtgagggccttctgatataggtatgagagtaaacaagcaaggtgataatagttctctctagggctcgaggccggtggtcttagctggtcccttgtgagtttttgaagcagatctgggtcctctgttatctccacacaagtccctccttctgccatctccctttaattcaacaaatatttattcgataacaattggttgaataaatgaagaaatgtgtctctactctgaccaactgggcaatggagatagaacagaaactgctactcacaatccaatatccagtctctccttttcccggaataacagaatttgtagctggacaaacagggccgctcagagtagagatccccttccccagccttccttgctgacagatgtggccttagtatgtgcttctggtccatgacatacatgcagaagtgccaggtgccagcctcctggaaccttactcagagacagcaggttctctttcctttgtctcctctgtcttgctgtctggaattctgatgctgccatcttgggccttggggctgagggacacagcctcaggagggccacagatgactgagtctggtccgtgtgggcctcctcggccaagttgctgtatcagccatggatcgctggcctccagactctgaatgtgagagaagacaatctgtcctgttttagccactgctgttctggatttttcagtcgttcatagctgatctaattctgactactacaggcagtaaaataaatatttaacatggatttgaaaaaaaatactattctttctagctttgccaagaaaaagttggacttcctcaaaatgaaattttacaaagaaacgagactctgagaatattttaaatgaagagatatgtgtatatacacacatacccgcaatatctctatgtatatgcatatataacatatgcataaattatctctggaagaatacacagcgactagagtcatggagaagagacctgggagcctcggggttggagtggaagtgagacccactgcctactttttttgttctgtttgaattttgttttttttgagacagagtctctcactgtcgcccaggctggagtgcagtggtgtgatctcggctcactgcaacctccacctcctgggttcaagcgattctcctgcctcagcctcctgagtagctgggattacaggtgcccaccaccacacctggctaatttttttgatttttagtggagatggggttccactacattggccaggctggtcttgacgtcctgaccttgtgatctgcccgcactgacctcccaaagtgctgggattacagacgtgaaccaccgcacccggcccctgtttgaattttttaactgggtgtgtgtgtatgatctttttttaaaaacaccaaagtttaataccaaaatgaaaacccactgtacacatagaggcccccagtccagtctctatcagatgagactttttggtgttgccaagtaaacatccagttccggcttgggcttcttagcgacagggtgctcacctcctccccagacagcttgatctgaacccatttcctcatctggggaacatacagacgctccttgcaggacggtggcaaaagcacatcctacctgctcaggaaaggtgctggttaccagtgacacaccactgttcccgtgcggtgcactagagcctgtcattcccaccagacccacagtgtctacctcctgagatactgctcatagactcacagatctgctgtacggctatggatttgctcccccgccccaccacatggggcactccctgagggcagggaccatgcctgttcctctttgtccctggggtccctgtgcctatccgagaccctggcatggaacagatatccaggagtgtttactgtctgaaagaaggagaagacagccagcaattcattctaaaatgcagatgttgacagcagtttcaagtcatcccagttgatccatgatttttactggaattttagtttttcctggattcgacttccagccgcatcagagctgcctaggtgagacgcagcaggagaagagccctggagactctgcctggaggtgtcaccagccggtgcctttcttgtgaagggtaagaaaatgccctcccatctccactgagccttcactacctgctgcagggcccaggtgctgggagtttgtgggctgaatgggcagcagcgactcttggggaccctccacctggggtcacacacagcctggcttcaagtcttggccacggcttaccagctgtgtgacctggggtgagatagctgggcttttcagcctgagtctctccacccataaaagtgaggatggtaataattgtcaggacctcatagtgttattgtaaggagtaagtgagagcctgcatgtgaagtccattttataaaggggtcttaattctttggcgtgtaaatatgacatgagttaattcccccctcccccccccacccccagctgtgctacatggaactatcctccttctcgcatttctggtagggtggtggcacctttattgacatcttggtcagattccagaacattcgaataactttcagttattagaacagtttcgttttggtatttaacattctgtcctgttctttttgaaatttcaatctcaaacataatccgacgccggagttctctgccatcacccggggccgaccggcccctgctgtggctctggcagcctgtggagaaactacattggttttctgctgctccataacaagttaccagaaacccagtggctgaagataacatgcgttgattatttcagcttctgtggggtaggagttggggtgtgacttatctgggtcctctccctggggtcttacaaggctgcatcaaggtgccagctggggctgtcatctcacttaaggctagggtcctcttccacattccctgggtgttgacagaacttgggtccttgcggttagacagccgaagccctcagctcctagggggctgcccaccaatccctgctgggtggtcctctccacagcctgaccctctgcttcttcaaggccaaagggaaggcatctgtttctctgactgctagaccttcttttaaagagatcacctgattaggtcaggcccactcaggatcgtttcccttttgactgacttaaactcagctgactgggggctgtcatgatgtctgtaggatgtgttgtctttattctcatttggtaatcccatgtgcctcccctctttgacccctgcaggcaggtcctggatggtgggagacgtggctctgttccttctgttccttctcccaaccctcatcaaagaccatccaccgcacagcttccagatgttcccgctccagggagagggttttggggtggggttcccactgggcagtgggagggtggctctcatcaatggtgtcccacagctcacaaggcacatgcatatctttacccattctcctttcccctgtttcaggaaatgtaagggcaggttaccaaatctgttggccaagcagatgcccatacagaaggtgaaatctcaggctcccctttttgaaggtacctccaaacttcccagggagtctcttaaagccattgacccctggctttgggcagaggaaacagcagccctgcccactagcctctctcctgaatctgcatcttcctcaagctgactgtctcttcctctctcagtctttacttatgtggtgatggtggtggtggggtgagtagggggtgttattgagtggtcaagttcattctctgaattgtcacctccccaccctgcaggaggtgactggagccaactattggaggatctgtgaaattacagttttcagctttggccttggctgtgcaattctgggacaatgggaaaattttcactaagcatcagtgcctggcagatagttatagttagtgctcagtaaatgctaactgacattcttgctcacaactcaacccaaatagtcctatgtttagaagcaaggcagaagatcagagtagaccaagagcagggctgaggacgacaagccctgggactcccttcagttcttccaggccaggaatgtgcttgttctccaagcccgggttcagcgtgagttcacgcgagagcaggacaaaggtgaggagcagggggctgagctgggtcaggcacatgcatgccattgttttgcatcaacttattctgccttccactgccccagagttggtagaaaagaactgagcaaagctggggttgaaattctggaattcatgagtgtcatgaaaatactgcttggctagctgtcccacagacccatgtcctcttcttcctcagcacagaactagactgcatttctcagcctccttgcagttgggtagggccacaggactgggttctggtcactagaatgtgaatggaaatgatatctaccacttcagccctgcccatgaacactctccagtggctgatcctccgtgctctccttttttgcaggcctgatgcagacaaacgaggtaaacttggaagccataaggttgaagacggcggagctaaaacaagaaaggaggctggatccctgagtcaccttgtggaaggctgcctgcctaccaggaatgctacatttaacatggggtatgacttatgtgggtcctctccttgggtctcacaaggctgacatgtgagtgagaaacagatttttattgtgttaagacattgaaggtatgggatatgtttcttacatcagttgatatcgccttaaccaatataccagtttgcactgtgaatgagaaaatgagtctgcatccacaatgtccatgctttaagagcttctaggagttttaggagtttatttgccatgctctataaagtctgcacaatgttttaattccacttcacagaaaggttttctttccaaaccctcttcaggggccttccctattaaaaaagcccatttatagaaactactacttagcatttttggaacttgttatcctattcagcagagtctaagtcaggaggctttgaactcggacaattactgctcttgattaacaacaagaactgatgagttggcctttctagtgtgctaagcaaactcagccaagcagaaaatatcactgaaggggaaacaacgggaagtgattttcttggttgcattatgcgccgtcgcgatatttacacatgtttgtggataatgtgggaacctctgctgcttgcatgcccttccagatgacaccactgggcttgaaacgccatgtttcccacctgacctgggctgtaaatgtcatcctgtgactgcaggcagccagccccagggaaaaaccacagcactgggagtggtcaggccccttgcaggatccccactccaaccctttcaagttctagcccctccaggtaccctggggccagcacctaggcctagagatttgtttgtttgtttgttttttagagatagggtcttgctatgttgccctggctgatctgaaactctgggcctcaagcagtccactcaccttagcctcctgagtagctgggatcacaggcatgaaccacccaacccagctggggttagagagtaacagcagccttggcctcatattgtaagacagctcagtggccggatagatgggtgttcatttcttctcgccctcgccagcactaggtgtttttaaaaaatgatttttgtgaagtcaaatagtgttttcagtgtcggattgaacattgtgctcatttatgagtgttctgtggatacctttacccatgtctctattgagggtggtaggatttttcataaaattgcatgcacatttttcatgtattaaaggcattatgccttttcacattctttagatttttccaacttctttatctttgtattttgttaaatgtttttggatacataaaactaaaaaaagaaaatcataagattaaatatttcaatcttgtcctttgagacttttccatctttttaagcttataaagtcatatttcatatggaagtttgaaatatattcatctataaccccattcattctatttaaaactttttaaagaaactcttggctccactaggaatttttttggatggaaggtatgaggtaaggatcttcctgggggccacatttgggagttcagatctgaggggcagaagcctctggctttggacaaacaggggcaggtgtcactggggttaggggtggcatagcacgggcagaggtagtgttgatgggtgaagagcaggtcccagctgggactgctctcaggatctgggggtctccttcttctcaaatggtgtcatggactaaattgtgtcacccccacatttatatgttgaagtcctaaccctcagtaccttagaatgtgactgtatttggagactgggtctttgagaggtaatgaagttaaaatgaggtctttagggtgggccctaatccagggtgactgatgcctgtgtaagaagagattaggacacagacgcatccagagggaaggaggtgtgaagacacagagagaaggctgagaagtaaccaaccctgcctgacaccttcatcttggacttccagccccagaatttcgagaaaataaattgtttcggccacccagtgtgtgttcctgtgctctgtaccctaacagactcacacaggcaggttctttgctaaacgtcctcagagctggtctgtagtggagcttgcagaggcccccatcacgatctgctgggaagaccaagcaaggagagcaacgtcaacttttaaaaattatcttcaaattgtgtgtaatgcacgtgcactgaagaaaaatcaggacatgtagataaataaatcactaagatcacctggggtgctaaaggcctcagtggtctaaaatcatagcagctgtgtctcctgcagagcgtgcttcctagtgatggcctcctcctgtggggctttgcaggccatgcgtccctcccagagacagctattgaggcagtgtgctgaggaggccacagcagtgctcagtcggccagaagggtccccttccccacatcaccacacagctggccaagaggctccacagctattggatctgcggggctggaaatccatctgctcccacccccatctgaaacacgctccccttcgctgcctcctaaggaagatgtcagcctctgcttgcatttgccacctcctctcctccttgaggaaccccatctgctaggaaatgacatgagcctaggctagccctcaccttgatccagaacccaagctaccccttacctttgacctggtggcacccacagagcctcagaaggtaggcttggggaaaaggccacagtgcctggttaactcagaggtaaatggttcagtatctcctcccaacacacccattttcccatctgtggggctttgttcacactgttacctgtgcctggaatgccttcccttcctgccctctctaaaatttcctgttaagattctgcccacccttcacagctcagctcaaaagccatctcttccaggaagccttctctggctacccctcccacaactgaaaggaacccctcctgagaccacacctccttgcctcctccagctgtaggtgatactggccatgtgatgcctagaattaaaatacacacatcacctgcccccagagagcaggctcctggttggttcatttctgcattctatcctcctcctgcacccagcacagaggaggttctgactagaatttgaccttgaggtgtaaaattttgacttccttacagtggagaagacatcctgggaaaactcccatttgtcatttggaaaaacttttacacaatgcataacacttgtttctcataacactcttgaggtaagtattatcaggtttatacccattacacagctgaagaaatcaaggcttctagaagttaagagactgcttatatcagcaaactgaccatcaaaacctagagctgagactcccaggcatggcttgcaggaggcttgatctttctgccctgcagcagtctcactcccccaggggtttcttccgtccccagcacccagcatggggcttggctccctggggagttcgaggaacacctcccatggcagatctcactcttctgtctctgctcctctttcactgtccctgagtgcggaggggctgctggaggctgcctgaggctgtcagggttggtacttccacctccatacctggaggccttgcccactgcctccattctgctgtcacgtgggggctgcacatgccctgcttactgcagagactggtgccctgtttctggggagggcaggtctgaggcttctgtccccagaaaaccaaggatagagccacagtgtcaggaaacgaagcagctgccctgcctcaccagttcataggtttggggtccgatttcagttaaaaaaacatgcctacttctctttgaagtttgtgctgtaagtcaggagcactgagaagggaggagccaggccagcactctgccatggctcaccctctctccctcaggaatcaccttcgccaccatccattgcagaaatgaatggaggccgtgcagctgctttattaaatatgaatgagttgctgtccacggcccccacgcggtcactcgcccactccatctctggcaattactgagttgcacactgtgccaacgggcgcagcggtccctgcctgcccttgcacactctgacatcgcccggcaggggcagagctcaagtctgcagctgccctacccgctgatgaaaagccacctctgggctcctttgcacctgaaattttcagttccaaaggcttaaggacaggacagaaggattgtggactcttgctctccgaggtctgactggatatggcctgtggctttggggcccagaggcgaggtctcctggtgtgaatggcttctgagttctgtctggatccaggcattttaggttccaggaggctcgacaggatcaaagtgaaaagcacatatgggatgggggcggtggctcatgcctgtaattccagcactttgggggtgctgacgcaggaggaaggcttaaggccaggagtttgaaatcagcctgggcaacatagtgagagcctgtttctacaaaaagttttaaaaaattagctgataatatgttagtttgtaagtagggaaaaattattttaaaaactagctgggcttggtggtgaacgcctgtagtcctagctacttgagaggctgaggcaagagggtggcttgaacccaggaattcaaggttgcagtgagctatgattgtgccactgatagcagagtcctggttggccctgttcacttctgtgtccccagtgctggggacagaatagatgctcaatcagtgtgtgctgaatgaatgaattaggtgggaattaccatttgggaactgaagaagtagacattaaatcacagctaggagtcaaatccagagtggtggctcacccatgactcaacctgccaagcctggggacatctcaagggtggattctgtgcctgctgtcccctgcccagggcacagcccaattctgcaacatgggtttgttttgacaaaacaatcaaatccatgcatgactacggtacagtcaaagttgtcaaaggtcatcctcaaactagtaaaaacaaacaagatcaaattctttttctgaacttaaaaaattacttttattttaggaaccaataaaattatggcaaatatttacaaataattatctcacataaaggttacataaaatcaattcttcacaagtaacagccactcatgaaaagacacacagatattgaaactacgccaatcttattgcatgtttctccaactaatctaaaataaaggtgttgcagtcaaccatttaacttaaaaggaagccacaaatttcaggtttgacaaggaaaaaaaagtaaaaaaaaaattaaaccaaaaccccacccctgttttctcccaagtcccacccctagccctgccctcctccccaaaaaagaaaaatatgtccaacatctttggcaaattggcactgctgtaattacattcaaatattattacacacaaaagcaacacacgtcactaagaaaaaaaccaccaatatttcaagtcagttattttctactagaaaaaaagaatacaaaacatacacattttttaagaagcatttttttttttcaatccgttggagacagatcatctcccactttcaaaggcaattcaattgtggtttttgttgttggtttttttgtatttttttgtatttttttttttttacaagtaagcgtctatgcaggcatcacaaactttggcggatacagtagatatgtatttctttgatgctgaaaggtcagtccctaagacaaaatcaaatgtctcaaagaattaaaagcaaaatgcatgtgtcttcctggcaaaggtttccatttgcaatgtaatctgcatttctacaaatactcaatgtccaaggccactagagggtgaaaaaccagggcagcgtcttccagcaggagtcagggcaaacccagagccaaaactccatcctcagcccaaccttggaggcccagcagctggggctgagaagtggggcccaggcaacgccaggccctcactgcccgccaccctctgttgtgctgggtgcttggggccaggggatgggcctgcctcttcctgagccccgggacaggctgctgccgggtctgctcaccttctctgacccaagtcgaagacagcaggcaagaattggcatggggagactcagtgctgtttctgagtttcaagtatgtctgaggtgtaggggagtgagtgagtgtgtgtgtgtgtgtgtgtgtgtgtgtgtgtgtgtttacatgctcgtgcaccttatggaggggaaggccagattctgaggctctgaactttttgcagtgtttaaaatagactcaggatttatttattttctttttagctttatagcaattaattggctattgattggttggaatgttcaactctccatttcctcaaatacaataaaatagtttcattaaaatgtattcatgcttgaaaagaagggcgccattaaatggtttcctttctgttccactccaagggaaatgcgccgtttgtaaatcaaaaatccatcatccaaaatcacttgttcttaatgatgcttttggagaagatgagggacgtggccacaggcatggtgattttggggacaagggcgaccagcggccatagccacagggtcacagggtggggggcgggggtcagggcaggtgaggctggtgtggcctcctcctgccaggcctcagagtcggggaggagatgcacgactgccaagtcacccccaccctgctgtttcacctgcttccctccctgggccccgatcagccaccggaagctgatgggtgggtgggtttgtgcctctgtctctcctgccacaggccaagtaccctacctgagacgactcctttgaggctttgctgattgtccctcagtagatattaataggtaagcagctgcattttctccttgtgttgctcaggggtctaagatgtgggaacaagaatttctgggctttctgaatggtggctacgtttacccatcttggagatgagctaaaggggaccccttggattgaaactctagaatggcagtgacatgattctgaggttcccttcaatcctggggtgcccaggaacggagcctcagtgctgaggaattaccagaaaaggaaagacaggctggtgcctgcctgctcctggccggcagctcatttcagagaagctgttgcctcatcaggggagcaggcaggcaaggggctcacagcctggcctctgcagaggcccttgggacctggcgccacacgaggtgcagccgagctgacagtggggaagtacacatcagcactgtggttcccccatgaatatgcaagagggaaccctgaggtttggggcaacaggggcaaggggctgaaggggctgctgggaggtggggcacgccgtgggctaggagtcgtggcctgactgtccaactttccaataatgcattttattaccttttaagaaatgtacttgcctcggacctctccgaggccaaaagaacgaaagaaatagtttccccaggagagctggtgtgtggctgggaaccatcagagcagcctctcgatgggtgacaaggccaagactgcagaactggcctcgtagtggggccaccgtggagccggtctagctcagagccctgtgggatccacccatgcctgcctgggcctggcctggccgtggggcaggagttggtttccaccctcccgggaagctgtatcttagactcccctcctgggaagctgtatttcagactcatcgtgtttctagggctgtgtcagggtgcttggttggtttttaagatttgcttccctggcttggagctcaattctggctgaatgtcatgaggagggggtggctggagccactggctgccaaggctgggcagtcgttctggagcgtgacttctggtaaatggatttcacccctcagtgccctgtggccacatctgagtctcttccctgcacatgtgaaaggtgcccaagcagcactgacctcccctgaaaacccagcagctccccaatcccgtccccagcgcctctgaccttccacccaactccatcttcaaagcgcaagacttgcaagagcccaagatgaggcctgggagagtggcaggctctgggcgtgcccgtttctacccctgccttgctggacaccctgaagcacatctctcacctctctgggctcccatctcctccaaatctgcaacaaaggacaggaggtgaatgagaaagggggcaattgacaggcattggggctcacaggctggtgcccagtgggtcaagtttggcccatggacatttttctttaggccgacagaaaattttacaagttttcatacttgaatgccactcaggggggcaggcacacttctgggcatctcgggcactgctgcaccgtactgtctggtgcgctgcccgagtggcaaggctacaccaccccgttcacccaggaagcagttcattcaggggacttgagattgtgatctgtgtttccaggggctgtggacaccctggtggccctggcttgggcactcctgcatactgtcacagccaggcctggagcctgttccaaagtgcgaaggcaaagaaagggaagtgggggacagcacatgaccttggcacctggacccctggagtcagggctggacccatgtccaggcctggtcagggattatggcatggccttgaattgactctgataccctctgaacctcagggacagctgggaaagagtctggatgaaacctcagaagcactgttgtggatttggtcaaagactccgcaggtttcaatgttcttaggaaacaaagccgccaacctgcaggcccctaggtcaggccagcctctgggtccctgttctttcttgcctgattgtgggtctgggggatttctagggaatgggggtgggggagtgtctttaagccatacactcccatgacaggagcacaactcggtggagagagaatggggcctggagatctgagaattcacttcgcctctatgttgccgtgagagccccaaatgtcaatttccccgtctataaagtaggcatcatgctctttgctccacagagtggttgaggattgcaaagcaccgtacaatgtcagttatggaagggctagccttaactaaggtgccttgggaaagggatgttgggtttgatatatcatccaatttttctaggttggagctagactgatggtatgagaaattttcataaaatccacaatgtccttttccaaaagtcagagctcgaacacagggaagaaggcccatggagaaatgccccaggccttctgccacgatgctggtgaggccccggacttgtgttttccattcagaattctctggcatctactcaacggcttgtgtcctttggagccatcctcaccaagctcccaggcagctccgctggaccacgaggtgctgtgaattggtgagagcgggcgtgtgtgtgtgagaacatccgtgtgcatccatgtgcgcttgtgcttccgcctggcagcccaggagtcaagtggttgtctcacaaatacaaaaccaatctgaggaccagcaaagcctcaggtgagggaggaaaggtatggggggagctcattacagggcaagaagaggaacaggatggggagagggggccgctgtgagccaggtgggctttgccgaggaaggatgctgcatgcctcaggcagctggttcaggggaggctgacctcctcccaacagcctggaaccacaaggagggcaggatccaaagatgtgggtacacatcattccaaaagaagggtgacagggggcagaggctcaagaagtctgtgctgaagacccctgaccccaccacttcctgctaaatggagggaggcagggagagagatgccaggtaacataccttctcctaccttacctgacaggtggaagctgcagccagctcaccctggctcctggaggtggactctggccccaactacctcccttctttgccccgcaggttctgggtgggggcgggggtgcatgtgcctgctgtgagctcgctgggctccatccctggcctgggtgaccaggcttccttggcagttcttacagactgattgtctagggcatggggcccagaaccatctctcactgctcttactgtcaactctcctcaggaataggagatgtggatagaccagggtgacagggaacaccatgggttgggggtcaggagcccgagtcccagccccacccccaccagtcactgcttgaggactccaccttgctgagccttagttttctcttctgttccaccaccctgtgggggacttagggaacaaaatacttagcggtggccagaggaagtctgctttttctccctgcatggtcctggccttccccaagctgggcctcagtttcccacaagggaagttgggctaggtctttttccaggctcttctgattcccgcccctccgagtgttcttgtttcccacttggtccaaatattattgggcctcaggtgcccacccccatctgcttgcttggaagtggagggcctgccccagatgatcctctcacagccccggctccctggagagaggaggggaaggaaagagctgtggggtggccctacagatgaccctgctgcaccaaggcagccaaggctcaaagaggtgcagggttttgtctgaggtcccacagcaaagacatgtggccaggaccaggacaagacctgcctggcctgctgatcccaagtccagtctctctctgccctggctctctgccatcctggtgacatacagatatgggggacattgtcacctaagaaggccaagccccctctcatcactgtcattcagcccaggtttggacaagggctctacctggctgttctgacttgacaagagagactatgcaaggaattaaggccccaggtaaagagatgatggcacctggcacccccatgtcaaaatcactcccaggtcacacagcagctcctcactgctctcctgcccctccctcaggaggccttcctctgtcccccagatcttccctgctggcttcctctgaccaccctagcccacagtgagttctccaagctccctctccaagttcccgtggcccttggccgtggccctgaccatcgcggccccttagatcaacaggtgggcatgcattgtgcgaaattaggcatctgccccagccccagcacctccatgcccagctgcctgctaagctccacgaggacggggagggtctgccccgagaggatgctcagaagttctggctgtaggctgtttgtgatctgggtgtgggggaaagtcctctgtgttaattattgtctacatcaccggaacaggcttgcccagaatccacttgctggggtcctggagggtgggtgaagtgtccatggcaggtgtccgaagtgacctgaacctgggcatgcctcagaaaacaccgttccaggggctgagggagtagggagagcctcaggcccctccttggctgggatcagatgatctcctgcgtcccatccagccctcacattcaaagtccacaatgtaatcaatacctcggatgacattctgcttcggaaaagtagctgaggaatctcccagacagttttctttgagttctttgatctggaaaagagctgctgatactgcatcggtcccagagaaatggaggcaggaaaccaggacatctccccaaagtgtgctcctcttggagaggggcctcagggggagcctgcagcacaaccagcccagtgagactcctcgtaaagatactaaagaaggagggatgagcaggaggctggggcccaagggcagcatcctccatcttgaggacagctctgagcgcacctgccagggtcacccagggcagagaggatgctctgccataggtctaagatgtccggtgatgcaccaagagtgcgagatgcatcatgggtggagcagtcttctcagtcggaccttcaggcccacagaaaagcaagaaggtatttacatgggtgctgctgaagcaacaaaagcaagctctccttcccaggctggggtggttatgatggatggatagtcagacagctggaggacaggcaggctgggctggggctgcggttatttgcaggacagtctattggtttgcagagacccagtggccatcgggagaagctcatagattggcttttagaaatagacaagcatccagaagtccaacggccccaccaaagggccccagagtccctggaggaagagaggaagaggggagcttcaggcaagtgggggatgctgggggacggtctcatgggctctctggctatcttcaggagggctgggtggctgtcaccctcaataggtgccatcagtgtttggtgcccgcctggctccaagggtcagtgacggtcataggcagtggcggctgcaggtggggcggctcctcgggcggcagcgctataatagtagggggagcctggaagagacgggagagagcaccgaggtcagatccggggtcccctttccaccagtctcctccacttctgtcctttcctcccctcactcagtccgggccaccatcctctctcaccaagatctctgtcccagtctgttccccagatggcaagtcccatcagggccacaacctgctcataagatttcgaggctcttcgccatctagagctggggtccggagcctggggcccttgggtccaatcctcccagctgcccgttttagtgaataacattttactggaacacagtcttgcctatgaatgcaggcattgcccattactgctttactgctattacgacagagttggatagttgcaacagagacactgtggcctgcaaagcctaaaatatttactctctggctctttatagaaatcatttgccaacccctgacctagaagataaaaacatgaaaagcattccctttgtttggcctgcaggtgctctgtgagctatccccagccagcatctctgaattcatttccctcagggaaggcccctcctgcccacactcatatatcatgcttaagctggatgaaactccttgcagctgtctcatacatacacaatgcgaacagatgagcacatcctctgtgcctggccctgctagggcctgtgcatgtattatctcatttaaacctatggggtaggcacagtttagctcatgctagcatactctcctgcctctgtgcctttccccacaatgtgcttcctgcctggaactcttggcctgcaccctcaccccttttcccatctgttaaacttctatgcctctttcaaatctcagagccctgtctcctcctctgggaagccccctgccctgagctcacactcccctgtagtctgtccctatgctatgggaaagacttctttctgcacttcccccatccccagatggagagcccccaaaaggcagaagctgggttctgctcttcctgggagtctgtccccagttccagcctggagccatatgtggcacctgcttagctggattggacatgtaaatgaaccaactttgctgagtgagcaaacaatagcgaagacaccccctgcccattcattcattaactcattcattcaccactcatttcctgaccctgctgggggcagggctgggcaataatggggcaaacgccagcctgacacaggttaatattcagagcaggaaggggatccaaggtcagaaagaagctctggagagtgcaagatggttctagcaagttggcttttggattagggagagtcgacctgtaccataactgggggctgagtcctggagtctgccagagtaggggtgacactttgggatgcaccacctctcctcctcattcagccctgatgagccgatgtgctgctccctccccatcaccccaaggaggcagtatggcagtggaggggctagtaccttgctgtgctgttccagacagcacaaacaccaaccccgtgcctaagtattccctgagatgggttttcttctgccgcctcttctgtcacctccctggctgcagtcccgactcagagacccctgtcagccttcctctattctctcttctgagggatggggacagccacccatggagtgtctgcagtgcctgcccttcaccctgcctgcaggtgagcccagaggaaggcgggtgtgtgtgcatgagaggggcatggcacgaaggcagggtaatcacagggtctgccctacacacgggccccagaggacaggaaacggaagtagagtcttctccttggaggatccctggcttgaccctccaagccctcaaccccagccacctctcaccctggactctgacccactccctcccaaagccaggctagaccctccagcgggcctccgtgtgaaagcttgcatttactgtgaaaaatgaaaacatcacctcacaaagcactctgtcttcctggcgcccattaaacctccatctagaataaacttgtcctttcttctgtcatttttcctctctaattcacattatggtcaatttactgcttgacacagtcattcccggttctgctttctctctaatcccttcacatcggccacaggcactcctattctaatcctaattgaccgcagccggcctttcttcctgccgggaccgcagcccccttgccaccctggggccctggtgggatgctgagtcacagttgccctggctgagggacattctcccgagaagtcaaagtgccccagtccttctgcttcatctcctggcatcgctgatcctcaccttggccattcctgggaaggaggcttcagccaggttggacgaggtgtgggcagcacatgcgagggtgtgtgcgagtgggagtggggatgtgagcatgtgtctgtgtgtgtatgtgcgtgtatgtgtgcatgtgtgtgtgagtgtatcagtgtgtgagcgtgtgtgtgcctgtgtgtgtgtgcgtgtgtgtgtgtgagtgtatgagtgtgagcgtgcgtctgtgtgtgtgtgcatgtgtgtgtgtagggttctcgcctgttccacagagcgcaccaatctaacaggagcaccaagggacctccggacaggtttccatgccctggcgccctccccagatgtcacgaataacccatctaggtctacctgccctggggtattctctcaggccacgctgaagacaccgtggggcagggcgggccgggagaggtgaacgggcctggagctatttgcaaggctgtgggttggggaggcagcaatctcacccatcttcaggaaggtgggatcactgcttcctctgccctgcacatctcaagagagcatgcatgcagctcctgttggaatgaggctgcagggatgactatcctcaatttacatccgaggcaactgaggcccagacctgcctaggctcctccaggttatagacttgggcagtgcagggaccatttctcatgtttgtttctggccaatatcgtttgtgctcttcctgtgtttgtagagattctgcagtaggaggcctgcttctttgagccagaagtcagaactcatccttccagcttcccttgctgctagggcacaggtgtgtttcatgggctctgccaattagactttcttgtatatgaccttgattgagaaggtagccccttgaagcagtgggctgggggactccatctgttgggagtgggtggcaaaggcatccagctttggctgggggcaggacagagcttctggtgcccagttccaagcaccccgggaaaagttacagtggagtggagctgcaggctgggtgctggctggcagcagggctgttgatgctagtgcaactctagttgtgtggtgggtgttgtcctggctgtgtcccatgcctacctctttttgtcctcctggagattctaggagtcccaaatatcccttaataaattcattttctgcttaagccagtcagagtggattctgttgtttgaaactgaaagtctgacagatacagatagtaacctgctttcaaagctggaccagagccagtctcatcactcacacacaggtctgagtattcaggactcaggactcccaaggcctgtttctacagaggggtgaggcctcttttcctggcttgctgttgttcaaactgcgactcagtcagggagagtagagtaccacatcacatactggttccagaaataggctctggtgtcagggtgacctgaatttaaatcctccttctgccacctgaatgctgtgtgacctcaggtgaattagttcacctttctgagcctcattgtcctcttccgtataatagagataataatatgtgctctgtagggttgctgagaggacgacatcagatagcccatgtaaaaagggttttgggtgcctggtacaattagcaagcgctcatgtagatgaatggagctttgcttccttttcctcctctccatgctgtctctggccccctaaaggtactgagcacttcccagccagacacccctgcctgaggctcccacccacagcctgtgagctccctgggacagagtgtgcatcttttccacaacaggcacacagcccaagcctaacaattggggctgtgaactagatttcactccagcttgagtagcaaaagccttggatgtagtctagtcctgccctcccctccctatctcctcagacctacacagtcaggtccaaactccccagcctggccttcaaggggccactctgcacactccacagatagccccacctcctacaccaagcctttgccacacgtgcctgagaagtttcttctaatttctctgcttcttgaattcccaggcaaataaatgacagccactatcaacctctaggaaccttgtaaaaatgagaaaaatgtgtcccttttgagaaggtgcagccccgtgccagggctcagggttttgtgccatgcatgggctggggttcagctcccacttgtccccttgggcagtgcagtcatgtgtggcagccctgggccactatggcctccttggggtcacctctccatcagaaggaacctctcccacaggccagtgtccaggtctcctgtgtgccatatcccctggggtctcccagcaggactgggatcaggcctctgcctgaggcagatttcctgggaaggactcccaggtttgggcctcaagactcatctccctacccccacccctgctggaagacactggttcagggagcccacagccagcccatgcctcctgtttcctaagacagacgtctgggtcaactcaaatagtccatttaagaaaaaaacattaggtaagcggatatcttggttcgatacttagaactaattttgaccaaaaccaaaaaaggagtctgagaagagatcaatctgcagattctgcccctcttggagaccacagataataagaagctaggagtcttctgcaaggcttgcaatctccttgcacagggacctgcagcactaatgggaattgtttcttattgaatccccaagtcatgcatgacacaccaaaatcctttggacagcccaaggtcccaagagcatggaatggtagtagcaagagagaagtggtttccatactgtgtgtctgtcctagccaccaaatcaggtttgggaaggggtcaaggctgagattacatggcctttttcacagacctatggtttggcaacttgagtttgaagacaccaggttatggcttttctgatgaagcctgtttctcagtcccaaaataattaaggatccaaggaattaaaaggttcttccttaaggaggccttgttaagctgggcagataaacctgggtggtctcagagggcccttccatgtctgaccttttactgctcgaagtagaaaattcttagctgactgctgggggagggctccatgttgctatctgcaggctgattggctggctccacctcccagatggtgagtgacatctttgagcccatgcctctacttcatgtcccagaacctttagctccaactggcactcactagctggtttcatgtaaggtcagtccaacaaaacagagggctccccttggccttttgaaagctgagttagacttgcatggtctttgcggtggcccaaatcttgatgatgttcacagatcagactgccaccagtcacggacaatctgccaatccaaggcttgggcagagggtgggcaccagctgagccctaaatggcatgctttgtcagacctccagccacaggcaaccaggttctaacagagccggctctggtgatgtccatgcagacatcactaatcaatcactgggcatcagggtctttatcaaggtggtctccaggcagccactaccaatcgattcaagttggtatctttactgacacttatttagagagttctcgcctgaatatgtcattatgcttaagaaatacaagttactcacaggtaggcacttttcctaccttcctctttctccttcaatgccccttttttcctctgtttcccttctgtgccatttttcctaacccaccaaagcatctgggggagggaggagggcatgagcagggctggagcactatttactgccctaaggcccccatgaaaacacctgtgctccatgtgtctgggcaagctacccacccacctcagtgaccagacctcaggatgtcgagggacccaggccagtgaggaggcctggatggggtagctgatggcccaagggccccgcagggcctccgccagtactcaccaagcagccccgggttggggaacctccaggagtcgttgtacgaggaatactgagggtggctgtagggactcccggaaaactcactccctgtgtatggtgggtggagagagaaacaggaaccaaacgtcaaatccagttcagaaaaggccctgggtcccagccagcctggttgccaatggcatttgcctcttccgtgagttgcaggcgcttttgtaaccaacaaaagcaagtcaggtccacatcattatggagtgggcagctgtcactggcattgtctgtatttcccctccttatcagtgggagtgaatggcagactctcacatgtgtaccatggaactcccatgtcgttctgtggccccatgtgccagatgttccttggggtcattggctcattttacatatgagaaggctgatgcccaggtcgtctcacaaaatggtcttgatacaccttgctaagttcaaggctgcagactgcttggttctcatccctgagtgaagccaatccaggaccccagaatgggctcagttctaccccccacctgctgatgagtggctctggacagagaagccaaaggtaacctcaaccctagcctggccctctgtgctgtgaaggcaggggtggctgtccctggggcctcagtctcgtcagggagatgagacataaacccaggccctctgcctggaggaggcagacagaactgtgctgaaatgaaacaacaagccaaagggctaggggagcacagaagagggagtggttggggccttctggccactggggagggggcagctgttggcagctgtgggcgtgcttgggcaggagctgtgaggtgtgccagggtgtgatgagcattgtggggcatggtgggacccgaacatggttcactcaggccaggtgctcatggagcagtaatacctgcctctggcacttccctgggctctgggtgcccgtcccaggagagcctctttactactggccaggtcactaggaggagagttcacaattctgtcccttaccaccttgctgccttggtcttgtagctggcagggcctgcctgtcttcccccatggctataggggatcccaaagagtaggcttcagcctggactcatcgccaggtgcccagtacccggcagactgtattcagtagaggccctggaacagggcatggaaagctggctgctgctgggtacagagcatgggagcccttccctactggaggtgacaggagttacatagccccatgagcccactcgtggcccaagcctgcctccacgatcccctacaaggatgcttacaaagggccgaagggtgagagattccagaacgggccagccagaacccgggaccaagagcctgctctctctcctacaacccaagcctagaggtgggcccctggggatctgccaggtggggcaggaataatgaggcaggactgaggggccagccactcccacctcctaggtctagctggcttcccccgcacctcacaaccacaggcagagcgtgtccacacacacacacacacacacacacacacacatgctcgcgctcctcctcgggcctctctgggggccactcccagcctgacaggctgagccttccaattctctgttttttatgcctcagtggtcagggtgtcaggttctggcatgcagagggagagcccgatgacagtgggctgcagccgcccggctccggcatatccatcagcaccacggagcctcctcctcctcaggtgggggagtagagacacagcgcagcctggagaacagggacagcgccctcccctcgggactctgagcacccgtggacctgccctatcagaggcacttcttgacaatgccgagcccagggcattgggctactgtggcagaggccacctctgcatctttgtttagcgtcgcctctgctgcctggcccagcttcaaggccacttcttccaggaagcctcccagatctccagccccacaaagtgcaagtctcaggtccatctggctggagttagttcattgtggacatattatccatccccagattggctttggctcctgcaaagggccataaacagctcccaattccttcataggatgtgcctaagtcagtgtcacccaccatcctctaccctgtccccacctttctagccttacagtggtgaatgtagaggtccttggctaccttttcctctgggaagcccctctcccacccctcctcttccgatcccagtctcccgtgtggttctgcagcactggctttgccctgacctgcaggggaatccgttgtacgtgggcatgcttggccctgcaggtccgttggattcctctctgcacctgtgtgccaccctcaccccagcttggtgcccagtccacagcagacaatgagtgtctgaacaattcctggttgctcaccagctctctgtagcatggggaagccttccctgatcactgtgtttaaaagggaagttccttccaccccatctctctttcctgcttttttttctccatagagctgatcacaatccaacctgtcttgtttatcctgcttatcttattataatctgcctcttccactaggatgtaagctccatgggggcagggagttttgtctgttcacgtgttgatcccaacctctagcacagggcctggcctctagtaggcaggaataattatttgttgaatgaatgaatgaacgaatgagactcctaggtcaaccaggcacacgcttccagagcagactctctaactcaggcgacagctctcacggcctccgttattagcacccacagccaggggtgtgttggacacctgctatgtgccaggatccaaaccaatttctcctattccattgcccaccacaccatcctgccccttggtgggagaaatgagcctaccagggactggcttgcctggtgtgctaagagtggtagtgtggtgggcacccccaacatggggcccctgccctatgagagcaatacgctctgggtaaggggcgtttgaccatgtacgggtcgtgaggctgacctagaggctggttcagccacctgctggggactctgggatggtgtctgattatctgaagtgccacacaagaagctgtctgagtgtagggagccctcaccccatgagatccggagaagctaggtccttagtcaacagtccagagaaggcctgggaacactttctgggagtggaagcgaccacgtgaaccaggacttgaagggtgggtaggactttgatggcagagagaggcgggcattccaggcacaagcaaaggcccggcagtggggctgggcagaacgtggcccctgcatggccaggtcttccgtgaggccccgcagaggcagctgcagggcagagcaggcgtggggcaagagtgtaatgcttttctctcattagggctgggatcagccaaggcttcagactggtgagtgccagaatctggaggacaggctggaggaggacagcttgcagtcagggggcccctccaggtggctgtggccacagtctaagcaagagggactggacctgggagatgacacagcagtggcatccttaggcacaaaatgatgttcctcatgtgcaggaaggacattcttggggaaggaaatgaaagcccctgcttctgtcttttgttgcggcctccggaggtgcagccaacaggcccaagacaaagttcccacaatgaacccctttcagatgaccgtgcccagcacaagggacaccacgggcccttcgcctccttctaactgacccacacttttggcatctctcaaaaatactaacccctggaattgggaaacttttctttacgtattcatagaaaagctgctgtgagttctggtaggtgccagcttacatcggagtggctgtccctcagtgggcagtgagacccgcctctgggagacacacagcacatggccattctcagaggtggttcctggcgctctctggagttggtcacatggaaacccctaagaactctttcaacaacaaaacacgtgcctccaacttctccatcggcattcccccaggagcaagcagtcccggggagaaaacaggactggacccaaagcctcatgggactgggcctgcagttggcactgtaaactgggccccaaaatggtgctgtgggggcagaaggcaggtgggcatgtggtggacacaggcattcctgcggcggggctgaaagcacgctctgccatcaggccatctgctcactggttttgtggccttgggcaagcgattgaaccttccaggcagagcctcctcatcttgaatatgggcaaaataaaagcacctacatcataggattggcaagaagtaagtgaaagaatgttactggaagaacaaaactaccttttccccaggccaaggggactggggatgttgggtggagatggaagaagaaagagcctcctctgaaaactaactgaggccctaaacgtaatttgatagctttcggtggggctgggggtagaagaacattgaagaagtggggtgcccaagttcccattttcagttgtctgttgggtgtttaatctacctctgccatttctgctcactcacactcaaatgccttggatggccgggttggtgttttctccccacatggaaatcagaggaaggagccagcgggattgagatgaaagaaagtggctgaagaatgtcccgagaagcctgagcctgaggtgagcatgggaaagtgagcctccacctggaaatggggcagaaatcttaaggagaacataggattttcccactaggtggcaaatgagggtttgaatcaattttaccttgatttcaaagtgccaggtgatgctggccagctgttgggattattggaatcagagaaaggcatggtggggccagaggaggcaactgcatgagcaaaggcagggaggaggggcaggcagatggcccacgatgggattccagggcatccgggctgatcccccttctctgatcccccttctctagctgctgttgacagaattaagaacagagggctggtccccttctaggccatgctccaggccacacccaaggtgtgctctgctctctgctgttgcccagagctgcccacattggaggagaagacagaaaatggcctttgaagtcacacagacccaagctccaggccggctcttcctcttccaagctgtgtggctttgggtacatgcattcacctgttgagtctcagtttcttcatctataaaatggagggaaggaaaatccctacttgttaagcttatggagaagatcaaatgacttcacgtttgcagatgctctttgcaaacccctgtgtggtggggactaggtaccttctctcattgagagagaacaaactcagaaattctgcccccacccaagccctctgatcccagctcctccccctgccccttcaccctttgatcctgggcaggtgggaagaggaaacccagtgacagaaagaaatacagagctgtggaagtgacagaaccggaagggattggtgagatccacatactcaacatgcccttgtgtcgcagattgggaaactgagtctcagaaaggagaagggacttggcagaggcccagcacatgcagtccctcagaggccaggtagacaggaggggagggctgcgtgggaactgtctggaaggtagccttcggaggaaaaaaatgacggcgagactagaaacagaacgctggcagtcaaggagcagctccgaggccatggcacctcaccctcacaataaccctggtgaggaggacgcggagcagaggagcccgggctggggcagaaggaacgtggcttcccactgggcatctcaaggctgacagtccctcccggcattctgcctaaccccgagcaatgcacttcttcctcccttcacgcaacaaattcatcttatgttgaaacttaccaacctgtgccatcactcatagtcacagatgatcaggcctgggatgaactttagagatacgttccctcaacctttccatccccagggtcttctagccagtcaggaacagagcagggcctgggaccctggcctatattcccagaccccagggatcccaccatcccaaggaacacctcgttgagctgggccagcagaggaaagggaaatcttctcatcacatccttcttcacccctgatgtatttgaaacttttcaagcatacagcaaagttgaaagaatgttatagtgaacacctatgtagccacctcctaattctaccatcaatgttttcttatgcttgcttgtcatatcgatcttcatccctctagcctttctttcaccttaatgtgtatttcatttccaagtaaatgcaaacatcagtacactttcccctaagtacttcagcatgcatacaattaactgaagttcattacttgtttactagttttttctttggatacaaaatttacacataatgaaacacacaaatcttaaatgtgctattgctgtgttttgacaaatgcatagatctgtgtgacccaaacccctaccaagatatattaatagaacattgtcaacagcacagagagaaaattctctcatactgaagaagggggcctattgaccaaccgagaacccagctatctggggatgtaactgagtcatccctccatgaacatagagctctgaggttagcactgacagccccaaaccccaatgggtgaaagagcccctgacctgcaaattcaaagtttctccaaagccattacacagaacaaagctagaggaatgtatgctgtttcctcaaagacacagagagaaagcagagccttaagaaatttcagacaaatggtgggtttcccccaaacagtactgtcttccaatatagaagacgtgactgtaaaaaccaatgcactaactagagaacactgattaaaataaaaagtttaaaaaggggttatgataagatgcacttaatgcagctgtcctggagatcccagaggcagaaacatcaccagattcagaggtgttttcagcttccccttcgctcaaagctcagagatggcaagaaagtcaaagtttcctaaaattctcagaagtgacaggtaaacgggctcagtatagctcttaattaacccaaaacgacacctgccagatgacggggatttgcagagcgcactgggggccgaccccgtctgcagatggtgggctcccacctctgctccagaccttggccggctgcaattaacatatggaaagtctttcaaagtgacttcgcagccaagttctgtttctgaaggattcaaactgggcttagagaaaatctttgcagaggaggaggaggaagaaacgatttgaaaaggaccatgaggtttcttcagctcctctccatggctttgcagaactgcatgaaatgcctggtggctcagggatcggcggctacccgggatgttgcgggaccaaactgttgacgaccagagtgagcgcaggcacggcatcacacgtagccacagccaggctttcataatacacatgtatagacactcccgatatacacgtacacatgcatataatgtatctgtgtatgtatacgtaataatatgtataatatttataatatacagatgtatgtatgttggatgtgtacacacacacatacacacacactggattctggagctgtgtcaaagcctcttagagtgaccttggacaagtcatttctcaccaagtctcagttttctcatctgtaaaagtggtgtgtttggaagaaattgaaataagtgacctccaagggctttcagctctcagaagctgtcttcactgcacccacgccaagcctctccccctcgcaggccaaggcttctcaccgttcctctctccacagcaagaccttcctgggctcccaacagggagatgaaaacctgagctcagtaaaggtcagcctgtcggccccgacagccgtgcatcgatccattgctgggaaaaacctctctcccaccagctcaggccagccacgagggccttcagaaaaacagagggaagagaaaaaccgagagagagggtgagcatgaggggcagaatgcacaatgtgtctcacttctgtttctcccgagagccgcggaccccacagctggacggcaggcctgggtgagccccagggagcctggcgtggaggccaggactctgccacctgccagctgtgcggtggccaagtggcctttctgggcctcagtgtgatcctctgtaaagaagaggctgttgtgtccccttcctgttgtctacaactacaaaaacccaaatccaaggatcctctagggaattcagtggaaacaaactccactgcggcatcacggtgcctctgccacagggcacaggtccgactccaccagctggccatccatcacaggcaagagctgggggcctcgagacacatggggccaggaggaaacaattgatcggctcctggtgtttgaaaggggcaagtatcagtagccacaggacttccatctatctagatctgttgtacttgcctccaaggctgacctttctttctgtaacctgcctggcccctgcaggcatttccatttgagatccctggctatgccatggcacattttgaacaacactggtccaagtttaatccattctgctgctgtggtcctattccaaaattctgtcctgtcctgccctcatctaagcaaacaatgggcatgtacaaatgacccccctgaagcctcactagggtgcaagataacacctgatttgtgtgcatgcgtgaggtggggaggggggtactgcagtgccctgtgctgggagtgcccacaggtagcactttgtgaagatcaacaccccagacgccgcctggtggcggtcaaggcccttcaggggctggttcccatggagcttctcagccacacctcccactgcccacatcctccactccacccctacccgccacaagccatattccaggccaaccacaccaccagttgttctgcacacctactccacggggccgtttccatctctcatgctgtttccttcatcccaaacaccaccttccttcccttcctcatgtccaattctcctatttgtcaagacccagctcaaataccacctcctccaggaaggctttctggattaatcatcccagctgagagcagtcccccactggtccctgagtccccagccctgggtctatcactgcccatgtcccagggcacacagattcagggctgtctgtgaccctgtcttgtttcccctgctgttgggtctggcttctcctcaatggcaggaaccaaggctgaccatctgtgactgacaggtccctgcagccccacccccagcacagggcttgcccacaataccaatgcagactgagtgagcactaagtgtgcccagcagatgttccttgagccagcccctttcagagtcagaacagaaaaggtcgtgaaatccatgctggaaagaattagtgaaacaccagtcccgatctttgctagaaacatggagacagcaaggcagagaaagggaataaaacacacaaagagaagtgggctgtgtttactgcagaaaccaccgtgcaggtcccatgagtgaaaagggacactggtgctctcctgagcggcttagctcccacctgcaggcctcagtaggcctcccctgccacataatgacagcactcagttcggctcacttcaaaagagtgcaaaagtacaagctaaaataaagagacacaaattttcgtctttcttttttcctctttttttttttaggcggagtctcgccctgtcgcccaggctggagtgcagtggtgcaatctcggctcactgcaagctctgcctcccaggttcacgccattctcctgcctcagcctcctcagcagctgggactacgggttcacgcctccacacctggctaattttttgtatttttagcagagatggggtttcaccatgttagccaggatggtcttgatctcctgaccttgaaaatacacaaattttctaaagggagaagcaaaaaaagagcagtaccagactgaagccggattacaaagataggaaggctctaggttttgtccttagcaccttttctctgcatccatttggccactggcagatgcttggcctggaaacccgaagagtctctttgaacgtctagaatgttgccagaagcccccatcccagggcctaacccacttggccccaggttctgcagagttgagtaggaataacattgaactacattcccaggaaaatccaactcatgtattcatgataagtgtcaaataaactcactaggttctcgtgtgtctagcctcaactgggtttgttcaggcagtcatacacacttcccatgggtctacctggagcaacttcagagttggaatgaatgatttaaaaggtagggcatggtagaaagtaacatctctccccaagtttctaaagttcttcactgtcctcctatactaaatttggggaaaacttatcttaagctttgacttggggactatgtttcacttttagactcctatactggtgatgctgtgtattttggtaactccatttaattcagcatccactgtggtcctactccattcagagctcagagctaggcccccagtaaggcatactcagtgaaatgcgcctaggcttcaatcctcagggaactgcctgcattaaaggggattcttagacccaaaactagacattcgggtgccagcaaaaggcaagatggattcagaagcagagtagaaatggaacttcatactagctagggtatccaggaaagcttcctgtaagaagtggctgcaatgtgggcttgaggacattcaaatgttgtcatttagtgggtaccgaaatctgtcccatcacctgccagcccaggctgcattgttgagtcaaagtgtactgcctctgtccccagggaagggagtcctcactttctttcaagaaagaggccagtaagcaggacgcacacggtgctgacatggaatgggccacaaagacacgactgtccttgctttcaactccccaacaaggcagctgagaatgtaggatactggccgataaacccaaggctcctgacagctctgaaccacgtcatggtttttgtaaataattgtagaaaggggagcgctgattttctgcacaggcattgagggcaggagtggctgccactccatgttggtaactgggaggtggtggaaagcccctgggtgtgcagccagtcagtcctggccaaagcccagcagccacttagctgggcagcctcgaagaagtctcctgaatctctgagtctgagttcctaatttgcagtatggtaattacaacactcagaggactaaatattgatgcatttcaaagtcctttgtgaattgaaaagtattatacaaatgtgaggagctatttgatacttagctcaatccttggcacacagcacatgctttgtgtgtctattgcaaaaacagatacattgggacttttttttgagcaaaattatatttcaggatgtttttctcatatttcaacaaatgcctaaaattcttgattgtaaggaaagcctcaaactaggagtccaagtccctgatcttccgtctctacccatcccttccaggttcacttagcctcagtttccccaaatggacaatggcagggtgggaaacagacaagattggtttccagtctttctgccactaaggaatagttttcctccccccagtttctgcccaaatgactctttgcttgttaaaattatgaatccaatcccataccttttaaaaatgttctatgaggctttttctgtgtttgggcaaatagataatttccacaagactgactggaaagctaaaaccagcccccagcctctattactggctcccagcctccaaaaatggcccagccccctccagcttggagaccctcaaacctcctggcacattcccaaggccttcaggaactccttcgctcagcccaaagctgacttactttcctgcggcccagaccttggcctgtccctcagagcagccaggggtcctccttggaagaaatcacctcccctggctctgctgggctcagcgctgaggcctgaatgtcccgccgctgactaatgagacggagggtgaaggtgtcataccttgctgggaagtcgcagtgctagtcccgacctgcgctgcctgccatcaaattttaatgcttctgctgacatatttatggaatgcctcaccaagtgtctgcgaggagaccagacaagatttacctccacaattactaccaggacgctcggggttcactgtgtgctgagaactcagcagcacagaggccccgatttcccctgcaccccgaggagcgcgctcaattctgcacacccttcctgcccccggcaagccaggcctggggctggaagaggcggagatgaatcagacacggtccctgcccacggagagcccacagtctgcgggaggggcaggcgcgcacataaattacttgcaaccctgggaggctggggccagtgtgtttgtacaggtatgaaagccgggccgggctgaagtagggaagggagagttatttctcctaacagagtcagggtcaaggaagaagccaaagacccaggctggaccacccagctgcttcggctctcctggtcactcctctggctgaaaaagctcccagggcctctccctccctccccctgccagcctcagggtctcagtggcccctctccttcagcgtctgcacccgacattcattcctttggggttctctctcccaaggctgactgagagtgggatgtgccccctcctccctccccggctcctcacccttcctcactgtgtccgcaaattcctgtaagttttactgctctcctacagcaaagctgccctgaggggaggtggaggcgggcaggaataatgcagtgacccaggccagtggctgtcaagccttgctgcacattaagaatcatctggggctgggtgtagtggttcacacctgtaatcccagcactttgggaggccgaggtaggtggatcacgaggtcaggagatcgagaccatcctggctaacacggtgaaaccccacctctactaaaaatacaaaaaaattagccaggcatggtggtgggcacctgtagtcccagctactcaggaggctgaggcaggagaatggtgtgaacccgggaggtggagcttgcagttagctgagatcacgccactgcactcaagcctgggtgacagagtgaggctctgtctcaaaaaaaaaaaaatcatctgggggccgggcatagtggctcacacctgtaattccagcattctgggaggctgaggcgggtagatcacgaggtcaggagttcgagaccagcctgaccaacatggtgaaatcctatctctactaaaaatagaaaaattagccgggcgtggtggcacatgcctgtaatcccagctactcaggaggctgagggaggagaatcacttgaacccaggaggcagaagttgcagtgagccaagattgcaccactgcactccagcctgggtgacagagcaagactgtctcaaaaaagaaaaaaaaatcatctgggaagctttaaaaatccagatgaccaggccatatctcatactagttcacagggagctcggagtaagcggggggaggcagatggtaatatttgtcgaaacttccaaggtgacgccaatgtacagcaagtttgagagacagggggcagggactcggtactcagtgtgcagcatgttagaggacaagcctcctgcacccaccctcaactctatgaagcagaatctgctctctgagatgatccctgatgatttgggtgcaataaagcttgagaagcactgatccttgttaaagagtttcgctagcgtcctcagaggcatgctggtgtccagttcccacggcctctgaaatggggcccctaaggagactggcttctaagcaggcagccaccataagctaaccactgagaagggctggcttctatgggagactccaggcaggccacaaggcagccgccaccatgactcagtgagcttgacagggccattccatggagggagctgaattaggatgaccctcacagctcccaaggctggaccagaaggcaggagccccatgcagtcctgtgctgatgaagacccatttttttctaggagatttacactttcatatgtatcccctgtgaccagcccacacacctggctgagagatggctctgcagggagggagtcagcaggaggggaggggagggaagaggaggggaggaaagatatcttgggaggccaaggaaagataagtgaagaaaccacctaagagggcaaatgcagggctcagtgggaggggcccagagatgtcctgaggagccctggtggcatctgccttgacaccaggtccactgcagacagtcgcaatttcatccatccattcatctatcagatattgagtgagggcctactaggtaccaggcccactgcagacagtcgcaatttcatccatccattcatctatcagatactgattgagggcctactaggtaccaggtcctgaggatatagccctgaacaaagcagataacagtccctgccctcatggagcttatattccagtggtacaaacaaaacagtaaaccagacaagtaaaaacaaagcgtccggcatgctagataatgatgggtgctaaagagaaaacatgaagcaggagacagaataagaaatattgggaggaggtggaattttagatggagtgaccggggatgactccactgaaaaggtgacttttgaagaaagaatgaaggtagcaagagtttgccatatgaatatctgtgggaagggccctctaagcagaaggaacagcaagtgcaaaggccctggggcaggagtgtgggaggtgtgtggctaggacagccaggaggcctatgtggctggagagaagccagggtggggagaggggagagaaggccagggagggaagtggggagtgggagataggtcaggactttggcctctactctgagtgtgcacaggagggacgtgtcctgactccaattttcacaggctcactgcagccacgttgttgtgaatagactaaagggtcatgactggcaatggggagaccaggaaagaggctgttgcaaggatttactgtaagactgaccttcccactgagtggacacctctggccctttctatcctaatgccacaagactgggaagggccaggccatgtggctatgcaagcagagggtcagctggccaaagccaagggcactcacggagcggggccaggtgtgtggaggcagctggtagagggaaagcatgctgaattctagtcctggctctgcatgatcttgggcctctctacctctcgctaagcctgtcacaaaagccataaaaatgggtccctacggggttgtggtgaggattctaagagaagatgggtgtggaagctctgggtaaactgaggaggggtgtgggtgcggagtcctgtctggccacacaccaggaatgcaggaggacgatgcatcccgattctccacaagggggagcctggtcaattctcccgcccgcagcaatgaacttcgcaggcagcagtccggccttcctatttcagaagtccccagcaccgcgttctggggtgggaatagatgcgcccctgagaggtcctcatgctgcttcagatcctgtggttggcagatcatgttctctccaaaagatgttccacacagcccaacagcagcgatttgagaggctggcacgtggatccatcatgctatgacccccaataaacaaaccaaaaagaagatggaaaggaaaagcaacataggaaagagaagccacccctggctgggggcgtttggtctgaagcaggtaggtgggcggctttgggttcagccctgcccaggtttgcgtgcctgtttcccgtcttggcccacaggttctttaaggtggctccttacatgttcactgggcatctgccctgtgccagtctgtatgctgggagcaggtggtcctccaatgcggcagaaactcaggctcatgagctcccacctactctcagggtctctttcgcctctccatttatctgaaggttaaaaaggcccaataagatgcccttaaaacagaccaagggggcaggcagggcaggcacgcagggaagggcaggttgttcattgcaccagagtcaccggctgactggacaagtggggactgaggtccagcctgctctacagccaccaaaccctaagtcctggcgtggggcttcatctgctcaagagaaggaaggaacaaggtgctgagaaacagcctggggacagcccaggggaaactttaagacaaaccctattgcatgatctctccctcctgcggtagctgcttcacactgctgtcacagatcaggagaaaaacgtaaggataagtccaatggatcttcaaagacagacccgcctgggttctttttttcaatctgtatttattttattcttttattttttagaaacagggtctcactctgtcgcccaggctggagtgcagtggcaccagcatagctcactgcagcctcaaactcctggtctcacacgagcctcccgcctcggcctccccgagtgctgggattacaggtgtgagccactgtgcctggcctcaacttacatttatttagtgtcagtgatgtgccgggtactatgaggggcacaaatcatctgtcaggtgatgtcatcatgcctttcaccaatgcagaagccgaggcccagcacagttcaggaacatgctctagggcacattgccaggcagaggcaggctccagctctcaggcccctgtgttttctcttgttaaaagggctctagaaccagtgagcctactaggctctatcttggtactatcacttgggcaagttactctgtgcaagccgatgcctccacttcctactctgtgaaatgggataacatcaacagcagcctaatgggagcattgcaaaaaacacgcaggtcggggaatgaaaggcaattagtgcaggactggcatatagaagtgcacagtaggggccgggcgcagtggctcacgcctccaatcccagtactttgggaggctaaggtgggcggatcaggaggtcaggagctcaagaccagcctggccaacatggtgaaaccccgtctctactaaaaatacaaaaattagctgggcatggtggcatgtgcctgtagtcccagctactcgggaggctgaggtagaagaattgcttgaacccacgaggcagaggttgcagtgagccgagattgcaccgctacattccagcctgggcatcagagcgagactctgtctccccccgcccccccaataaaagtgcttagtaggtgtcagctactgctacaaagcaagcccttttcctcacaggagccctgggaaaaagaccataaaagtgcaggctgaggtacagagacagaaaggtgacttccctctaaggctggtaaacctacaggcaggactaaggccaaaggtgccaagtcctggtccatgcagcttctcagcctccctaattctccactagagcctgaggagttccaggagtggacctggacagagacggtccaggtatgggggagggcgaggagcaatgtgttaagtcaggactggaagacaacgagtggggagcagggcaggacttgaacttgatccttgtggatgtgcaggtgggaaaaggttgtccagagtcctcatggggccactgtcagaacccaccagctgtgagggtccccgtgccccagccggaccctgagtcaggggaccccaactccaccctcacctgcccccatcggcccaggccagctaaggctggtgggcctgagcgtgggccagcctcccccctcagcccaccggcctgcctgcctcctccggcctggccagcatggtggcaggccctgcctgctcccctgggagcctgccgccagggctgatggcgctgacggagggagggaggccgccaagctgtcagtctagaggtgcccctcggagcccctcctggctggagtgaggagggtgggccggcgccggagccgggctgtcagggccttcacagagacgaggccagagaggcgctgcctgacagctcgcccaccgaattaggaccatttgcatgctaatttccagcactctaacgggctggcaggcgggctggggtgtggagagtgtgcagagagaggcaccgcggccttcccgcccgcgaaggaacaatgcttgactgatctagctgcgttaacgagcaaattatggtaattttgttattacaaatgcatagaaatttccaaagcaggcagccattcagggcagctccctgctcctccccactcctaaatacagagccccctatttggaaacacaggccaggcacccacttcagagaccaagatttccaggtgcttccctcagttctcccagggaggcccagggtgagcccggccagagcatccatcgagtcagcaaccctcagcttctgagctccccacaccttgccctcttgtcccccagtagtctctgcctagcccctgggcctagcaatcctgcagaacctccacatgcaagctggtttctttccatctgagcaggtagcatgggcgattctcctaggtcttgagaaattcattcagtcatttctgtgcccattctttgaactaggcccagcacccaggagggactcagggattgtctgatgaatgaataagtgagtcaaggaagaagggaggaagggaagagaggagggaaggcagcgggagaggctggggagagagggagagaaggaagaaatggaggaagaccagaacatattccgcaaatgaagataatcaggagaccccacacggccagctcactggtggtataattaatccaagacttcactagcggagtttatttgccaactagtaacccctcccagtatttataattgtccactgtcaaaatcacaatttgccccagtttttctggtagtcttcttttgattaaaagtatgtttttggaagcctgctctggtatgcatccagacaggagctgtttccaaaaaagtgagctcccacctcctagcagtgaagcgtgggtcgctccagagcagggctgggcacaaaggacggctcagtggtgccacgctgtgaaaagcaagtctgcccatcctcgggcaggtggggtggatctgcatccactcctgccccaccgggaaccactggcagtcctcctgttttatgacagggatttcaggttggggctgatgttattgaaaggtcaggaaggtgcctcaaatccattttggaagtcagtggggaataaatcatcaattatggaggaaaccagcggctaggaaggtctgctcctggtggctgaagaagcgcgggcgggccgggcctcaccagggagcgttcgaggcagaggcctaaatagaagccaagacttcagaacctcagttggggtcgtggtcagatttttctatctgtctgactttctaactgggtcacagcttccagagggaaactgaacccaggaacagaaaacaatcatttctttgtgtctggctacctgactctgggtaggggagctgtgccccggcgtacctgcaggtctcagaccaacctcggccagacctggggagcccaccgttgcctggatccactgaggcacagaagcctgagacttaagagaagatgtttttgtagctggccaggtcccagggcctgggagaggatctgcattcaggaagagcacaacaaaagttggggtgaaggtgggggtctcgatttgtgttgctgtagaagccagggcatccaggaaccgtcctttttataccagttctgcacaaggacaggagacaaaatagcttcttttttattgcttcggtgaggaactgaggggggtggggacaatagggcagaaagagggccacctggctccccctctgacttgccatatgactttgaacaagtcctttcctcatcctcatctgcacagccctgggttgatttctaaggttgagtccagccctgtccatcagtgatggacggaaaagcagctacagaacacacaacggcctctccgttgaacacacaacacgctccacacaggcacagcccaatctacacagggctaacagccttcaaagcttctcctgcagagcagatttctccaaagccaaaggcaaggccctcggctagggcctctgttgaatcaatgtctttgccgctgcccccagtggccagctctacagcctacaaaatgtcctggatggggtggtggggggggggccttggttggtctcctgcttcccaaggctagattccaatttctttgcatttgtttttccaaatgtgtctggctcgttcctggggagttcttctctacccaggaaccccacacccgcagtgcccatggaaaagctattcattcacaaaggtccagtgcaaagttgtaggggctatgggaaactgcttcaacccaagactcttcggtatacacctggtgtccccgcttagacctgctcgtgccacacccttcttttgcatcacacaatgaaagcaatttctgggctgtaacacagtgtttctaagagtcacactccaaattggcaaaatccttcccttgtcatctagactgaaccacttgctagcaaaccatttaagcctcagttttcacctctgtaaaaggggctaccgtgaggctccactgcaattatacatgaaaggggcacatgaatagcaaagctccgtccaggtgggggttcgtcttcttagcagcattgtgaacaagaccccacgatggccacagcggtcagaaaccctgccctggcaggacaatgcccaaggcatttttggcctgggattgctcttcaggcgaagggtatggtaacacagttgtcatttcacatttttccttcctccctcttttatctctctttctcttttccactccttctctcttcctttctttctttctttcagccctggatttaagtctccctgtttcgggccctttatttgtgcccgttgcacatagactccttataaagaaaattcatttgttcagggtcaccgcatggtttttcattaaaaacaaattacccgcattcagggaggacatctgggcttcgcgggtcccattaatgactatatttccagcctcccagcctggttgggctccccttgcctgtcaccccgcgttcccggccccgggaggacaatgagagtgacagtcaagtgaaagggaaaacatgagggatgagggcgagaggcaagtcccccgagaggggaaggagggaaaagtgaaaaaaataaataactcaaacagagggtaacaagggccattgtctcagcgtcttcctgctagaagccagagcaaatattggaagaaggactgggggcgtgccagtagcactcaagccctgtttaattacacagtccgaccctaacttgccctggactctggaccgggcaagatggggaggggcatgtgctgtattcagataaatcccacccacagctactgagcacctactgcaggcagcacctactgcaggcagggccaggatctgagaggaattccgggcagccctgacctcagacgcagccaggagacgggcgcacggggtctctatggcagaccatgggcagtgcccggggggtgcacacagtggggagatgagggactgcggtggggggcttcctgtaagagagagccttaaatttgggtctaggaacatgtgtcaaacacagacaggtgaggatggggagggagaaaggaatataccagaattccaagtgtgagctccgtagcatcccagcaggaagagctcttcctgggccataaaagaactcgagttaggaaggccacctatgtccctgagggagcaccttccctggccccagagcccatagatagtctcaatttcctctcagtctccatggacaccggaggctcagagaccctaagttccaggcgccaagcccagctgctccctgactggctatccccctggcaatgcaacaccacctcccgaacccagtcagcctgcctccgagatggatatgctcactccaacctcacaacatgctttcaaatggcaactggggctaacagctgtgtgtcccttgataactctaaagcaccatgcaggttgggggtggggaagcatggggcttgttggtagaatgagcttacgggcatgggtggtttggccccatttgagaacactctccttttggaaggcagaagccaagctccactggctctcactgccctgagggcttcggacactgccagaagttctctggatagcagtatcccaggtggagtgaccctcagggttggaggcagcggttggtccagatgaagactgacagctgtcagggtcttggagacaggggctgcagatcccagcaagccgaagggagtcaaactctgacagccccagtagattaaagctgggtttcggaaagactgcagtaagtacaggagcaaagcacatctcagaacctttgtcttcattgttcctgctctgcctgaaacactcatcttctccctcctcactccacctcccactggctaacatatgtttctctctcaacaataaacctgaaaattgtctcttcctagattcctcccctgccctaagggcagcaccagggatgtcttggaaagctttagctgtgcccctattctttgatgtgttttctcaatcttagcaaaactctctgcaaaagcaccctcagacatgcctcccacccagccctactgtacagagattccaagcccctctgtgtctgacatccccagtctaggctccatcccccttctctgtgttcccagagtccctgggcttgcctgttaccacaactggcccccatagcccctcacagatttgcctgacaagggtcatgagttttgatcttgtatccttaggctactacctggcacatgtagatgctcaataaatgttggaagggagaaggaaaggaaggaagcgatagtggatggatgggtggataaatagatggatggatggatgaatagatggatggatggataaatggatggatggatggatggatggataaatggatggatggatggataaatggatggatggatggatggatggatggatggatggatggataaatggatggatggatggatggataaatggatggatggatggataaatggatggatggatggatggataaatggatggatggatggatggatggataaatggatggatggatggatggataaatggatggatggatggatggatggataaatggatggatggatggatggatggataaatggatggatggatggatggatggatggatggatggatggataaatggatggatggatggatggccactgcaacctgatcagctcaaggccccacaattatttattatgttcaatacatttcaacaggctctctcccaagccccttcttctaggacacggaggcccctttccattctaccccacagcacatcatgcattaaatgccctataataatgatacttttcactctaaaaacacaaaaagcttatttttataattttacttttgaaattatttggccacaagtaatctaattgatgattagctatgaatactctgcaactgaggcacaaacttagaaattcttttaaaggaacaaaatctaatctaaaaatggtttttaaatgtaatgaaatttttgtaagccctaaatttaatagttaatgaagttaacaacaatgttacaatttgtaaacatttactatgacatttattaatgtcagttttctagtttcctattttaattttagaggtaaaaggagctttgtttgggcctcagattgttgtagattcctaaaaagctcctgggactttagcccagggcctctccagggccctgcactttcatttaggatcctgtgggaagtcttggctgggacaccaacctcatcttccaggagctcaagtctggtggaggtagagacgcactcgtaaataatgtgataaaaagtaaaagaaaagggaaggagtgcattgggccccaagcccctcagattgctgctgcccagtagaagaaggggctggtctgagccctggacactcctgcatagggtgccctcagggcaggggctgcctggcccaggctcctcctaggacttcagcctctccttcccatcctacctccaggtaagccaggcccagagtactttctccctgtttgcccccaaccaagactcaaccacaaaacagagggaattgccacctgccctcttgacaggccttttggcaagcagtgctactgggaggtgcctgtagcagcgtggcttaaaccccaggcctggcgtcaggctgctctgccacctgctgtgtggcaggggctgaggatggcttctgctgccactccgtgggccctgtgcatacccgggctgcagtcctcgtccagtcctcggcgtttatctcctggattcatgcccactctgtctctggtcagaatctgacttggtcatcaggaattaggataagaaggcctaaggttcagcaaggccactgtcctcaggacaccctcactttgggctgtgtacgtccaggctcctctctgcactaatgggggacccctaacctctcagggctgggagaacctttaagccctccaggcccaccttgaccctgcatcagccacccaacgcttagcccttccgcaaatgcttcagtttcttctaaagcaaattctgatagcattccccttcatctcctaaaaagccatcacagcccagtcgttttgtttgttgtttgtttttaagaaacaccattagtagaaggacatcaggaagaaattgtaagtcaggatcccaaacacatgttctcacatactcatgaccaggttggtgcagttggatctggggcctgccaaccaccatcagaaggagctggaaactggggaaatctaacaagtagattcagcccagagcagcaccaaagctgtcctcagcccctggctctgagctcccccagcactgcacacttcccaggcgggccagtgagcaccggctttggacagggcactctcccagctgagactctgcttctcagctgtccttgcaatggggttgtgagaaataagaatgtttcccagcacctgtgagcctaggatattctctctccccatctccatgctcccaaaagggacactttgctttcaaagatggaacaaatgatggtgatctttactacctctctctcaccctaagattgcagattccagtctgggagccctcctcccaggtgcacaagccccaaaagccagccctggcctgccccagcagtttctgggccttcccgatcgagacatgggagcagtgtgtaaggttaacaagtcctcaggctcttctccttcagtccagcccttggaagtgattaccagattatacatgacagcccagggccactgtcttattattcacagccccagatctgaagggaacttggaagcactttctgcttgcttagaacagaggtggcagggcttagggagccctccagttcggtcaggagctgttatgagcagggataaacatcactgacttagaaaccttgaatggcaggagcagaaaaccccctggggtgcattcagcccagcctccccaggccctgcctcctgctttaagagagagcagggagtcccaaggtcatgtctcaaggtcatgctgtgagtatctggcagctagaatcagaacctaggtctcctaaattcaagtaggaccttcatgtccccagagtcctttccatctctgaggcttttgtaattcttttcttcccaaatgcaggcaagagctgagaaagcctacatgtgtgtatcagtttctcctcactcccagcatcacttccgtgcagggttcctggagctttagtcacatagactgtccagaccacctcattctagacccctcgtccccccaccctatgagggcacaggcaacaggcaaccctggctctccacatctgcctgggcagagcctgccctctgcaaggctattggatgctcagcctcatgcccagaggtttccagggctgaggtgtgggtgtgactgggacccttcttccctagatccagccttcccttccagctcatctcccaccagccccacaaggctttggtcactcccagctccctccctgatgcccatgttctctggttcccctggggcttctcacgcactggtcccttacccaacaatatccctccagcttcacagactggcaaactcactcttcaaggtccagctcaaatgacctcctttgagaagtcttccctgatttctcccactccaccccattgcctcagcagactcagtggtccccctcacctgcatttccccacactttatagattcctaggtcttagctcttaacattagcacatcaggatttttttatatccatctctccaactagactgtgagctccctgagggcaggggctgtgtcggcagctccacccctagcccacaattggcaccaagggtctcttaggaaatgtatggagaatgaatgaatgaacaagtgaatggccacctgcatttcatcgtagctgtgtctaggattccccagggtcaagtctgtgttcctgctgtggcagagtgactggaggccaccagagggcagcaaagagtcaggaacgagcaacaggtgtgcaccccagaggccagggccaggttggcaaaggggtggcgtgcccaggccagagagctaccaggagccccagcaaggagcttagaaagaaagtcaggggtcaagggaagttagtgttaagaacaaaggctgttctttccctgagcaaacgctccctgagcctgatgcttaggtcacggaggtgcctggagagcactggtcctctctccatctgatgctcaaatccccaccaccaagttctcaccagtgtccgctggaccctcccaagtctgcccattccaatgtcttcagtactaatcataggaaaggttcttgatacaaggctggaaaaggtggccctctgaatcctgttcactactcccggccatgcctatggaactgggcagtatatattttctccctgtttcacatgcttaaccagacccagagagtggaaatgacatgtcagatggcacagaggtcctggctgagctgggccaggatgctgcctggtactgcggcccccacccctaagcctgcatgctttgcacagagcaggcctgtagggcaggcaagacgcagaatcaggggtgggcttgccagaccacaaaagaaaccttctcctccccgctccagaacctcaatacccttcctatctcacacaggcggtgtctccgtaactacacaaccatcgtttcaaacagtagcaaggcaggctccgagaagtcacagagctcctctgtggtcacactgctaataatggtgaagccacattcttgccaaagcacccttcgcttctcttggggcatctgcatatttctgtctggactggccctcgccccatgctcctggggttcatgcacctgtctgcagaaggcctcatctgcatgtctgcttggcctccaaaagttgccaagctcagatcctaaccttgctggccatcagcctccactcaacaggctcccctccctgccaatcctacttgcctggcctgggctggactcccacccctgggaacccacaccagccactaggcttagccttctgccctaccgcaaagcccccatcctcctctccagatagccaagcacacatggttcccagcccagctccagggccacctttgccagaatgcctttctcagttgcaccaaccacagctgcctctctgttttctgcagacccactgtattcggagactgcctgactcctacttggcagtgctctcatttctgactggattcttctctagttggctttcccattgatccacaggctccaggaggtatgagctctgctggagagctcttgatttgagcgttagcatgcctgctaggcttctctgttcaccgccctatccagcccaggcccctgtgtaaataataatagcaataataatgaacacttatgtgccactccatatgtgccagtcagaattctaagagcttttatgtatattacatcacttaatgctcacatttattatcagtatccccattttatacacgaggaggaaaccagggccctgaggagttatgtaacttgccccaagtcacacagctagtgagaagcaggactgtgactcagaaccagggagtctggctcaggtccatgctcttaaccacccagcctcccactgcttccccatgtggcggccactctaacagcgctaccactcccagccctgggtcagccccagcctccttggttgcatcaccccagcccccagactcagggccacagcaaacctagcgaagctctccttggcagctcggcctaaagttctccattttaatttcagctactgtgtcctgagtgcgactaggtgctaggcactgtgccgggaactaaggacacaactgtgaacaaaacagacatagccttgattattgtacagctcttacataccatacagacctgaagagaagccggaggggaacgagtaaaccacacactaaatgacttcagctgggcttagtgctgcacatgaaaagagcaggaagctctgggagaggaatgatagggggtcctggttcggagggtatgtggcaggcagaattgtggccccccccaaaaatgtccatatcataagccctagaacccatgattatgtcggattacatggcagaggggaattaggttgcagataaaatgaaattagctgtcctgaacatgggcagattatcctagatatccaggtgggtccaagggaaacacagagctctctaagtgaatgggggaggaaggaggggcagccggataaagactcagcccaacatcgccagtttcgacaaggaaggaaggggccaaaagccaaggaatgccggcagcagcaacaagctaggacaagaaagcaaatcattccctcctagcacctccagaagaaacaagccctgcagacaccttgacttcagcccagtgagacctacttccagaatcagagggagaaaagtgtctgttgttttaagtcactcatttgtggtaatttgtcacagcagcaacaggaaactcaaatatatttggtcactggggaaggcctctctatggaagggaaacccagataggtgagaggggaccaggcaagctgggcaacgagcagagaggggctgagccctttaagcagaggaagttgcaggtgctgaggtgggaaggagcaggcccctctcactccccctgtggtgttcagtggaccctgtgccttcccggcccacaaggctgcgcccacctctcctctggcctcaggcccccactccacactgcaccctcacctcctacttctttaagaaaataaaagccatcagtttagtgagtgcctcaattgaaaggcatctagaaatgatgtccatcaatccatggcaagtacagtgcccaggcccacagggaccccacctagtgcctttgtgcacattgttctggtgggccatgagggatggggcacccaccggttcctcaaagatagcaacctttttttctcagacttactaaagccaaagggcaatgaactccccttcctttttcctctagcccagaatttgtcagaatttcaaatgccatgtcgatatctgcaaccatgttaagatatttgcaaccatgttaggttgcaaaatatcttcaggcaggaatcaactggttacaccaatcaagacactatgaaatctttggtgcaaaattttcggcattttctgggacttgatggaaataaaatttgaaaactgtttcctttctaagctgatataagatgctatattcgctttcttcaacataactgctctgcaaatggtgatgcagagtttactgaatctgcaaaccctagagaagaccagaagctatgttttgcagacatggggatgccctggagccggaaggagcagacaactctgatgatggaatcagaaatcaagctgaacatgagtccaagctaacaagcagacatttagtaaggaaaaacatgacatccactttttcaggctctgcagtgtggctgtggaagcatagcccaaggcaagcgtgccttcctctgtgtgtcctccaagcacatttacaataaaagccttcacttggaaatgaagtggtggccgggcacagtggctcatgcctgtaatcccaacactttgggaagctgaggcaggaggatcgtttgagctcaggagttggagaccagcctggacagtatggcaaaacccgtctctacaaaaaatacaaaaattaggtggcatggtggcaggtgcccgtagtcccagctactcgggaggctgaggtgagaggatcacctgagcccaagaagtcaaggctgcagtgagccaagatcgcaccactgcactccagcttgggcgacggccagagtgagaccatgccttcatttaaaaaatgaaaagaaaaaagaagtgaaagtagtggcagctaaatgttttctaaagccgacagtggggaaaaaacaccccgaagattttgggattccctctagattgcaccaccagcccaccagaggccaggagggagtgaaacagatctcacagtgaaacagatcattgcagcatagcaacctcagagagacaaaagcaagagacacaggtgtcccagagccttgcttcacttgtttctccaaacatgccaacaggccctcggggtcaatgcaatggcatcatcatcttcagcaccgtcacaattcagtggatgccttcaggattcagaagcccgagaggtcacaaatcagcatctgaacaaacactgagttgaagttctcaagcgtgttgtggcacatccatgccctactccctggagcctgatatagggaggctccttatatgtaacctgtgaatgtgactccccgtgaaaggaaaaaaggggtctttgcagatgtgattgactaaggatcttgcgatggggagatcatcctggatcctccaggtatgacctaaatgcatatgtatccctataacagagaagaggcagattcgacacacagagtagaaggcaacctgaagatggagcagggaaacactgaaaactcctgccttggagcaatgcagctgcagccagggaatgccgggaacgaaccacaaaacctggaggaggaaggaaacagatctttccccagggcctccagagggagcatagccctggcgacaccttgattttggcccagtgatactgacttcagactcctgtgctccagaactataagagaacacagttctgtggttttaagccaccaggtttggggagatttgttacagtagccacaggaaactaacacacaggtccatataatttccctctcctccctcccttagccaacattcacaaagataacttgatacgtgttaggggccatgaagggtgcagagactaataaggtcccagtgagagtgatggacgtggcgtagggggctgtgccttgaacacgttgggtcatgtgatgtggcagagccaggcacaagcatcttcccccagagggggggccatctgggaaggcttttctgagcaggtgaggtttgcattcagccctgaagggtgttgctggattctgacaggtcaaggtgggaagctattcaagaatgatgaaggaactgatgggtgagagtccaaggtgtgctgggcaccagacagcagtcagggttggggaggctgggagaggaggccagaaaggcaagttgaggccaaccacggtgaggcctgacagcccagggcccctgctctgccaaaaggtgggccctctctgttctgtgggacagtgccgggggtagtgtctgcaaaaacaatgtccacaggccacccaagaaacagatttggaaattttgttggaaacaagagtcccaaagacctgaccctgtttggccattgagaaacaggaactaagggctgtgcggctgagcttggaatcccagccctgacgccaggcatggcactgaataaatgctgggagatgcatgagaagagacagcaaggaggctggggcaagaggagaaagaggaaaagacggaggaagaggagacagagagatgcagaaggaaagaatggagggagagagagaaggaagaagtcatgggctcccaggcagcaggctcctctgccgaagtgcttgtttcctccctccacactcgtgcaccctcctctgtgcccaaggacagagtcccatggggccctggggctgcccctgtccagctgctgccaggcttggtgaagctgtgcccctgctcgggcctgtgattcctgctgccctgttaatgggcaaagagtcgccatccattcccactggaggctctgccaggcctgcagccatctgtgtcttgagcctggtaattagggctggaggaatcctggtggccagagggcaggctctgtttggataaacttggcaaagttcagctgcttctctgaactcagcctctttggggtttccagtggggggctgagaggaccggctgggtggcctcagcttcaccactgacatgctctcagaacaggttccggggctgtccctgtccctctgtcatcacagataagctggagttgactgattcagagagcacacccaggcagcccagggcacaggaagaagtgcctccctgggtgtggggagtgctgggagggaggtagaaggggccaaagactggggttcaagtcctcctcctgcaagctgcacagccccccggaaattccctggcttctccggggcttctctggcccttttggaaaacagggattactctcctaaccctgccccccttgcaggactgttgcgtcatagcactcaggggaagtccgtgttctataaggcactacataaatgcgacgggccatccatggacgcggcttggggtccatctcccaaggccgcctggacgtgctaaaggttggaaaatgaggagccggtggggcggggcaaggggaagggtggtgtgtgtcccaccacctctgtgatctgccacaggtccatccttgcagcagaccaaagttttgcaggcaggaacctggcaggcctccctggcattggcaaggcccaggacaagagtacacacggaggccgtttcccatgtgtctcatatttaaaagtcatcaatcaagctagcaaatcgttaaatgaaatatgctccatcctcctaccttgttaaatacatcttcgaaacaacctggaaggccaggatcgaatgtagaattctgggccttctgggcgttctgtgccaggatgtggccataggggagccagcctagctaagatccgtcctgctgagctccccaccctgggatcctcatcaccacgtggggccttgcacacgcatgtgtggacacccagcccgcacatccaagctccgtccacactctcgacagagagccgggcctcaggcccagggatgcacacaccagtgacatgggctggctttaggaggatggcccgggggaagagacttgggcctatttgggtgggactccagcatgagctagaaagaggggtgtggttatgtccgtttggccctgcaggctctccccagtgcatgggagagtgggcaaggcttcagcagggctaaagtggggccctctaaggggtggctcccttatctatttatttattacattattatttttattaattgtttttgagacagggtatcgctctgtcgcccaggctggagtgcagtggcacgatcttggctcactgtaacctctgctttctgggttcaagcaattctcatgccttagcctcccgaatagctgggattacaggtgcatgccaccacacctggctaagttttgtattttgtttgtttgtttgtttagtagagacagggcttcgccatgttggccaggctggtctcgaactcctggcctcaagtgatctgtctgcctctgcctcccatggtgctgggattacaggcatgagccactgtgcccggcccagtctggcttttttaggtgcccagagacagtcaagagtgtgtgttaggaggagataaggcccttagagccccaggcactgaaacaagctgtgttgccccctgtaaatgactctacctaagagagagcatggtgactatagtcagtaataatgcattgcatatttccaacagctaaaagagaggtttttaatggttctcactacaaagaaatgatgaacatctgaggtgaagggtatgttaattagcctgatttgatcattccacaatgcatacactgtcaaaacaccacactgtaccctatagatacactgaactatttgtctattaaaaattaaattaaataaataaaaacttttagaaataatttttaaaaggagacaatgctaactcataaaagatgtgtaacaacatccagtggaggcccgattttcctcctgatttttaaaaacatctttcaagaaagaatactcgggtattcctgctatgctaatgcccttaacacccagacagccagtaccgcttgtccccacaccaccccacaatgtaaggagacatggcagcctcctctccagatgttttaaactgacaatcaccggcctggggggatcaggttccaacggccacagggtgttcagtttagaatcaaatgacaaacccaccatccaacatcccgtctgtcctgaacacattatcctcaaccccaaggagtgaggccaccgcgagcacctcagcgccttctgcttgttcgtgtcacacgattgtgtgggagagagggcgggggccgggagggagggaaggttggggagaaggctcgctccacaccggctgggtgacctgcagccagcccctgcaccctctgtgttcagactctgtacgtggccaacaaggcctgtttgagtgacagtcaaagaccctcccctcgcccccggtgtcctccctggtgccgctgctggctggtccagggcccactgcaggcccagctgcagagagtgcagacctctgcctgatttattcaggtccgcttctcagaagcgtagaggtcacccaggctgtttggggggggatgtccccccaccgaaaccccgtccgctgcctgctgtggagacgccgacagtgcaaactcaccaggcaccatccctgtcagcgtcggtgctgagtagctgccctgtccagcgggggggacgtgtggagggtacccggggagggtcgtgctcgccaagtcacggcctgaggaatcaaagcaacaaatcacagggtgagcatcttcgcggccagccgctcatgtccacagctccctggacgcttctgcacatttgtcacgtttggacgctgaacggcaatgtgcccccagctcccccctgtcgctcacacgctctcacaaacacacatacacacacacacacacacacacacacactcatgcacacacatctccagccaccctcgctccactcagcaagaacagagtcagggatgtggcctgttcctgggaaatcagaaccccctgcttggggaggctaggcaatgcaggtgacagcacgccccgactccagccagctctccctactctctactccccaagaatggctgggacctctccatctccacactgttgtttctgctatgtcctttgtacaaagtcccccttcctccaactgcacacagcctgccaccacctgccttcaaagaccagctcaaatgcctcccttctcctctcctcaacagccccccacagtgaacagggggcatatctgcctcaaaccttatagtcccatatctggcctagtactgaatttttcctcctttggcctagagctgtttcttcattcagtgaagatgcaggaagcacctcccagtgccaaacactgttctggccctgggacatggaggttaaggcctcagccctcaaggcgtgcacactcccatgggcgagtgtccagctctttcaggctgctgtgcttctgaccatgagtccagagtgtccatgtgtctctcagctgggacactgtcaccatcactgattggctccatcacgcagaggaaaattcaattgcacagttttgatgggtgtgcatgttggggtagaggccaggaccacataaggggtgctgccaaacctgcctcctgaaagatggggggcattagcccagtaggaggctgcctggtacaagtgctcacatcctacttggctgcctgggatggataagaggatcgtgagaggggagggaacttgtccaaagatactcggctgacctgaggcaaggctgggactgacagtctgcccccctgccccctgggagtggatcctttcttcaacggtgggttgctctcagggtcatttctgaaccccaacagtttctgctgctgttacacatgctttaaaaccttgaaccctaaagcaaatgttcagaagatcagtgcctcaccaaagcactcaagaagccagataaaaatctataaaatgaacccagggaaagaaggaggaaggaatcaacaaaataaaaacagaaaagaatgaattaggggcaggctgtggttcacgcctgtaatctcagcactttgaaaggctgaggtcaggagttcaagaccagcctggctaacatggtgaaactctgtctttactaaaaaatatatatatataaattagccaggcgtcgtggcacatgcctgtgatcccagctactcgggaggctgaggcaggagaatcgcttgaacctaagtggtgtaggttgcagtgagctgaggtggcaccactgcacttcagcctgagagacagagtgagactccattcacaaaaagaaaagaaaagaatgaattaggaaacagaaaagcagacaacaatacatcagccaataattgttatttgaaaagaacaataaaatagacaaatctatcaagattcaaaaaaaaagcacagataatcaagataaaggatgaggagacattataaccagagatgatatttaaaaacataaagaaacacactccacatgaatgaatgtagaaatctcaacaaaaggtacaattttctaggaaaatatgaattgccaaaagtaattcaagaagagtcagagaataccaacatcccaataatcttagaagaaatagaaaaagtttaaaaaaaaataagtgcctcatccatttagcttcttgggaaagtttttgtttgttattctttttggcaagttctttaaaccttcaagagacacatatctcagttattaaactgttcccaggatatataaaactaaggaaatcttcccaattcatttctccaagctagcataatcctgatctaaaaatctaacaaaggcagcacacaaaaaattaaagactagtctcacaatttgttaatatacatgtaaaaagtctactatcatactgattgggcaatattacagaaagaataatataccatgaccaaaaaagtttcattctatgtatgcaaggatggttcaatattaaagcactgttcaggacatcatattaatgtattaaaggaagaaaatcatatgattatataaaagatatagaaaaggcattggctaaaattcaatattaattccttatgatacctcttagtaaataagaattgaagtatacttccttgttcttatattgatactaaatctaaagttaataccttaaaaatacttaattggtgagatacttagagaattcctgttaatgtcaagaacatgtcaaggaaacctattatcaatgttatcactgaaaattgttctgaaagttttagccagtacaatacgataagacagagacataagaggaataagcactggggggcagggggaaacccaagattataatcagctggataaatcttaggcttgggaaatcataagaaaattggctcatctcctagaaccaatggaaaatttcggtgaaatagccaggtaatggactgtgtcgactccagccttgtgcaggacttgagcaaccaccatgctggggactcattccattctcaggtccccctctcccagcccaccaggatggcagtatgtgctcagaggagctggcacatggccgcatgcactctacacatcactctgcctccgagttcccatcacagaggggctcctttgccttgtccacggctccagttttacgcaggcacagtccccagaaccagaggcttcacctgtagctgtgcttactctccttggactagccatgaaaacaaagggcctgggttgttccttgcaaggaagggagagaagctgacagctttctgtgtcctctcaacctcctgaattgctccagtgttccaggcactggtatgggctgttgagcagcattattccactgaaacctcatagcttacaaaattcccagcataaacctgatgacactgtgtggggaggtctcggggaggctgcagctcaccagagaaaggaagacagcagagcacagtgacgaagcatgtcaagtctgcccaggctcacacccttgatttgccacttattagctgtgtgaccttgagagagtcccttagtcattctgagcctcgatttccttatctataaaatggggaggataatagccagcgcttacggagagtaaactgtgagtgaggcacacacattctcacttattcctcacaatagccctattagagagctactatgatccctattttactgagggggaaactgaggcacagagcatttaagtgacttgctcacagtcacacagctagaatattaaaaagcaaggtttcaaacccagccagtctggcttgcaagcctgccctctccacccctgccctgtgccatctctgcaaccacacagaagcatgccttcttcataaggctgtggtaaggaggcagagggaagatgtgtgagaagcgcatggcacagtgtggaaggtaattcttcaccccaccctcaccaccatcagcttgaaaaagaaatagtaatttaacaccaaaaagtaggaaggacatatattaaactggtttttaaaaccaaataaattcagttttatgaaaaaacaaaaggaaccctttgcagctcttcctgctagagcacagtggcctcctctgacccttaaatttaggttcagccgtgtgccttgctctggccaatgggatgggagcactcggcaagcagaagcttgatgtgtgcttgtgtggctgggtgcccttctcccttatcctgagaatatgtcctggctagcctgcaggtccaaggagagggggcacatgtggagcagagatggacccaaactgtgactggaacccagcccagcctggtgcagccaatccccagccgaccccaagtgcactagcaagaataaacgattactgtgttaagacctgagtttggggggcatttgctaagcagcaatgtggtggcaattgctgattgacaaagatttaataaatgtcatcactgttctctacttaaaagcttgctgcctggaacctctaagaacacgtatcaaattccaggcagaggctgatccccacgcctggttggggaacccagtcttatgaattcaagcctcagatctgctctgaggcccatcagaactctcccggcaccaagctgaggagtctgtgaccttggaggacacaggcagtttcaccttctcagtcccttccctaacatgtcttaggcatgtcgccagggttggggtttacaacctgtcaacacaaggcagctaaggagatgctactcccccttcttagctctaattcaagcctctggactgggatgggaaaccagatttaatgcttctaaacatgctatgacctcaaagcacacatttctttcatttttttttaaccaaggaagaaattatttgtatcatttgcaatggcactgaatgttattgatggcctataataagtttgcaaataactaactaaaatgaatcaatttgcattcctaacataattcctcctattaatggcacgtaagtacatcttttctaactcatgcgtggccttctcttaccagggagaataaccaagacttggctttgcttactatcagcaaggagtccaggcagaacagtgaaactcaacacaaaggccactcctccagaagagacacatttggtttgaaataactcactctttgcaatcctgagaggaaggggaagaacagggatctgcccctgttgtatacatgaggaaactgaggctcagggatgagttttgactggcccaaagtcacagagtaagcggtagaacagggacttcaattcagatctcatgatttctacttaaatgctattattgtaggattattaaaaatgtttcccctcgaggggactagccctcccagatgctaaaacattctatgaagtctttataattaatattgtgataccagcacctgaagaaaaaaccaatggaatagaatgaaaaatttaaacaaaggctcaaaagatccaatccatattggattatggacccaataatccaatgcatagattatatggaaatctagcatacgatgaaggtaggatctcgaatcactggggcaaatatggactttttataaatggtgttaggacaactggaaagccatctgggaaaaaagataaaatagatcaactcttcccaccatatataagaataaactacaaatagaactgagaaataaatgtaaaaaaataaaactctacaagtactagaagaaaatacaggtgaattcctctctaatccaggtgcagaaagactttctaactatgatttgaaaccagatgcacacacactacaaaaattaactcaaaaatgaatcaaagacctaaatgtaggagttaaaagtacaaaattcttagaaggaaatatgggcataaatctccatgaccctggattcggcaatagtttattggatatgacacaaacaaaaaaatagatacactggacttcatcaaaattaaaagcttttgtgcttcaaaggatactaccaagaaagtgaaaaaatgacccatagaatgggagaaaatatttgcaaatcatatgtctgataaaggacttgtatctagaatatataaagaactcttgcagctcaataatagacaaataatccaattttaaaatgagcaaagcaactgaataggcatttgtctaaagaagaataaatgaaatggctaacaagcacatgaaaagatgttcaacatcattagctctcagggaaatgcaaatccaaaccacaataaaacaccacttcatacccactgggaaggtcacagtcaaaaagacatattgtcacaatcattggcaaagatggggaaaatcggaaccctcaaacactgctggtaggaatgtaaaatggtacagctgctttggaaaagtctggcagttcttagacatcgagttaccacgtgacccagcaattcccactcctaggtgtacaccccagagaaataagaacgtatgtccacataaaaacttgtacacaaatgttggtggcagcattattcatgatagccaaaaagtggaaacagctcagatatccatcaattgatgaatgcataacgaaaatgtagtatgtccatacaatggaatatttggcaataaaacagagtgaaataccaatacatactacagtagcaacattcataatgaacttgaaatgactatgctacgtgaaagaagccagtcacaaaagactatgtattgtgtgaatatattcatacaaatgtccaagataggcaaatctaccgacaaaaggtagattcgtgattgcctagggctggggctgggaaatgctcaacaggcaaagacatgaagggaagatataaagtctcaggctgcatctggggagagggcaggctgggcagaggcacgctatggctgacgctggtggaagacctggcatccagagggcagacctgaccccagggaggagacctccaggcagctctgcaggcggcaggcttgagggggcatgaagccacccacatctgctctccctttcacacaggctcccccgttgcctccagagccaaatctaggcccctgagccttgcagggaggggtggagtttggagtcacacaggcctggcttcaaatcttagctccaccacttactcgctgtgtgacctctggcaggtaatacaacgatctgagcatggggctttctttgataattggaaaaagagggtatttattgggagtgtaacaatggtactctctgtaacaggattaaaacatgtctgcaaattctttgttactcttctcatggagaagtgaggtctatgatcctttaccctgaacctgggcccccttggtgactggtcaacccacagagctccagcctccttggagttcccacaagccaggccctggccaggcacttccatgtcttaacctcattcaatacaagaaccccataaggttgcggttataatccccattttacaaatgaggaaatgaaggctcccaagcagttgatgtacccaaggttgcacggctgataataataacaataacagctaatatttttgtagaatttactgtatgccagacaaggctctacactaagcagtgttctaaacaatattcactctgctttgtaaatatagattcatttcatcctcaaaaactctgtaaggtgaaccctattgttatccccattttacagatgtggaaactaaaacacagcgagattaggcacctgcccaagttcccacagctagtcacaaatggacccttatccaaacggaggcgttctggcaccagatgccttcacaatcccccagcattgggcacccatccttctcctgcttctagactggaagtccccagagatcaagaactgctctcattcctgtttcccttgcactggcctggcacacagtaggtactcagaaaacgtttgccaagatgaaattaatcatatgacattgggtctgctcttctgaaggaactatgcttctcttcgcatcagcgtctcagaaagcccttcatcacgaactccacaaaataaccaggcctgattgatcagtttttgcttagacgcaactttttctttttctttttcatagagcccatttctaggtaggctctctctatgtacactaacggggggggggggaatgtgaatccaattaacttcaaatttagctcataatgaacttatctcattttgctaccagctcggttctcatcgtgtggcagtaattaaccactgggggttgtcactcccagacacatgacacagaaatcctcccagtccttcgcttcaaacccttgcagaattcattaccctgacagtgtgaaaacccttcactttgaataccatagggcaccaaccaaactccccctccatctacctgactgtgtgtgtgagtgagagaaagaaggaagcaagccatcgagcagccattaattattgtgaacaagatgagaggtgggggcgggatcctggtgatggcttgatggcccgagagggtctgccagccttgacagccctggggcaagaggtcctgcccagaggagggagatcttagcatacaaggcccaaactataagggaatatgggggaactggctgggaaaggcagagctctttgcgaactggcaactctgtctgctggggactcctaaggtccaggaagcctgcacactccaggcaacacggattgctgtgtgacctcaggtaaacttcaccccctctctgggccttggtttctgggccttggttatctgaatactcaagcagtgggaacagatggcctctgagggttttttccacagtaacattccataagtcggtggcatcatttcacccccatgttgatggaaaagaaggtgggtatcaattcctacagagacagatatggcagtgcctgctcgctgtggcctccacactcttgcccacagcatcagacttcctggagcccctgaattaaacccgagtgaaaggaggataagcataaggcacttacagaaggagatgggagtggtcagtctgcaaatgaaataaaatcttcattttaggctgggcgcagtggctcacacttgtaatcccagaactttgggaggccaaggcaggaggatcacctgaggtcaggagtttgagaccagcctgtacaacatggcgaaaccccatctctactaagaatacaaaaattagctgggcatggtggtgcacgcctgtagtcccagctactcaggaggctgaggcaggagaattgcttgaacttgggaggtggaggttgcagtgagccgagattgcgccactgcactccggcctgggcgacagagcgcaacttcatctccaaaaaaacaaaaaaaaacttcattttacatattgttcactttatatttgtacaagagttatgcttttaactttttctgaagtatattttgacacctgttgtaggaaaaggtgaacaatgccaaagacaatgacatgagctgaagattttcaacaaaccccgaagcagatgacagtgaacaagtgccaccttagggagagggggagaaacagctcaatacccaggacgtggggcggggattcatcctgctacgcacacgtcggtgcgtgtgtacacgtagtgcatacgccgccaggcttattcgttccagctggtgttggaaatgtgtggcagtttgaacagggttgctctggagtctccctttgtccagacctgccactagtggagggtatgctgctgacggtagatgcagagggggaatatttcacccggaggggaagggcagtgggaatggtgatgtaacagcctacctctgcctgcagacaatggatgtgctaattgcagatgagctgtatccagtcattaaagcggatctggcaggctcctaatgacaggtttattagccattagtttgggtggtgttattgacttaggaatagtaaccctcaatttcttttcccaaaattacctaatccccacttttaactaattctgactgacctccttctaattgccctggctaaagatctaatctggatttgtagagccaggaagacaatctcagaatccactaaccagggagctgtttactttgctaaccctcctcactccttcctctgaattgaccgcacccacctccctggaatctctggaactatcacactccaatactgtgtttcaattttggaagcgtgtttgaatttcacctgcctggcattttagagcagacactgggactcagtctatatttccatgcacatgtatgacaccagcccccggaaccagcaactgttgagccaacttaatgaaatgacaaagtcagggttctaattaggaaagcagcaaagcagctctaccacactgatggctctgggcctccctgccacgacggggactgctccagagacaggaggaaggcagtatttatggcgcaaggattcccagggcaaagtgggctagctcgtgactttattcattcgttcactcattcatgcattatctgacactaagttctaaacactgtcctgagtgctctaaaggatgcaaagatgataacagtaacaataacaaccaaaacaacagcaactatcctttacacagctcttagcgccaagcattgttctaagcactttgtatgtattatctcatttaagtaccgcagccactccaggagatatcatcaagctttacaatccccagtttgcagataaggtactcagctcttaagaggtgagctggatgcaggctgaggctgacttcagagccagtcactcctgcctcacacacacgattgtttcagtaggtgaatcacagaatacaaaatgcacgctcccctgtgaccagtcagcttctaggacttcacctatggaaacacacagaaaaatacaccaagatatttcatgggaaggaaggaaggcagcaatccttattgctgggataaataaattatgatacttgcctgtggtggaatatttattatacagttttgagaaacaatgaggtagatttgattgtggaaattgtggagcgatctccaagggaaactactaagtgaacaggcaagtgtggaagaacactgtgtacagtataattccatctgtgctagtaaaaagaggataaaatctggaggcggatagaggaattaaaatgttactgaaaatatacagaagacactgttaactttggggagagggattacagatgggagggcttaggttgggagtgggagatttatttttcattttctatttttctgtatggcttgaatatttaaccacatgtgtgtattactttttattccaaattaactttttgagttaaaattaatgttttcttaaaactaaacacagtccgtgcccaaggggctcactcacactctagaagaagagataataatgaaccaagatgtatgaagtgcagttgccccctgcccccactgcagccgctctcaggccagtgtcatggcaggaacttctcgcgttcaaggacagcatcacgatgccagcagcaccttggccaagttgcatactcagagctcatgtccccaccaggcctctcccaggctggcatccagacctctgtggtggcctgccctaccgatctgaaatgcaccatgaacaatcccagcccctgcaatccggctatgagtagccaaaagtgggcacaaagcctgtccctaaatccttcctggcaccaactctggaaggctgggagggacttagggacaggctttttgcccactttcatttgcacatagttccgacgagctcagtggcttggcttcccagcccccagcagattaaaaacagcaaaattggaaggaaagagacttctatggctaggaaactgacattaggaaaagtgacaggtggcaggtgagcagcaaggacagagacaggaaaacaatataatcagacataagaagcccaagccgcgatagtctggggtacttggtggaaggatgagccgcccacttacagacgtgcagagccttcgctactgtatcggcgaggttcagtaatgctggttcccaaagatgaacctttgtcatcagaggacggtgacggtatgtcacttcaacatgatattatgcacctcttatccaagaaactgataggacaaaccagtgtttgacaaacctatgtaatcataattagcatgtggagagagcccaactgtccatctgggtccagagtggctccctggagagcccttgtgcagtgcaaggcaacagaaagacctccaggaggttggttgctgatcgagacccgccacgcccccactcctggttttggtacatgcctatatcaagccatctccaaactggccggtgaacatggaagacaaatccaaagacgcctcatgtttcagaatcacagagtcccggggctggtccgaaacttggcggccaccccatgttctcctgcccagggctggcagtattcccatcacatgtttgcccagcacctcttgcccaccctgggtaggagctgctaattcagaacatacctgtcaaatctaatggttgggaaagtctcccttcctgggagatagattttatgtaaacaagataatggctaaatgaaaaaatagaataaatacatgaaagcacagaaaggatagcattccccagactggccttctggatttggggatgtgaaatctttgtaaagggggccatgtgggatggtaggcagtgtgcgatgggacaagagccacagggctggtggtctccactcagatcctggctccacactcactggccatgtgatctccagcaagtcatttcgcctctctgtgtgtcaggttttgcatttataaaatgaggacgatcctatcttcctcacagtgctgtcacatggattaaattaacaaatacaggtaaggcccctagcacagggcccagcacagagtgaacactcagtaaggccaccattgttaaccgtgcctcctgcgctccacagccaccctcgggccatcccaaaagcaaagccagattgggcttggaaagcacagctctgttcacatcgagctgctgtcagaaatcctcgatggctccccactgcttacacacacagctaagagcatgggctctgagggctcaaatcccagctctgccacttaccagccgtgtgaccttgggcaggtgaccccgccttcctttcctcgtctaagggaggaggaaggggaaccccaacagtccttctctgatggagtggtggcgagggccgagtgagtgagacagctctgggaacaaacataggctggtgcccatggcccactcacactcgctgcacctccctaccacacgctttcatttgtgctaaacctctgccagctccggggtccgaataaaacatgtggtctaaatgcggaagacgagaggcgcagagggaagcaggcctgtgcacaaaggtggaggcctctggagcggttcaccccatgcctgtgtgtgccgccgaatccgccgaatgcatgcgaggtacatgaagaatggtggccagcactgggatctttctatttgccagaaactcttctaaatgccttacttgcgtcacctcatttagtcatcagaacaatcgtatgaggtagaaatgatcactattattattgtccttgttaagaggctcagcctagcggtgaagggcaaaaggtctggagcagattctttggattaaaattactagttgttctataaccttgggcaagattacacctcagtgttctcatttataaaatggggataatgatacctccttagactgcttaaaaggattcaagactcaatgcatgtaaagcacttaggaagccgcctggcccatgtaagtgctcccaaatgtcagttattacctctgatgcctgttactgccaccaatgtacagaggaggcaatggaggctgagagaagtgaagtaacttgcccatggttgcactggcagaaaatgtgacaggttgggggtttctaggattagaaaccctagcagtctgtgctcttaaccaccaagttccactgggcaaaaagcccctcctggggctcaaatctaagatgtgtttgcaatgaaatcaggcatggtgggagggacctactggatctttgaagctaaggggtaagttcagggctgggggaccaagtgcaaagcccatggaggtacagccagccctggactaggagtcagaaaaccccgcacttcctcactgtgccctcgggcaggtcccctctcctctgtaaatgtcctcacctgtgcacctgatgcccaaccccaggccacccaccagagggagatcagctaatgctgcagagacaggaggaatccatagtcatcggcttctctgccctttgtccaggaccggctgacagctcatattattttaagaaaaagtcaataggtaagtatccaagcctctgataggcttctgatttcttgtaaagggactgaggcccatcacgaatcctaaaccagtgcctcagctggtccagggggcaacgggatagtcgatgtcacagtgccaggcttggaaccaagaaagtccaaacagacaacgctgatattttgtaacgccagctcctacacctccaattatttcctcaaaccaagcagcaaggaggcccatacgagacaggcaggctgagcaggtgcactgctcgccaaggaaaaccaagcccatcccacagaggcacctcccagggtgcacagcaaattaatgtgctgcagagaacatgcattaaattgtgctgctaggctggtgctgcaggctaccaaagtgccagcccatccctctccagccctcccttccctgagaagcagatcaggtgccagggccgaactatctcacagaatcaccggctgcttttgctagccaccagcctagctcaggctcttgcttgcaggccactgctggttctgggtctcggtttccactttgtaaaacatgattgatcacccctgccctgcctccctcatgggtaatcagagccccaaatgggatcacagaagtgaaagtgctttgtacagtgcaggggtagggacgccactaaacagggaactccatgtggggacaggtacaagagccaatcaggcctgggttcaatttgtccatagatggggaaattgaggctccaagaggtgaagggtcctgcgcaagctctcacatgtagcaaagagcagatctgagattcggttcctgcagtcagactgcagaccttctggaggagaaggcactgaaacagggcctcagtgtgtagggttccttcaggaggacctagaaggagattcgggctgagttggggcagagtgggcaatgcagtgggcatctgactgctgcctcctgtgagcctggaatggcagatgtgcctgggactcagtctgagcttcctcgggtccaggcagcagctgtgggtaaggtgtgagggctgtgggcccagaggtaggaaccgagctgggcttagcagaggacatgcgactgtgagcggccttcacgctggctggaaaaccgctgtggaatcagggagcaccggagctcgaaggatgctaaagttcaaccagtttgggggaggggtcgatctgttcccatgagcctccagggggacctcagggacctctggagctcccattctttcaaccagtgaacctcacttctaactagtttacatcaggcttcccaggaagattcatctgaataaaggtttcttcaaacacacacacacatacacacacaagcaagaaaaaaacaaaaccttaacagttgctaaaaaaaaaaaatcactaaatgcctattctgcaggtgagaagaagaaactcctgcaagggcagggtcttgcccagagggctgtgcacagccaggtttgggtcctggacccagcatggatcctgatccaggtttcctttcccaggttttctctgttgctttcctgcccttccctctgtcttcacagaacacctctcaagctcaagaaactgatgctcaattttcttccagtagtccagggcgctcatgtccctgatgacgagaattacaacactttcttttgtgagtagatctaagaatgccagcatcttcttgggctctgcagacttggccaaagtcagccgtgtccctggagcccgggagatagggctgagccatccttgagcctactggtcaggggcaacacacacagaaatccgacttcacagaatttgactctaactttttccttctgtgctaccagcaaatgcctgtgcctcgatgagccttgctttacaatcctgaaaatgggaaccatgccccttgctctgcctcccatggtttgttcctgggtttggaaatggaggatggaaagagggaaggaaagagaatgagaaagaggaacaaggcagtcttctggttaaaacaaaagaaaagaaagaaaatagaacattcaaacgtgtaatccaactcagcacgagctttagttttaaagttccacaggccagtgcttgccagcccagcccagccaactgcatattatttatgcggcctcaggcaggttaatttctgctcctcagttttcttgtctacaaattggggctagtggcactatcttcacagggttgtctgaggtctgagccacatcacctggagaaggaggcacgtggggtctgcattcacatgtgtaaagggcctctcttcttccctctggtctccgggccccagaaccccagcaacccctcccatcacaggctccttctgccccagccatccccaccaaattgaagctcaccgggcaggaggactaggagaattaaaacatgcaatcaaacagcttcttgacgggaaatgctttggaaattttcggctccatttacttctcaatctaattttgtcctcggatgcacattatgcgcgagatgggatctcatgtggtttgcccgctctccgaacaccagcaggaggcacccggcgtcttgattgcagctcccggctctcctcgccacatgagggggcataatgagggcacccagcaggctctgggggcggccctgggcaagaaggcctggcccggacatcctggcacccactggcccagcctctcccactaacacccctggggcagagtctgggggtgtcatccacagccaactccagccgcactgcagacacccatcgccaccgcagcccagctgaacccctgcctggctccagccacctctgatccatgggaccctgcactccttggctccccatcacctctggatgaagtccagacccctcatgccctctcctcctgccttttcccaagcatctctactggggtggtataggttccagcacccccaccagcaccacagccctaaatggcttgctttcccccaactcgcctccatgccttagcaaatgttgccgcagagtcctggcaggcgccaggcaaatgccaccaatatcatctcctgtgaaagaccccccagatgccctggtcctgtcccccacagtcccatgctccttcttcagtgctctcagagccatgctgctccacagcccagcacatgtcagactgctgggacagctgtctagtagaagacactagacctaacccttctggtgcaggtactatgtcctgctcacttctgtttccctgtggtacccatcacgatgtttggcgcagagctgaagctaaacaaatgcctaggctcattctttctttcactcagaaaacatctcccaggccactcctctgagcccagcctgcgctcagtgctagggattttgtgcccataaggacaggaggctttttttttgagcccaatcggtgttactttccaacctctccactgagaaaagccaccagccaaagcccagaaactacccaagggctagccaaagggaaatgcctgccagccaacccccaggactacagggttggggccgggccaccaggtccttgcttcattcttctcccttactttttccccagtccaggcatcctctgcaagtcactcaagtcctgaaggacagcccccaccccatggcctcctgatccagcctcctctcctcactatggctttcctggagcttcagggctccactgccacaacccccatcccaaatccagtgcaaccatttcgtcctttcttcaggtggtttctggccatgtgcagattcccttgggctttcatttaatgctgcctcaaatcctgtggaaatggatgggctatgggagataactggctggaagaacaaggccctcctaactaccaaagccaatggattctttccagccttgttaccttggatctctctgctcactctctaaatcttcaaatatttttggctgcctgacatcatcgaacatccttcttttgtttggggcattttccactttaagagttcaggcttcttgaggccaaagtcagagacgtgatttcccagcctcccttgcgtgagggtgcaggcatatttttgggtcccccaagtagacacgtgcgtgtgagtctttaattcagaagctgatgacacaaagaagcaggcaccacatggagtccatctgctgaggcggaggtcctagtggtgacatccggtgtccagcgacggttgtgtgaaccaaagggtctgcgtccacaggcgacagcatggccgcttcacagagtagtcctgcagcatgggccaggccttatgcctgactgggaagcctccaaacctggttctgtggccctcttggagaccctgagcatcttaacatccttagaaaatcccttttctgcttaacaagccagagagaattctgttgtttacagtgaagtcctgtgactgctacagcctccaagatggagcgcatctgtggcgggagtgtcaatcaccactcactcccccactccgggcttctccatggcgtcctcctccatggcgtcctcctcctcagccaccctggtttcccagagtccctctccagctctgctcctccccatcgtccttgtctaaagctctcaactgagtgactcacatcctcccaccacctgtgtccatgcccccagtcctgaccccgcccccactgcctctgcacattccacctgagtgtccctggggtaccccaaagttaaatattcaaaccagctcctcttccatggtcttcatctcagccactggctccattatctcccgggtcccccagactccaaccaggggagcatcgttgatggccgcccacctgttcctcacaagtgactattgccagttccacccctcaaaatgtttcctccatccccctttccacagcctgggttcaggtcctcatccgttctctcctgggcttttacagccacctgggtcaggtcaggtcttcctgcgagtctcatcctccttacctccaccctctgtcaagaccccacagagattcccctggagagtcgactctcctcagggctcccagcacctgcaaggtctgcccccaggtctttggcagcctcagggacctgggccctccctcatctccagctgctttcttcactcatcctttatcatgctgttccttctgcctggaatgctcttccctcacctgtttccccagcctggttaattcctgctcatttccgtgtgctcaagtgtcacctccctcaggaagccctcccacccagcctcgggaagtggcccccgttgtgcacctgtgacatctgtcacatgcctctccttatcatttcaccttttaaaaacatttactgagcacttttgatgagccaagagcctagcttagaaacccacgtgcatgatttcatttaaccctagaacaaccctcagaacaacccaatgaggagagtgttagcctcacttccaggtgaggaaatggcgtatcagaaaatgtaagtgtccttcccagggtcagccgctaaaaggtaggggggtctgggattggagcccagcgctgtccgaccccacgccctaaacacctaatggtgatgctctgttgcttcaccccagggagctcctgtcaccagcccaggtggcataaccctggccaaggaacatcgccttgctgagcctcagcttcctcttctgtaaaacgagggtcaagtctttccctgctgccctcccaagatggtaggaggatctgaaaaataacagatgtaaaatcacttagtaaactgtagagagtggtgcacatgcaaagaaggcattagcatactttcagggcttgtctcaccaaacaatttccttgctcacattagaatgaaaggccttctatctgctgcttcttttagagtaagggtgagggagggctcccatcccctccctagaccagggtgtccctgtgatttttaaattcactatctagctgtccctatcccccctcccaaaacacaattgtgatagtcaagcaaagaaaggtgagagaaagaagaaaatccataaaggctcggcaaagcggtggcggtggaattctccagctcctgaccaccagttagtgacgtcaggatttataactgtattaaatggtctgacaggcagccttgatatatcagttcccccttcttcccaaatcacagacaataaaagctttggcagtgaaagtcattcatcatcataaagacctgagacatcccagtcatcaatttcactcacatccttaatacactggagagagtgcaggagttgagcacctcaaaaagggaggaggaagaaaacacgaaggaagattgaacaggaataattacaaaggtcaaagaagggattcatccgggagggtgccgtgggcagagcctgtccctgctggaagtgtgctcaggccacagagaaactaggccactgatgggcccagcccttagagaggccctgaagcccaggtggagaggggccaaaataggctgcaggatccgagtggggagtgttgggggcatgggaagccacaccctggctccatggccttaggctgggtttcaccagggccttttattccatcagcctcattagcacaagacggattttaaaataatgaagccacaggtatctgtttgaaatctacccccacccacactggcacagacggctatttgtgccaaccatggttttcttttgggcaacaccttttgagcaactataacattcggggctgatattagtggttgtgaaagaccccataaggctgccaatccagctagaaaagagtagctgcccagagccctaagtgcagcctctggcttcacccctccccttcccccaaatccagtcacctggatcacacctgctggcctgccccgggacctgggccgaggttccccacccctcaccaccagcacttggcatccttcctcctctcaggcaggccgggcaatggaggataagaaagcaggaactccatggggtgcaggtgtgaagaactggggacttcacgacttgttcctgaagagaaccagacctaagtggcatgatccttaccctggcacttggccttctctctcccagaccaaggaaggaggaagaaagtctgtttaagaaaagcagttggctgggaagggtggctcacatatgtggtcccggctactcaggaggctgaggtgggagcatcacttgagcccaggaatttgagaccaacctgggcaacagagtgagaccccatctctaaaatatttgtttttaagtaatgacaattatctttcttatgcttttattttttgcttgaaagcaaaagaacagaagaaagctttggtctaggtggggagtttcttgaagcacagggctccccacaatggacaacacacagcctgagggctgggaggctgcacagcaggggctgagagccctgaggctgctggggcatgtccaggtggcctggcccaggcaggaacatgaaagaatacacagcatgtttcccaagaaagaaggagcaatcatacctgctgtgtctgcccatccactcaccaaaccttcacccaggacctgctaaggcctggtcaggctgcatgaggtctgtctgagcaggaggctgacctaaggggatgccagcttttcaggggtgagtcaacccactacccttcaatcagatatcacccaagaagccccatcagtcccggcccctacacgtggcctgaaatccacctatcagctctgttcttcagataggggtctgtccaactcagacttcctctggcacacttccaggctgccatgactcaccaggctttatgagaatagtgtggcttagaggtcaagtgtgtggtctgtggagtctgactgccggcatttaaaacctggctacaccacttacaagctgtgtgaccttgagcaagtttctatgcttctctgtgcctcagttactgcaccagtgaaatgaggatgagaagagtgactcccacaaagggttgttatgcagattagacaagctattaataagtcaagggcttagaacaatgcatggtgcagagggagtggatgggagcatcagctatcactcctgctggtgactcttggctcatgggaccctagcttgggcctgcctctctagctgttcaggattgaaaccaactctgggggaagagctccctagtcccctatcctacacaccagccccctaaataggctgctgggccacactatccttaacatgggcatgtgaccccatcttgaacctgggttcacagaggcatacgaaaggaactaatgggtctgaaaaggcaaacacttctctggatgggttcatccagacaggcagcaggtgcccctaagcattcatgccagaaacaaccttactaaacatttatagatgatctcagggtgggagtagaagttctatggcctcacagataatgaaaataaaagctaatagagataaattagagagagatttttttcctgagctgtgaacttggccaagaaaaaaaaaaggcagcagactagtagaagctaatgcatttgggaagaaataataattatgataatatcttgaattcaaatgtgactttatgctaatcaaagatatgtatgtgagtgtgtgaatcatgtcaataaccttgacaatgacctagaagggtggagtgctgcgtgattagtaacgaccaatcatagcagacagctcgttggtttattaattcatccattcattcattcaataaacacttcctgagtacatactatattccaagtcccatactaggctgtgctggagaaggcagagacaattcagaatcttgtagactaagaagaaagttaggctggacacaaagaattataaatcaaggcacaatgggctaacaggcataatggtgggctgatcaagggcaatatgacttctgactgtagggtaattgaggagggcttcctagaggaggcagcacttggggagtgctccaaggagacatgcactgaaggcacatgggcagggactgtcaggcctgctggttcttaaatccctcagcagtgttgtgagatcctttcacaggcaaagtcctggaccagctcatcttcactttcctgccggggaggccggacccctggcacagtcaaggtggccggctctccatgagctcacaagaaagggcccagccccttacagcttctgggccattgtcacacactttctttcatgtgcacttcaccatagtcccgtaagggaagaatgagccaggatttataattcccactgggcagacggcaaaactgaggttcagagaggggaagggaattctcaaagttaccaggagttatggcagagctgggatgaagacctgtgagcctgactccaaatcaggcccctctctccctttcacagcagactgccgccacctctgggcaaatgacagaagcacccgaagtacaggaaccagcaagaccaaaggcttggagtcagggactccgcatggctgagttgaaagatggcaaaaagacgggcctggataaaggttccactgggcagcttcatagataggcagatagagggcagtggatcaaccaggctgagaaaggaggataggagagggaaaaaaaagacccactctgcaaggacaaaggctgagttccacatggaggaaagagcactagaataggagtcaagggatatgggctccagaggtgtctgactttgggagaacttgagttctcagtctcagcctccccatctgttcaatgatggaattgcacctggtgatccctagggtttatccagcacctatattccaaagtctcttgactctagggagggcacaaattatctcaacactggggcagatggaggagacagagtgagaaccagccagtgctcacagagagagtggagaaagaacaggcagaaacggagcaaaagaggtgcccagtgccctcacagatgatgggtcatccaggggaactacaggacacacggtgctcaaggaggcttttatatttggccctggagatgtggtagacagaagaataatccaccccccaccccaggatgtctacatcctaattcccagaacctgtgactatgtgaccttacatggcaaaagggactttgcagatgtgattaaattgaggtatttgcgatgtggagagcgtgtggatcacccaggtgagcccaatgtaaccacaagagattttagaaacaggggcaagggggtcagagtcacagacagaagatgtggcagcagaagcagaggccaaggaggagagaagatgctactctgctggctttgaagatggaggaaggggccatgagccaaggaatttgtgtgtcctctagaagctggaaaaggcaaggaaacgaattttaccccagggcttccagaaggaacacagcccaccactctttgattttaggacttctgacctccagaactttacaataatacatttgcattgttttagcccctgggattggggtaatttgttacagccgcaactggaaactgcaggaggtcaatggaacatccaagacaggcagccgtcaggcctgctccacgctggacagatccccccgcaagctctcccaccagcccctctgctggggacccctaagtctgactccctgactcaggttgttttcccgagctccagattttcaaagccgcatgtaagaagcccaggcagggcttttagtgctttgcaagttatccactcacttcatctacatagtgagttctatccccattttatagatgaggagactgaggtgtgcacacatacatacacacatgttgagaaaccgaggtcaccaattcataagtggcagagctgggattcaaagccaggcagtctgatccagcatctgcacacaggactgcacgtttgatcagtttcccagaccccagtgggcgccagcctctctgtgctacagtgagcggaaaagggctctgcttgaggggcttggtaccaagggaagcaggaccgtagaggagttaggagaaaaccatacctccagttacaagctgtgtgaactcacaggtttctttaactattacttgggaccaaaatagtgcctgtgttttaaagagtagaagattaaatgaaccaaagtacataacaaatgcttattattaaacattagctatcattgttattatctcctgaggcagcctattcagctttcagagagttcaaactgctcagaagtgcttcttctcactaaactaaagcttcctccccgtggcttccccttgtcctcctggcagcctccctccccgcatagcatgggggaggccatagccaggctccaagtcagctgtctctatgccaacagccctgggcctcctgtggatgccaaggtgccctgtcctctgcccttcttgggcctgttcacctctgtctgaagccccgtgtatcaaatactgagagagattcgccccctagccctgaggatcggggctgttcagccacactgctagggaaaaagtccatgctggttcgtccagttcatcagacagggtggaagctctttacttaccgacagctagggtgtccttaaaacatgaataaccttaaaaaaattaaacaacaatgcagagagtttgaacccatttataggaaataaactgtatgtgtacatcctgacatgtttctttatgcacagcaaaggttctggaagaacacataccaaatcgccaactctgatgacatctacagaatggattaggaatagactgaggagacgtggggacagattgctgtacatacttctgtgccatttgaatttattttacagtgaacatgtattactttgcaattaaaaaggaattattcactttgggaggtcaaggtgggaggattgctcgagcccaggagtttgagaccagcttgggcaacatggcaaaacgctgtctctacaaaaaatacaaaaattagccagcatagtggcgtgcacctgtagtcccagctacttgaaaggctgaggtgggaggatcccttgaggctgggaggacaagggtacagtgagccatgatcacaccgctgcactccagcctgggccacagggtaagaccctgtttcaaaaaaaaaaaaagaagacttttttttttttaagagaatggtgagagattaaaccaaagagaagccaagagtggatggcttccctggagcagcttagatgttgcttccccataaaaccttccccagaccccacagagagaagcaactgtcccttccttcatgctgtcaaaagcacttggcttctcccacaatatttctctttctttttcatttttgttttgttttgctttgctgcatacatgtatccatgtttgcctcccccatcagactgtgagttggctgagggcaggaattctaaaaccctcaggacttagactaggctgatgtctgacatgaaggaggagttcagttttaatggagagatgagtgaatgggtgatgaatggcagaagctctgcaaattgcccaggtgctatcctttgcactttttctcctccagacaatgacaaggcagtggggatctctgaccacaagaacaagctaatgaaatcgctattttaggaagatggatcacagcagggtgggctggatgctggaggcccagagacctgcttgaaggctctttggaagggtcggctcccaagccactcacaggtataaaaatctatgagaccattagcagaagggctgtccagcttcatttattttttatcctataaatataaggtcagaaacaactggagtactttccactgaaattatttttttaattgatgctacactttacacaaatattaattcattttattcaacaaatatttcttgggaacattgtgctaacctgaaagcaaatcatatttttcttctacgtgcattttaattacgaagatgcttgagtttcatttcggctttaaaatgatcggacctctggcacctctgaacctctgagtagccttccaaacactaagattccaaaattctaggtttctaggaatccaagaatctataattgtgagtctatttaccagtgaaaaagcaaatacttcaaatttcaatagaattcacccccaaatcgttctggaatgcaaatagccctgcatctctggggagagtccaatttggatatggagttttcactctgcagccactgctactgcaaagggcccacaacattgagtctggagagagcggatgtcattgcactgggatgaaacgctgtgttgctgcacattcttgagaactttgcactcgctattccaggcccttcccagcgggtggtttgcacactgagctgatactggggaaagccatcccaggcaggtagaatagcttgagcagaggcctgaagtcagggacaggtaaggctggctggagagcctgtgggctgcccttcctggcttgagagaggggtttctgttgggcaggaatgaaggtaagaggacacaggaaggatggggtgactgggttagaacagggttgaaaacccaatgcccacaggggccagcaggtaaggtaagtggatgaagctgccaggtggggtgtggggtaaacaggagcctgctgctttagctacagggggcaaccacttctcaactctccccaagtgtggccacttgggaatgtagacccaaggtggccgagtcttactttttttccaagagaagctagacattttaattttttttttttttttttttttttagatatagggtttcgatcctttgcccaggctggagtgcagtggcacgatcatggctcactgcagccttgacctcctgggctcaggtgatcctcctgccccagcctcccaagcagctgggactatgggcacgcaccaccacatccagctaatttttgtagatttttgtagagacggggtttcaccatgttgctcaggctggtcttgaactcttcagctcaagcaatccaccctcttaatgttaaatctcctgatttttaaggcacttttaaatttaactttttgatagccgatatgttgataaggttcaaaaaatcaaaatgtaaacaccgctcagtaaaaagtgttctccccacaccctctgcctaaacatggttaagtcctgagtacccttccagagtttctttaattctcacaaacataaatatgcattcccattgtcccttttttacgcaaaggcagcatgctgtatacactattctttaccttgcttttttcataaataatatatctcaaagatacattatttacatcccctatgaggatataaagagcttcctcgttctttcccactccattgtgtggatgagctattctgtatataacaaggtctccacggatggacattggggtgtatctcctctggttgttaaaatgttaggactaatttttttttaagtttaaaaaactctatgcaaatcaaagcacctttgggctggacctcgggggcacacgccaggctaaggggtgtgttgggcagtgcctggtctatgagttcaaagcatagatgcccgcctggactttgtagatacctcagcttctggcctgacagtgggaaaggaaatcacttcaactgagaacagctttgggtaaataccgctggaagagacttcgcctttgaggtagtgaaatccccaataccagaggtgaccaagccctgatgtggaactgaccccgcgctgtgtgaagagtcaggccgccggacctctatgctttcctctaactccaagagccctcgaagcctgatttatgggctgagcctggctggcagcagagaaacaactgagaaacctgcctcatcctttaggatatgcatgtcattcattcattcgttcattcatttgtacatttaaaaggctgaagctgtaatttctgccagaatgcctttccccgagctccccacaaagcttctcaacatttagatctcagatcaaacaccaccattttacagagatccccccagctgggcaccactccctgagtctctctcttctctcccacttattttcttcagagcacatgccctggtaaaattacattgcaaatttattctgtgtttactgtaaattgcctggttctgccccacaagtaagcccagtgagggcagggactgtccaccaggggcaccatggtactcccggcctggcacagagcgagagcccaataagctgtaactactgatattatctcctttccaatgcacaaaacaactttttttttttttgagatcgggggggtctccctatgttgcccaggctagtctcgaactcctgggctcaagtggtcctcccgccttgacctccggaagtgctggaattacaggcatgagccacacgcccggcccacagaacaactctgatagccagcccagcatcttccatggaattccgaggacggccccgtggccgacactcagttgcagggtatcatcctgcactgtagctcttgttgtaattttttacagcgccttttggcagcctggatacataaggtgttcttgtatttttgctttcattattcattatgatttcactctgagagaagaggtatttcactgcatctcatgagcctcaaaaaggctcataaaaatgggtcaaaggaggcatgccccatggaaaaatgaacaaatcgctgttcagagctgcctggcaccccgccagaggggattgtgacagaggaggcagaacatatttcctgaggaggaaaaccccaaagccactcagcccagcagagggtctccaccacgcagccgaaaccagcctgggctccccagcccttgagacgccccaggtctggagtccgtgggttcacaggctgaaagcaaccccatgcagtgtttactgtttccccaaaatccccaaacacacagtggatgtccctgcttccaatgatagacactgggactctaaacaagtggaaaaaattcagagctctccacccctgcccttcagccagacatcctgacggggtctccaagactccaccaccttctgaggatttctgcgggatcaggacccttcggagagcatccccacgtagagagctgtcgctgggcaaatgtctctttgtcttatgcccccagggcagagataagggactctggacaagagcccagacacatagtaataactaccatttatggggtgtttaccacctgccaagcactgtgctaagcactctgcaaggtccgctcatataatccttgccagaagctgtgagaaaactctagtgctggcccattttacagatgggaaacttgggcccagaaattagtaacttgcctgagatcacccagctagaatacggtgaagtgggcttccagctctggtaatctggcttccctgctgacattctcaactgcacactgaaagagacgccttcaggaaatttgaactgggatttttttagtccatttcatcatataatggcagtaggctgtggaagccagggccctgggggagctagaactggggctccagctctcactcactaaatgtggccttgagcaggtcacttccctctcttgtcctcagcctccccagctgtgaagtgagtagtgggaccacaggatcctcccaccctacccaggtatggtcagaacgtctgctctgaggaaggctgggactcgccaaagctggatcccaaactcctccaagcctccttctccacaactgcccacatacactcagacaccccttcggtggctcttaatccccctcctcccactggctcattttatccttgaaacagccaagggaggcaggggcagaattaccacccctatttcatagatagggaaatgagcttggagagaagaggatgaccaatgtgtccaaagacaggaccagttaggtgcaaagtccagacagaaacctgttcctctgactcctgttccagtgctctttccctcagcccttggctgttgctcagattaaaagccagaagagggtggactttctttggctgccaagttttgggtattgagactccaaacattgaacctgagggatactgcaaatcagagcaggtggactcagggacttggcagccattctgtctgtctttgtgggtatttccgctactaaaaaggggcagtgcccagggggagcctcagtccccagggcccaggtctcctaccaggctagtgtttcccaaacttgctggcccacaggaggcctctctctgtctcctcctcacatgccaacttactgatgcaaagagatgctcctcagggaaaaaggccagcaagatacagtctggccccattcctttgttctctcaggcaaaaggtcaggtggacccagctaagtccttcaccagtagagaggtgagcagaagtggggagcctggtgccccacccgctgtcctctctggcaggtaggcacagtggctcccccatcagcaggcctgtggcccaatgagacacctgcagataattagtcccaatcaggacaggcccaaactgctgacagtgcagtaacaggctggccatgtcaccagtttgcaaatggtgagcagtttcagaactgtggccctagctggtagagcaggtgtttaacttaatatttaatgcggcatatatatccctctctaatgagatcttccctgagcagcccagagtgtgagggctgagatagagcagcgcagaagccatctgttccccagaccccaggtagagccctgggccgggctcaccatccagctgggcacctacagcactctgggctttgtggggagggaaaaggagagaggtggggccggaaggttctgagtgtcccttgaagagctctgcactatgtcagcacatccgctaacacaggtggagttagatgaatgccgtgtggtgaaacagagccccccaccccccaacagctcctgggggcattccttcaaggtgtttaacagttctcaatggggtgggtaactgcacctccagagggcgttttgaaaatccatgggggcttctccctgcctgaggggtgttactgccctgcagtgcaagaatcccacacagtgaagactttttctccattcttcacaactctcctgtcctgccaaacattcaggtacgtgagaaatccgtttacaagtatttgaatctagaactgaacttcatttacatataaatgtgaacttgcaatttccatggttttaatatacactgaattttctaggaatgcaactaccgtgtaaatggagcaaagcttgtactttgttttacttggaactttgccaagggttcctcacctatttgtaaaatcacgctggcaggatgagttagtgttagtccctagtccatacctgtgtgtaaggctatgtctggggctgttgcattcactgtgattctgtgcacggggaaagccctggacaccttcattatgtcttgcagtttaaacatacagagcatatacatatcatagtacatattatttaattatacataactttgctttcatctcatttacctcatagggcattgttttgattttatttgaaattagttgtgaagacagacctacattcttaatgaatgtaatttcaggagagtaaaggggcactgtgaatatatgctatcccaaggggatgctgggtggaactgggtggagaactcgactgcaatgcatccctgctacagcaccataatgccccaaaaagcagaggaaagggctcaaagctctcccaccggatcttcacatacaagcatctgatgtgtgtgtgtgcacacgcacatgcatctgtgtgtctatcctttatattttttcatagaaatgaaaaactttcattgttcatatcaatgaaatacttaaatacttaatatttacttcaaagtatatcttagacacttatttacatcggtacagatagttctatttaattctttttagtggctgcatagtattttattgtgtgcaagagacataatttatttaaccagctcctattgatggatgttgcgttgtctgtttttatttaccattataaataattctgcaaggatcatacatatatagatatcattgtgcatctatgtgaatatacctatgacataaattcctaaaagtacgtataaaagttctgagtcaagcaagtaaacatgtgcgtttaaaattttgatagatcccattccagtacgtgtagctctaaaaaaagaaaagtgatcaatattgccaagtttcccttccaaagagattgcatcaatgtatgctcttataacagtgtgtgaaaagataagtttctcatactatctccaacactgaactttaatctttgttaagatgtttttaagtgtctcatgattgttttaatttacagttttaaagttataagtcaggtgaacacgttttcatatactgctgggcatccgcattttttcccaatgaaaagatgttcaggttgaatgaaacgttaagaaaaaaaagtcagtagaaaaaaatgggcaaaggatttttacttattcatttttaaaagctctttatatattgaggaaattagctttttgtcatctgtcttctacactttttttttcattttgttctttgtcttttggatgttcttccatatacatacaaaagatttaaatgtttaatacttaaatttatttcttttgtcttttgtattcagaatatagtttaaaaaagacttttcccactctaaaattataaaaaaatttccaggccaggcacagttgctcacttctgtaatcccagcactttgggaggccaaggtgagagaatcacttgagcccaagagttcaaaaccagcctgggcaacatagggagaccctgtctctacaaaaataaaaaaattaccaggatgtagtggtgcatgcctgtggtcccagctgcttgggaggctaaggtgggaggatcactaggaggttgaggctgcagtgagccatgatcacaccactgcactccagcctggacaacaaagtgagattgaaaaaaaaaaaaaatcccttgaggttttttttgtttgttttattatgacttcatttttgatatttaaaggttttgttcaacctgaatcttattttaatataaagagtgaggaaggtattcaacaggcccaattgtctcaacgtcattaactaaatgatttacctttttttctactgatttcaaatgctgcatttgtgaatgcccaagtatatttggacctatttctgaattttctatgctgttcgtctgtttacttcagtttcagtaacaaacagttttagttattgtagctttatcagatattttaaaatatgctaagacttttactcatttctctatgttaaaatttttctagctatcactgagtattaatttgtctattatttagcatcattttgataaagtcaaaagaaatctgttggtattttgatagaaattattttgaattaataggttacttcggaggagttggcattttatgatatttagttttttatccaagaataaactacatctcttcatttattctattatgacccttaagggagttttaaacttaagtttattcccaggtgagatatatatatatatatttatagttatagttagtggggtcttctcttttattatgttttctctttttttgagacagagtctcattacatcatccaggctggaatgcagtggcgtgatctcggctcattgccatctccatttcctaggttcaagtggttcttgtgcctcagcctccctagtacctgggactacaggtgtgcacaaccatgcctggctaatttttgtatttttggtagagacggggtttcaccatgttgaccaggctgatctcaaactcctgacctcaaatgatccgcctgccttggtctcccaaaatgctgggattacaggcgcgagccactgcacccagctcttttattatgttttctagctaactattgtttacttataagaatatatattatattgataattagaatacttctaatatttttaaattaagcataattttgacttaggcctgggatgtttatatttttttctgctctataatgagactttaaaatggataaatcaaagtataaacaggtctttggtcaagggtttactttaaaactcaatgcatgcccagacttcctgcttgggcctaacaaagaagccttctcctgcagaccccaggacagctaagccactgagctggttcttagcaccaatcttctagatcagttcaactcaaatttcttgccaggcttgtaagataaataaggaagcaactgagtggggaccatggggacctgtcttaaggggcagcagctactgctactgaaccccaaccaccacgactatgtgggaatatgacccagtgtggccaaattttccagtttttgtaagggaatccccaaatccagacttttgttttctaaatattgactcaaatttgtaaaaagctctatgtagccccaactaaacatgtctgtgggctagattagccctttggccagctggccaccagttgaccatttctgtagacaagattctcagaaaggcaaccacagcctcaacttttacaggattattttctacctaaagaggcatgtgcataaatggcaggatgcccagcacacctcattttactgtgtttcactttattgtacttcacaaatattgcattttttaacaaatggaaggtttctggcaaccctgtgtcaagcaaatctatcagtgccatttgtccaacagcatgcgctcccttcctgtctctgggtcacattttggtaatttttgcgacatttcacagtttctcattattattatatctgttatggtgatctgtgatcagtgatctttgatattcctattctaattgtttcagggagccacaaactgtgcccatataagatggaaaacttccaataaatgctgtgtgtgttctgactgctcatcactgattggctgttccctcatctctcttcttctcctagggcctccctattccctgagagacatcaatactgaaattaggccaatcaataaccctacaatggcctctatgtgttcaagtgaaaggaagagtcatgtatctctcactttaaatcaaaagctagaaatgattaagcttagtgaggaaggcatgtcaaaaactgagacaggccaaaagcaaagcctcttgcaccaaacagccaaattgtgaatgcaaaggaaaagttgttgaaggaaattaaaagtgccattccagtgaacacatgaatgataagccttattgctgatatggagaaagtttgaggggtctggatagaagctcaaaccaggatgggcatggtggcttacacctgtaatcccagcactttgggaggcagaggtgggaggattgcttgagcctaggagtttgagaacagactgggaaacatagaaaaaccctgtctctacaaaaaatttaaaaattagccaggcatggtggtgcacgcctgtagtccctgctactcagtaggctgaggtgggagaattgcttgggtccaggaggtcaagaccagtgagccatgattgcaccactgcactccagcctgggtgacacagtgagaccctgcctcaaaaaaaagaagaagaagatgatcaaaccagccacaacattccctttaacaaaagcctaatccagagaaaggcactaactctctttaattttaggaaggctaagagaagtaaggaagctgcagaagaaaagttagaagctagcagagattggttcatgaggtttatggaaagaagccatctccataacacaaaggtgcaaggtgaagcagcaagtgctgatgtagaagctaagatcaagctaagatcattgatggaggtgactacactaaacaacagattttcaatatagaccactcttatactgaaaaaagatgccatctaggactttcatagatagagaggagaagccaatgcctggcttcaaaagcttcaaagaacagtctgactctcttgttaggggctaatatagctggtgactttaagttaaagccaatgctcctatatcattccaaaaattcttgagtccttgagaattatactaaatctactcttcctgtgatctacaagtggaaaaacaaagcctggataacagcacatctgtttacagcatggtttactgaatattttaagcataccattgagacctactgctcagaaaaaaaaaaagattcttttcaaaatattactgcttattgacaatgcacctggtcacccaagagctctgatggagatgtacaaggagatgaatgttgttttcatgcctgctaacacaacacccattccgtggcctgtggatcaaggaagaatttcaactttcacgttgtcttatttaagaaatacattttgtaaggctatatctgccagaaagtgtgattcttctgatggatctgggcaaagtacattaaaaacgttctggaaagaattcactattaaagataccattaagaacattcacaatttggctgggcacggtggctcacgcctgtaatcccagcactttgggaggctgaggcaggtggatcatgaggtcaggagttaagaccatcctggtcaagatggtgaaactccgtctctactaaaaatacaaaaattagccaagtgtggtggtgggtgcctgtaatcccagctactcgggaggctgaggcagagaattgcttgaacccgggaggcagaggttgcagtgagcccagatcatgccactgcactccagcctgggcaacagagtgagactctgtctcaaaaaaaaaaaaaaaaaaaaaaaaaaaagaatatacgtgattcatgggaaaaggtaaaaatatccacatttacaggagttgggaagaagttgatttcagccctcatggatgactttgagggctgaaaatgactcacttcagtggaggaagtaattgcagatatggtggaaatagcgagagaacaagaattagaagtggagcctgaagatgtactgaattgctgccatctcatgatgaaactttagtgaataaggagttgcttcttatggataagcaaagaaagtggtttcttaagatgaaatctactcctggtgaagatactgtgaacattgttgaaatgccaacaaaggatttagaatattccataaacttagttggtagggtagtggcaaggtttgagagagctgactccaattttgaaagaaattctatggtggataaaatgctatcaaacagcatcatatgctacagagaaatctttcatgaaaagaagagtcaattgatgcagcaaacttcatcattgtctattttaagaaattgccacagccaccccaatcttcagcaaccaccgtcctgatcagtcatcagccatcaacatcgaggcaagaccctccaccagcaaaaagatgactcactgaaggctcagatgattatgagcattttttagcaacaagtatttttaaattaaggtatgtgtcttttaaaaaacataatgcacacttactagactacagtactggttgagtatcccttatccaaaatgcgtgggaccagaagtgtttcagattttggatcgctttggattttggaatattggctttatatttaccagttcaactcctaatctgaaaatccaaaatttgaaatgcctcaatgagcatttcctgtgagcatcatgtcatactcaaaaagtttcagatattggagcatttcagatgctcaacctgtatagtatagacatagctttttttttttttttttttttttttttgagacagagttttgctcttgtggcccaggctggagtgcaatggcgtgatcttggctcactgcaacctccgccttccaggttcaagcaattctcctgcctcagcctcccaagtagctaggattacaggcatgcaccaccacacccagctaattttgtatttttagtagagatggggtttcaccatgttggccgggctggtctagaacccctgacctcaggtgatctgcccgcctcggcctcccaaagtgctgggattacaggcgtgagccactgcgcccagccagacatagcttttatacgcactgggaaaccaaaaaatgtgtgtgactcactttactgagatatttgctttattgcagtatcctggaaccaaacccacaatgtctccaagataagcctataacatcttcttgtgatctgcctacccaatcttctcataaactctgatcccagtaacaaaccctcctttctgcagaacactctcctctgggatctcatttgatccttacctggagcctgagagaccagaacccttttacagatggagaaacggaggctcagagatgtgtccagagtcagacggcaaggcagtgaccttgctggatgagctccagctgatctgtgtggcagcatggccagcagcacgggccctggcattcaactgcaactccactgctcaccagctgtgatcttgacaagccactcaactgccccaagcctcagtttctctatttgtgaaatggacatgatcataacggtcccacctcccaggattcctctgaagataaagtgagttcacttagcacagtgcctggttctcagtaagtgctcagtgaagtgccagtttctattattgttcgctaatccaggtttctttgcactctgccatgcccacctctataattatttgtagttccttgaaaaagaggaaaaagggcccaggatctaggagccagagggccagctctaactcccccttaccccttatgctgggcaagccaccgcccctccctgagacttggtttctgtgtctgtgaaatgggagtgccttcagaggtcttgtcatggattcttgtgacaccaggggaggggaccccctcggacacctgtggggtcagcaaaggcttactccagatgggctccccggctccctgcccctcgctaacgtctcccacctcaggcctgggtgcactccaggctcttggcccacctcaggtggatgggggacaaagttgctcttgccacctgactggcccttacgtggtgctcagagctgcaaatagggcccctctcttctgcctgagcctcagtgctgacccttcagcccaggtctcggagctgggccctccctgtcttgctgctttggcctaagtgaccccctccactgttctaatccgagtctaacccagcttccctgatgcacccacagtccacctgcatgtctacgagtcccgtgtcactgtcactattcactgtgccctgcctaccagcccacatgggcatcctgctacctcaaaccagacccatggctctggcccaagtgtggcccgccagccccttgtctatttgtgcagtacccgagcgggcctcctgcctgcccggttggacaaccaagagctggcagctgagtctgtccacatggagtcggctccacgttaccccagcacagctgggccaggggtctccccgtcctggcccacgcatccagcccttctgcagcagcaagtcagcaagccccttggtgacctgccacagggagagggttctcagaagaatcctaacagctacatgtattgggtgcttaccatgtgccagacgagagtccaagcaccttccacagacgaacaaattaatcctcaccacagccccctggggtaggtgctagcactagtcccgctgtgcagcttaaagccacagcccagaacgcatacatgactcacccaagtctgcacagctagtaaatggcatgatcagactcaacagtgcacctccaggacccacactcccaatctctacacagacagctaaagagtctggccctgggacttccagagggaagctgcttggcatccaccatgcaccatccagcttacgccacctacccttcttgactcagattctgcctgccaacatcaatctgcaaggaatcccattcctccttgaggttggtgcccaccagggtggcctttctcatgaaagaaataaaccctaggcctctgaacactcagccccacccacgggggcccctctggcatgaggtttcctgccccctaccccaagtcccctccagcccacagtccatttggcatttgttctccccagctttgttggaatcatatccagccatgtctcatcacagctgcaaccctggccccagcacctgacctgttcccaggcctcataaccttgttaaaacaaaattggccaatcacatccaaacacaccaagaagccactcttcccaccacacactcctatctctctctctctccctcactcatcccccatgccccaggtgccctcacctgtcacaatggggtaggactgcgggcctggcacactgctcccgatgtcagcaggggtggggctggccagattggccttcatgtcgtccagcccaccagccagcgaggccatggctgaatactctgtggtctgaaagaagaaacagagacgtctcagcaccaagactccacagtaccttagtcaaatgccaactccacgttctgagctcagccaccaagctgagttagtccatgcctgtgccaaggcccacaaggggctcatgaacacttccagtgttgaaagggcagagtcagcttggtggaacgagacagttgtccagaatcaacaattcttcccaggagaggaggtgggcaggactcagtgcaacttcacaagaatccaaactttgctccctctggcctgcatgttgccctcacccagctccagttggccagagaccccacactcctcagtgcagggatggagggtccgtaaccaaaagcaaggcagaaataagtgtcttcttgccaagagaatggaaagaacggtttctgatttctgtgctcttaaaccacaaaggtagaatcacagaaacaagggttaagaggaatctgggagatcatccattccaaatcctcatttcacagatgaataaactgaggctcaaggggaggagggctttacccaccaccaacagggaagaataccaattggggtgggtcaccatgaattcccaccctaatccaatatggcaaactaactgagccaccatttggcaagtgtttttgaattctagaagcaggtaaacacctgtatgctgaaaaccacagggtgcacatatctaatttaccaagtccacaccaaccatgtgtatttagcccatgagtcacgctcctttctttaagccatttcacgaaatcagagtttgcaatgagtcatttccttgtcatccaagccactgtcagaatggtctccagagaaggcagcaaaggcaccaacctggatctttcaactgaaggatagactaaattataagcatgagtgacaagtctcttcctcccaccccaccccagggcctattttcaggtaaagaaaatatatgcggctgggtgcagtggctcacgcatgtcattccaacactttgggaggccaaagcgggtggatcatttgaatctaagagttcaagaccaccttgggaaacatggtgaaaccctgtctctacagaaaatacaaaaattagccaggtgtggtagctttcacctgtagtcccagctactcgggaagctgaggcgggaagatcgactgagcccaggagatcgaggctgcagtgagccatgatcatgccactgtactccagcttgggtgacagagcaagactctgtcaaaaaaaagaaagaggtggaaggaaggaaggaaggaaggaaggaaggaaggaaggaaggaaggaaaagagaaagggagggagggagggaggaaggaaggaaagaaagaaggaagggagagaaagggagggagggaggagggaatttgcaaacacttaagccaacaaatttgtttgtgcatgtgaagattttatgtggggagtttcctccaggacgctggcattgctgatggaggacacacccatgttggtccagggttatgtccttgtcagggagggacacagaagcaagcagtcttctggaaggagctgcaggcaccctgagtaaaatgatgaggactgagccactgggagggaaaccaaaggagccactgggtggcaggcagaaggggctgggactcaggcacattcctggtgtctttcccttcaaatcagagattacttcctgggcagctaaagttttgactgggggtgatggcagcagcgagtccaggaggtgctgcaggcccaggctctagatgattcgtgctgaggacagcatgtccagagttccccagggctctttgatcctcattcatcaaaggctggttctgaaacatgtggagaagagcacaggcccaaagcaagcccaggtccttctaagggagaagaacaaggccagggggacaggcttaccaggcatcaggaatcgctacagagctacagtaattaagacagggtggtattggcacaggggtagataaataggccaatgaaacagaatccagtccagaccctggtccgtgcacatatggaaccgtgatatatgaaggagatggtgtacaaatcagcaggaaaggatggactctttaataaacagagcaggggtaactggttatccattcagaaacaggggaaaaaagaaattggatcttcacaccagacacaaaaatcaattccaggtggattagagacctaaatgtggaaggcaaaggcatccaacgtggcgagctctaggtccagccaaaaatccttgggaacaagtctgcccttcatggaaggaagagtgccttttctggcctgggatgctcacgcagagttcctgctcactgtggggttagtggtgggacccagtcatcctgctgccctgtctcagtgcctcctcctccaagaagtctttcataaccaccattccccaggaagtgtgagtcccaccctcattctgctggccccgccaagtggtgccagaacaataacaaccacagtcttcacaattgcatcaaaatctcacactcactgagcattcactctgtaccaggagctttagctgtactatcccatttaatcctcacagtcaccccttgaagcaggctctatgacatccccattttacagatgaagaaactgaggcttttatgatagcgcaggaatgacttgcctaactaagttcatacagcttctaggtgcccaagccaggattcaaacctgggtccttctgactccaaaaccttgacaatgaccctaatgatctttatactctcagtacctgatccattaaaacacagtgaaatcaacttgctggtcccaacatttttataaatgaaactgaaaaaaaaatatccaagggtctcccacatagaaaggataagtcctgttttgtgaatctttgtttcccatgtcagtgggtatgtgtgtacgaggtagagattaagatgtacttcttgatctaggttacagccagcaaagtttggaaaatactgcttcattccatgcagcaagagctattggaaaaaggttgctgtctagacttcctcttctgtagaacaagacttggtcgtggcattagcctcctaattttctgagaatgaatcgggcatgaatttagaattccactcactggaagcaactccttcagttcattgctgtgtgcaaagacggcaggtcaaaatgcctctgacaagggtcttttcctagatggcatcttctagagtttctgggcccccaggggtaggtcccagttccgccctcctctctgtgttcccgaatgccctagtgaatggtgggcgtgcattcgttcaacctttactgagccctgttgtgtgcaacatgatgtgtgaagaccagacacactctttgaccctcacccacaaacaccaagagaagacacattggcccagaaattccatccaagagggacaagagcacagagtcattaatgtatatggggcgtgaagtggtcaggaagggtttcttggtgcaggctgtatttaacctgggagtgaacaatccctaactcccaagactgagaacagccgaagtcaggctcagaggtaataggacaagagtgacccagaaacagggcacatgcaatagttagagggggtgcaagcgtaaaggggaaagatggaatggtagactagctggaactcgattgtgaagggcttgcacaatgaacactgggtgaatgaaggaaggagtgctcttcctagggccaggcagcatcccagccaagagtcagcatccctgcacccctccccagcccaccctggggcctggcacattcctagacctcagcctcttctctctgacatgggctgggctgctgggtctgcaagggaatgcctttacttcccccaagaaagcagagccaacctgggtttaaaagaaccacaaaaagggtggtcaacagggatatatcctgccccttacatatttaatttccagatggaagaggcttatgttgctatttgatttttgttttagtcaacaaattcagtatcaaacaaagctcgttcagccacttcaaaagttaggtttggatcatctttttaagacaagaaatcttcaacttatgttatacatgcagcgggaggtccgaaaatccaggcatccaaccaccactggctcccagaaagcaaagcaaacctccctataagccaggccctgggggacggcgggacacttggaaacgagtccttagctgcacttcaccatctgtgcctttcctttttctttttcttttttttttttttgagacaaagtcttgctctgtcacccaggctggtgtgcagtggcacgatcttggctcactgcaacctccgccccccgggttcaagcgattctcctgcctcagcctcccaagtggctgggattacagacacatgccaccacacccagttaattttttgtatttttagtagagacagggtttcgccatgttggccaggctggtcttgaacttctggcttcaagtgatccacctgcctcggcctcccaaagtgctgggattacaggcatgagccactgcacccagatatctgggcctttcaccataaccaccttgcagggcttgcccagagcccagcctctcttctttggtgggattccctcagttcttactctgctcctgcatgagccaggggaagctgtcatttagttttggtgtttaattgttccctaagtcctcatcaccgtttgtccttttgaggtgtccgtgatttttaaaggcaactgcattctccccaatctcttgggttccctggaacattgctacaccacagctcctcagccattccagacactgtcctacctccgcctggagggtccctctcactccgtgacttagagaactcttacattatccacaagacccagttcacatgtcacctccttggtggagccattcctgaactccacactcctacaaagaaacaatctctcccttgtctatgcttccatacttggtggctttttgcacagacctccattatcaccatgtagagtggctgtttgtctatctccctccaggttgccttgacagtgtggaacatggaacatccttagtgccccctaagtgcttgttgaatgaatgaatgaataatggttcagtagcatgttatgagctacaacactcaaaaattaactgggaagtgtttgaacaagagcactaagtgatacgctaacatccccttccctccttccacctctaccccacatcgagtcaggtcaccagaaagccacatccctatccaacatattaaagcccctgggtggtgctttcaccagtctctgatggaatatcaggcattcaacacttttacgaggcaaaaaaagaaaacagccataaaaagaagattgtttaaaacctctggggacactgcccactagaatattcaaattccttatcaatccctcctacaattcaacaccagtaaagtgtttcccctggtgagtcattaatctgcctctgactaaacaacaagaacactggaaaccactgcatgtctcttttggctttgactgccaggaaactcggtcaaattcagtgttcaaccaccataagcacatcattgctggctcctgccacaatgatcttccccttttctctatgtaatttctgaactttttttccaaacttaacttagatacacatacttgcttattttgcaggccacctcaagttctttgtgaaagtgaaggctgggaaaggtgaactgacagaaaaagaaagatggaaggaaggaaggaagaaggaaggaaggaggaaggaaggaaggaaggaaggaaggaaggaaggaaggaaggaaggaaggaaggatggatgagagagagagagagagaaagaaagagaagaggaaaggaattcctggtgcctcttttcctggtaacaacggcattctacttccatttctcagttttttcgaagccaaaggctgagtggcggggtgcagaggtacacacgcagtcacagatgtgtaagtgtgttggtgcacctacatacttgggtacattgcccccgccaaccccagcccctaagaatcacaggcaacagctgtgttctacatttcctactttttctgagcccttggggttctttcttaggatgtcattttaggcttcttctccctcttcatcagggcaccctggtgctgtccttgaccatgacccaggaacagaaatgaactgaagtcagcaattcacagatttcccactgcaatgcaaccattgggataaaacttcctctgcctgctgccacagaatctttctttttgagacagagtctcgctctgttgcccaggctggagtgaaatggtgcaatctcggctcactgcaacctccacctccctgtttcagtgattctcccgtctcaacctcctgagtagctgggatcacaggcacccaccaccatgcccagctcatttttgtattttgagtagagatggggtttcaccatgttagtcaggttggtcttgaacttctgacctcagatgatccacccacctcagcctcccagagtgctgggatttacaggcatgagacaccacacccagctgccacagactcttataagacctcaaggtcaagaccaccagctcaaggtgtgtgcaccatcctcacagacaccatgttctagatgatggaacagcttgtcctctgaaatatcagaactataatagaaggacagtcagggtcatctttcccaacatagaaaaactgaggtacagggatagggatggatgtcctttttttttttttttttttttttttgagacaaggtcttgctctctcacccaggctggagtgcagtgtcacaatcatggctcactgctgcctcaacctcccaggcccaagggatcctcccacctcagcctcccaagtagctgggactacaggcacacgccaccacacccagcacctaattatttaattttttgtagagatggggtttcaccatgttgctcaagctggtcttgaactgctgagctcaattgatccacccaccccaacctcccaaagtgctgggattacaggcgtgagccactgcgcctggcccttagttcatttttatctgcatcattgatagcctttgacccagtgggggaaaaaagactgaactaggagtgataacacagggtttttgtcccagctctgcccctttctcacttgtgtggctgtaggtgagctgggccagttctatgaatctcattttcaccatgagtaaaatgaaattttaattctagtccctagctgcctgcctacctcgacgatcatgagaatctgaggggtaaggagagggacaccactttggaaactaagcaatatgagaggttcaggaattctagcaagggactcaaggaggcacgtgccccaggagagtgtgcactgggcatcatttgggtccctaggaaattacctggaaaaggactgcctggggctgcaccaagtattgtctcatcagcacggggcaccactgccatagcatggaggagaaaagaaacacagacacgtgagaaggagggcagcacaaaagagggcagcgcatggggcaaggctgcagggctggtcacctcagatggccacctggggccaggaggcctccctgtcacctgctgggctcctgtaggctcaccgccaggccacaggtatcccttgggagctgggccagagccaggccaaccattcccattctgaaggaccagacacctgcccacctctacatctacccagaaggaggacagaagctggagtgggtgagaggtgtctccagagcctggctccagcgactgaggctgagcaggcaaaggggtctgcaagcccctcctttcactggcctctgcttccccacctgtctgaggaccttcactggaggatctctaagtctccttccactgctgatgctctttgcctctatcactggccacatgacaaagtctagattccctcttcaacaaatgaatggcaagtcaagaacaagagatggtgaacctgtaggttaaaggaggcttagagacaaatcgatagtcacaatgtggaccctgattcaaacaaactgtaaaataaataatcattaaataacaaaaaacaaaaaacatggccaggcgcggtggctcacgcctgtaattacagcactttgggaggctgaggtgggcggatcacctgagatcaggagttcaagaccagcctggccaacacggtgaaaccccatctctactataaataaaaaaatcagccagccgtggtggcatgtgactgcagtcccagctactcaggaggctgaggcaggagaattgcttgaacccaggaggcggaggctgcacactgagccgagatcgagccactgcattccagcctgggcaacagagtgagactctgtctcaaaaaaaaaaaaaaaaaaatcataacatataatgagacaattggcaatgtgagcaccaactgagtatttgatgacatgaatggatgtgctaactttgtggatgtgatagtggtgtggttatgctttttaaaaggtcttgtctggctaggcactgtgattcacaccagtaattccagcattttgggaggctgaggcaggaggattacttgaggccaggagtttgagacaagcctgggcaacataacaagaccccatctccacaaaaaaattaaaaattagctaagcatagtggcatgcctgtagtcccagctattttggagaatgaggcaggaggatcacttgagcccaggaggttgaggccacagtgagccttgatcacaccactgcactccagtctgggcgaccttgtctcaaaaaaataataaaagattgtgtcttttaaagattcattctagaatatttacaggtgaagtgacataatgtctgaagtttgtcgaaaaataaagtgcagttaataaaatgtggtatatctacacaatggaatactattcaacagtgaaaaggggtggagtgctgatacatgttacaacatggatgaatctcaaaagcattatgctaggtgaaaaagtccagacatataggatagcccatagagatgctagaagtggcaaatctacaagcacagagcacagatccatgattggctggagatgggggtgggatcagagattaactataaaccagcatgagggatctttctggagtgatgaaacgagtccaaaaccaaactgtggtgatagttgcataactccttaaatctactaaaaactattgattcatgcacttacaatgagtgaattttatgatataaaaattatatttcaataaagccattaaaagataagtggagtgtgtcgggggagggatatcagtgcaacaattgtcatgagttgaatctgggggaggggtgcttggaggctgattaaattactccaagtctactttgaaagtctccgtaattatggctgggcacggtagctcacacctgtaattccagcactttgggaggctgaggcaggtggagtacctgaggtcaggagttcaagaccagcctggccaatatgatgaaaccccatctctactaaaaatacaaaaatagtcaggctgtggtggtgggcacctactcaggaggctgaagtgggagaattgcttgaaccccagaggcgaactttgcagtgagccaagatcgcaccactgcattccagcctgggtgacagagggagaccctgtctcaaaaaaaaaaaaaaaggaaaaaaaagaaagaaagtctccatagttaaaataaataaagttaaaccacacatatttgactcatggcaccgcctgtcaccgctcatcagccatccaacaaatacctgtgaaataacgagagaacgcaagaagccaaggacagccaggagcttactctctcgcctcctcttcctggtgccctgccctgctccttgaaagccatcatccctgcatcttcagggatgccaaagttccaaacacaagaagtctaagtcctcttgcctgcctagcactttccagtttgcaaagtccttgcaggtccgtggtgccccgggagtcctgggatgtggacagatgcagaactagagctcagagaggggagccctgctgcccaccccgtgtgcagcactggtcccctacctggaagcagagttagagttggaggggactttactgccacccctgaaggtacagctcagacactcctccatgaagggccctggccacacacccactatcctcctccagctggggaaagagcactgaatctgcaaggaggaatgccctgcgttctttaaacctggacacacaaaattccacctggcaaagtgtatgttaaggagtagttctgccttgattacaatggatcagatggggtggcaagggacctggagacctggctctgccctggactcccatgcaaccagggccagaccctccccttgccaggcctcagtgactccatctgtcatgagggagatggaccaaatccattggggcccttctgactcactaatgtctgtgcccaccaagatggggtcctcactgtgtggaatggggttctccttgatatggccccaggaagggcttaggttccctctgtgggctggtgaagatgttgcccgtttgacctcaggtccccgaatccagaggcctgacagcaaccaggggaggcagcgtggctgaggaattccaccgggtctggggccaggaggacagacttcaagcctgacacggccaagtctgtgctgtgtgaaactaggccaggcacctctcactcttggtaccttttctcatttgtaagggggatatgtgacctacctcacaaggttgtgagaaagcccagaagagagatcagaataaagccctggagggcaggccttttgcgtttcagtttttgagtccccagtgctagactcataaataaatactttgaaaatgtctactgaaaaaacagcaggaggaatccttgcagtggtagaaatagcctgtatcttggactcaatgtctatcagtgtcaatttattgtactatagttttacaagatgtttttgtggagggaaactcggtaaagggtgtataggagtcctcggtattatttcttacaactgcatatgaatctacagttatctcaaaataaaaagtttaattgaatgatgcttgcagaaatactccataatctacaaagtgctaccattaatattaactagggggaagtactacaaaggatgttgaagggccttcctcttccaggaagccctcatggattcccccttctctgtgttcctaaaatggctgagtgtgcctctctctgccacagcacttattattctgcattatacatttaactgtttagggacatcatcccccagctagagtgtgagcttcataaggatgagacagtgtctccctcatctttgtggcagcagctcctggcccagtgcccagctctgaacagatgtgacataaatgcctgtggaatcaaatgaacttggacaggtaccatggcctggctcttccaacggtgccagaggtgcttcccagggtcactgagaggataagtgatgtcaaggtgcttttattcatcagaggttgccacggacatgggccaaacacgctctttattcatttgtttctccagaaatgtactcatggcctgggtcaaaatggtttgcagcaggccaggcatggtggctcatgcctgtaatcccagccctttgggaggccgaggcgggcagatcatctgagattgtgagtttgaaaccagcttgaccaacatggagaaacctgtgtctactaaaaatacaaaattagccgggcatggtggtgcatgcctgtaatcccagctacttgggaggctgaggcaggagaattgcttgaacccggggggcggaggttgcagtgagcggagattgtgccattgcactccagcctgggcaacaagagcgaaactccatctccgaagcaaacaaacaaaaaaaaaaatgatttgcagcagaattgaagggcttccaagaagagatctatacagtttcagtgactcatctccccctgttctgtttacagcctgccaggcccccctcaggcacacccccagacaggttcccaagtggtggtgggtaccagcaggggaagcccagggaggccaccaaagtcagacattttaacttctgtccgagagcaacttttcagcaatgactaatcagaaggcccttttcttcccctgtcctcttacggaattttagtaagccccaaatctcagggtctaatggagctcaggagtgctgtaggctgatctttacctggcacttgaaatccaccaaatgggtatctccagtgatgggaactcactactttccgaggcagccacacagctccggtgtgagaaagtgctaaatgctggtctccctacattggtcctgggtgtgctctctggagctccagttccaacagaggtcctacaggtgccagtgccctccctgcctggatccagcacggggccccagggcctccactcctccaccagacatgctgtcggactggggcgtatgatgcttgcttctgctttcctggtagcctagaacctgactgattcatactgttctcacggtcaaggcagggctcactctaagttcattagaaatggaaagtgattaggtattttctccttcccttaaccagtgtgctatttgcaagctcacaggtcttcccaaatacgtggacagaaaggttatcctgacaaggcttagagcacaaagctccacttctggagaatgagaactgggacccagtggcccaggacccggtagtcaaagcctcctaaacagtaagatcccagtagggttgactcctgtggggaagggggatggggactccctgtctgggaaacctctgcacctgctacagctctgcctggctgggtcacgagcagctccagagcctaatgtggacaaagggagggaaagttccagggacaaagctccatctccaggtggccaagttccacaggcttcttccaggcagtccatgatggggcccagctgctcttcccactacatggctagtaatgggcagggaggccattacctccaagggagtgcaggactcttggccacaaaggggcctgaatgaggggtccaaagggaggatccccatcctcaaatacctagcatgggaggagagggagcaccctaagactctcatagttcacattcttttggcatgacttcccagctacaaggaagacagaaaggttatgttggaggcatggagaaatgaaaagagaaaacttcactccacatggccagatcaatagggtggcagggtggggacagggaggtgggcctggatgcccctccccaccaccaccacctctggccatgtgggaacctgcaggcacacacacacatgcacacacacacacacacatgcacacacacacacacacacacactcctcaggccaaagaccacctctctgcccttccgctccctgtcagaaggaacttcctaacacgtgatgctctgcaaaggcatacccagccagcctcaggagggagtgccctctgggtcaccaaggattcctagggccaaacaaaaactgtgcaaggcaactaccagaaagagaaggctgcaaaggcaaggcctctcatggtgaattcagactccctggtttgccattcagaagactctaccagctccccctacaccctcacatacctttactaagaggcggaataacttgcattgactgggtgcttactgtgtaccaggtactgttctagatgttaaaatgtattactaataattcatttaatccttgcaacaaccctacagggtaagtattactaccctccctttacagatgatgaaaatgagacacaaggtgccaaaataacgtgtccagttcaccccccagcagtgcgactccagagtccaagctctgaaacaccactctacaccccctctgccactgttactaaccccaacaagttgcagatgagaacactgaggttgacagaagttgagtaagttgcagagccgggggttaaacccagcttctgtttgactccaaagcctgtgttctttactctgattgtaaactgctccacgatgtgccggagccctgacggggacaccacctgctaggccaggctcctcttcctgtgtttggtgacctctttagataacccacctgactctgcacctttgacatggccatgctttccccgccgggcgccctctcactttctctcctccagttcctgtctatccaccccttcaaatcctggctgaagaatgacctcctatagaaaaggtttccagataggtttagccgcagatgttgttaactttatcctttattctcctcatttagacagaaagctcctacaccgtcaactcagaggacagcagggctcccatttaatgccaacattagcaattcatcttaacattagtgcaaaacaatagagaaataaacagtaacatgtggcactgttagcaccattaaggaaaaaccaggcatgtgactgtttgcttagttcaagtcctctctgttctttactgaaggtgatattctggcttctagaaagatcagaaactaaaggaaggagacactaggcttaggatttagctatgatgtgtaagcccaaattttagctaatgtcaataatctagacaaaactagcacagcaacggtggtgtttctgcttgtatgcctttttatcagggttaactttacttaagagcttctgcttttaattacggaaatatatttgcattttgtggttatgtgttaattccatgaatcttgcatttcatacctagaaacaaagcataataattatttttcgtgctaatacctataatttacttagacaagcaagccatttgccttgaggctagacatgtaaacaaacacacgtctaaaggcttggtctgagttggatttttaataatttcttctcccttacacacacacatatattaatttagactcctgattttatttccttcacctctttcccacaaatcaaagctcaaataacataaaactgcttgctagaaataggcttcccacaaacaaacaaaagctttcaagccaaaagcaactgagatgttcacatctccccatccaaccgtctccacctcctctgcctggtccaacaaaacagcctctctctgcccaattgccctggaaaaccctggaatatttcatttttatttccaggaaaggaagaggttttatccccaaataaaagttcagtaataacagtaggctgggaaaacccaggcaggatccttcctgccaccctctgtcaagctcacaaagagaaaaatcgtaccatccgacatggttgggagagtttaatccaaagcagtgctaattaatatccccggctttccagaagtcagtgccacatacagctgcgagggcaacaaggctgttctcccttcaattttatgggaagaacattttcattacaaagcctcctcccagaccctcctctctcagccagattagcctcgagaaggaagcggatgatccatatatcagaactccttctctccccattaattttattatttatatcccattttaaaagtttattggtgcaactccctatgcacctggccagggcctttctgacaagcagcggccccttcctgtgtccccttctcagcgggagtatgtacattctgtcaccagaaagggccaactttttaaatttgccctagggcaaagctccaatggtagttgccccaccaccctttctttcttaaaataaatgtggaaggttctaaactggccctttcatgaaatatgtgtgggttttactgctcagtatgggctgtgggtgatcctcagagacccttaaagccctgggggatgccctacgtgtcccccacccccagtcaagcatccttagccgtttgggcagggctgacccatttttaacccaaaccaccagaccctgggtaggccctgctgagaccacgtgtcttgccattttgttctgaaaccccacgtgctcaaggctgtctctttccagcctcctaaagggaccccaaatccaatctaaatgtcttgaatttacctgtttgtcttttatacatataaatagctgcatttccattccctctttgtttctcattttcatttggttctaatatctgcatgtaaatgtcggaaaatagcatctgtaattggagattatgaagtatggccagctcctgacagcctgctaaggaagatggattatcctcatttttctgtaaattttgtcaattttggaattcataagctatcaacactgatcaaaatgggacttcacagctgtgtcaaaaaaaaagagggagagagagagggagagagagaaaaagcaagagaaagagagagagagtgagagagcgctcgcgtgcgggtgcacgctggcgtcgtgtgggcgcagcagattggatgcccagtgtcctcgtggccactctcctcctgtcaccctcccctcgacgcggggcctcactggaactcgggctggggctgcctagtcccctggctaaatcaaatagctaaatcacagggctggaaggctgcaaatcctgcaaggcacccactccagccggggcttaatttattgcccggcgctgccttccttatttatcctgaggagtctgaggctcccctgctcagccccggagatgttctactccttccagaccatcacagcccacttgaggcaattgcgttggtctctctctctcaattttcccattactgggagtaagtactgttgggactctgtaatggcccgactgcagcccatatcaataacagatgaggtttaatcgtccaacacaaaaattatttaggcgcagtaaggacattcaatgtcatttacataatggcatttctatcgcacgcacctaacccatcttgcataaacaaggccttgggaccataaataataataaatcatgacgtctgcacgcctcttgtggtaataggagccactctttgtggaaattatttcagcaggaaatgggcactgtaattttaaagacgtgtggcgcagtgaggcgcggtaaatcacatgcttgcgcacacgacccccaggagcagccctgggacccgccctgagcccacggcaacatccccagggtgcctggaggaggaggtcaggtctccaggggaaaacaggccctctagaagtggacaccaggatgtgctgctgtcccaggaacagcaagcaggagaaggcagggctctcagtgcacagcaccagggagaatcgaatttgagtctggagaggcacccaggcatcagggtcagaaatcatctccgtccaggagtctagaagctccacaagggcagtgattttcatctgctttgttctctgctgaatctccaggtacctagagcagtgccaggcacccggcaggtactcggaaaatatcctaaagaaacgcaatgagaggagaagattacgggtccaggtagagagtggataattagagccctgaaaacaggttaagtgggagagacagaggcccaggcacaaggggtaatgaaggcaggaacaggcccagaagcactagagctgctgctggtgagcaacagagtgaaaatgcccagtaaacgctaaaccatattggaaggcagctgtagggtaagagaaagcacggattagcgtgcaagggcgtggcctgcacagccgctaagccagcaggctcaggaagcagacagagctgggttagaaccccagcaccacccatcacagaccctggctttgcccctgtgtgcctcagctacctatctgtggaacacaactcataatagtttttcccttacagagttgttctgagtattaaatgagatgatgtgtgccaagtgaccagcacttgacagagctttgctatctattctttttactaccgctattattcctcaggaagcagcagaagtgagtccaaatacaagctctgcctcttaccagctgtgtgatttgagagcgtccgtcttgaggggtatcctatgcacccatgcatcacccagtatgccgggcgtgaatctcctgtcctggctccagctcatgccctggaggtcaagcacaaccatttgaaatgagggataggaaagaacggaaaacagattggagccaccacctgtgagatgctaggagccagccaggtaggcactggggaggatctggagacctcagactccccctctttgcctgggctccccccttggcctgtacccacctcaaggcaatgcccctggggaggcaaacttggtggacccacaagtcaaggtgattctggtcacgtcacagggaatgggaagcaaagaatatgaagcggtggaggtgggggcgggggtgggactgagatggagaaatggttacacctggcctccaggacatgagactcacaccaggctcactggatgatgcaggggtgcatagggcatctcccaagacagaccctttccaatcacatagctagtaagaaaaagagcttgtacttgaactcacttctgcttcctgaagaataatagtggtagtaaaaataataatagcagcactcgatcaagtgctagtcactttgcacgtgttatctcattatctcatttaataccctggcagtgtgcccaggcagctgatggctgaaacatgaactcgtgtgcccacctgcgtgtccaggagcctgaccctctccttggctcagggaaaggacccaggcctcctaggtcaggcctataactctaggcagcgtctgagctgaagggatttggggtatccccattcccatcccctcaattttcagatggaagctgaaggggaaagacttgatcaaggggacactgttgtaagacaggaggcctcaaatcagagcccaggtctcaggaaaagcaacacttggagttaggaagagcaaagaaaatgcatttccctggcttacacttgcttcacaggcaaaatgggaatcatagcgtctgcttgccttcatatcacagaagcgttcacagtgatcaaacaaggccacagatgtgaaagcagtcaggtaatttcacagcaccttttacacacagagtccccctccatgtgctaggtgggcttgaggaggacccaggggtgggacgtgtgcaagtccctgctctgttgtaagagtcgtgctcagctgctgacacagctttcatactgggctttgttctgcctctaccagaggggtgtggttctcattcttcttcctttttgcagatgcagaaactgaggcacagagagatgaagtgactttcccatgatcacgccattaataaaattttaacctaggttatgtagctacaagtgctgatgttggaagcagagcttttagcagaggagttgctagaggttgtggggcctggcttttgcctgcaagagagtgagcccaggaggagcagtgccatgaaagggcagggcctggtggccgggcaacggccttcagcactgctgacgctaccctacaaggctgcaagtgcctcagcctttaaccatggagcgtaacacccgctgacccttgtcttcccgctctccttctctgcacccagctctcagtttccctacccagggcctgctatgtccttgtgcttaccctcctccagtgcaggcccaccctagccctgccaaatccagctattctccatctcagtcccaccgtcccccatctccattgcttcacgttcttttcttcccattccctgggatgtggccagaatcaccttgacttacgggtccatcaggtttgcctccccaggcacattgccttgaggtgggtgcaggccaagggggagcccaggcaaagatggggagtctggcatccccaagtctcctcagtgcctacctgtctggctcctagcatcccataggtggtggctccaatctgtttccccattctttcctattcctcatttcaaatggctatgcttggcctctaggacacgagactggagttttacacaccccacgttactttcgaaaatcagatcttcacagtacaataaagctgatcttacttgctaacttcagctctcctaaagatattgctgagtatttgtggattagttcaacatacacacacacacacacacacacacacacacacacacacagctacatatttgcaagctacttaataccagaaaagaaggcctaaggatcactgtgtaagaattctgggtaaattaatgttgcaagagaatttttgtaataaaatcagaaaagacacatgaaagactttgagaagaataggcgtaggttccaaagaacctacacctataagccattgttatattaattaactgtattaatcactcattttttcatacctcactactttccagaaaagatataagcagctcacaaggatgtaaaaaatatatggaggtatggagggaagaaaggacagaaaaagggaaaacataaaatggacccaataagtgactagagctgggctcagtggctcacacctgtaatctcagggacttgggaggctgaggcaggaggatcactggaggccaggagtttgagaccagcctggacaacatagcaagactccatccctacaaaaataaaaaatcagccaggtactttggtgcacacctgtagtcccacctgctcagaaggctgacgcaggaagattgcttgtgccccggagttcaaggttacagtgaactatgattgcaccactgcactccagcctgggtgacaaaaagagacgctgtctcaaaaaaataaaagctgattaaaaaataataataattggacccaacaacaaacacatggggcacgctcatgtcaacatgtgccacatgtcacagggacctcattgaaacctctaacagccctataaggcaagcactcattatccccattttttagatgaagaaactgtgacttagcaagggcaaataacctgcccgaatcgtgcagctggtaggtgatggagccaggacggcacccagacagcctggccctagtgcccactctcaaccaccatgctctccacatcctcaaagccaggagatgaggctggaggcttttaatctcactccaggaaggactgcatgaggccctccccactgccagctggagaagggaagctggttcacgacctcacagagtccatgagatgcagaccgcccattactcagaggttttctgactaactctcaaaccaggtggaatttctccccaaaacccccctaaagagcaagctgagaaagtgccgaatgcgcttcagatccaggggtggttttcaaacgtgatttcttagggtgtctccatatgggttcagtataactctaaggggaccacactggtggggcagttacccaattgaatggctttatccggtaatgattttaaaataaatgaaagggacataaattaaatgttctccaagcatttttatttctaaccggggaccggagggatgctgctctgtgcctatggttaaacacagaccgagctggaagtggtactgacaccctcatgtgaaagctcagtgacctgacaggaacccaggcctgaagccacgcagagtgagccttgcaactacccacagacagggacaggaatcccctcagaagactgctgtagcaacaatcacagacctccaacgcacagatctatagatgacggagacgccaaagttcctctctgtataacacagtcacaaaggctatgaactggaagatatttgggacaggtacagccacattcctgtctttatggtaaaaaacaaaactccctttggacaactgtctttttttttttagttttttgtttgtttgtttgaaacagggtctcacactctcacccagggagggctgaagtacagtggcacaatcatgactcagtgcagcctccacttactggactcaatcagtcctcctgcctcagcctccctagtagctgggactacaggcatgagccaccatgcccagctaatttttcaattttttgtagggatgaggtcttactatgttacccaggctgtctcaaactcctgggttcaagtgatcttcccacattggcctcccacagtgctgggatgacaggtgtaagccactgtacccataccttccaagatgacatctatgccaagataaccaaatcaagtaacctatcaaagggcattgctatttatagatctgtttaacacaagaaacagatcctaaaaatagtaactattattttagaatgcttgatccacagccattgtttctggcaaattggatcagccggtccaattgtttgggccactctttgaatgagatagagaagctgctcttcaaatcccagcagcacaacttaccagctgcaggccttggaaaagttacttaactattttgttcttcagtttccttttctgtaaaattaaaataaagtctccgcctcacagggctgttgagagaatttaatgagttaatacaggcaaactgcccagatcagtgcctggcacatcatttgtactctattgttacaaaacagcatggtcaggggctagaaagtgttcagctttgagttctctacaccaagatgcacacatatacctccccctaaaggaacagcacgcaggaaactctgcagtgctccatcaggaagcgactccctgaggagtgctccgtcaggatgcagtgctccatcaggaagcgactccctgaggagtgctctgtcaggatgcagtgctccatcaggaagcgactccctgaggagtgctccgtcaggatgcagtgctccatcaggaagtgactccctgaggctcgcagaggggccatggcccagctgcccctgagcttcaggaactccgcaatgccaagcagcgctgcctcgagcatttccgtgtgtttctcccggtgcacagatggacagctcgaatttgtaaatcagggaacttttcatgggaaccactgagagatcaagagaaacccgagcagctgacctcagtgtgtagtgctggaaaataagattccccacaaccagccaaaacctgggccacattcatcaggttgaaacctctggaaattttgacctcaaatctgcccatgaggggaatctaatgaccaatgtcagttgtcctgtaagattttcctgtagctaagcttctccaaagcaatgagaggtttgtctctcaaggccatgtgtgaacatgtctgagttgttttgccccacagcatagatgcgctttctgactaccagtaatggaagggaaaactacgtgctagagataggttacggtcaccaggacactttgcggtttaagtccattttgagttacttgaaatccactggtgagctggcctggaagcatccccaggagacagttgaggcaacttctttaccaaccaccagcaggcagggcccaaccaacttggaaagccccatggctgcttcccgctcctttgctcctaacccccaagccacagtgtaaaatgatgactcagccacgtgcagggccaaaacaggagggaagtgattactttttccaaatcccaaaaacccattctaaacaggatcagaagcccagaaaaaggataacagtgaatagtgctgcccccagggcacatatatcacaggatttctccagatttattccatgtgctataatttgacatccagattctattcataaatgaatttattcagaggagcccatataaataaatatgcctgttcctaaaatgatgtcccttatggaagcaacgttccccttcctggcagctccagaggcagcaccatcaggcccatcactgatcctcatactccaacatccaaagtgacaagccctgatgtttaaaagatgaaaaattacactgtggctccaaacctaccataaatgtcctgtcaggctaatgcaatgtaaaaattttaaaccttgctttggatcaagtaccatttcctcagtttcctgaaattttacgtattcatttgtttatttattttttatttttttaaagtcagggtctcactctgtcacccaggctggagtccagtggcatgatcatggctcactacagccttgaactcctgggctcaagtgatcctcccacctcagcctcccgagtagctatcacgcttggctaacttttagtttttttgtagagatggggtcttgctctgtttcccaggctggtctcaaatggtctcaagtgaaagtatttaaggatatgcactgtccagatattacattactgtattacatattatatgatgtttcattatattatatttgtacgcatatgtgtgtgtgaacatatatatatatatttttaacagaatttccaaaaccatcacccccacccccagcacacctcacactttggccacctgaaactactctccctttcccagactgaacgcatatgcatatgtctccatgcttttgttctttctcttcttcctctttccacttccctacctggcaccctcttcctcatcctcctccccacacactctctgtgcaccccacccccgttgcccctggtgaaaggcagagccgtgtctatatcactgagacattccctgagaatgcaaataataataaataacatcctctgaacgtctcccacgtgccaggcactgtccaagactttggagacacacgggagcctcacaccagctctgtgctagcatatcggcatggctaccctcctcttgtggatggagaaactgatgctgagtgagggggagcaaactatcccaatcacacagccagcaggtacgcacgccaggttccaggaccagggactccagagctctggctcttaccgccttgccatgtggccagcacaggtgcagcccgaccataagtgggagcggcgagtgtccctgagaacaaggttaccgaggctgacagtccatcccttcctccgagagggacgggacacattctgttaggcagtttccttagaagtatcacagtctgggtttaaatacctcctccctccttttgaggcagatctgggagaccggagaactcgtcctctgttgcaccaaaaaggaaatattaaattgtttgtttgtaggggaagatccttacagtacaacccagaattaataatttagtacaaagatttcttagctcctcaggcagaagttctaaaagtgatacaaattgttattttgattgctttaatggaatatttccctggaagcctgggctcatttgcctgtgtaatctgtagccaagcaaacagtaaaaacagagaaagtctggggaagaaaaagttcccagaaactccccagtgcaaatgccccatcactgcaggtcagatagggccttctggtctgtctctcattccctcccaccaagacaattcttagccactttgtctccctgcgcaaactccctcctgcctcctctccaactcctttcctgcccaacccagccctacccacctgagctttcttgatccctttcccaccatgaccctgactctctgccctgtagaacctctgatgtggcagaacactccttaataataataacaatgataataaaggaacatttggagtacctactatgggctgaaccctctgtcaaactttgtttaatcagtacaaccacctacaacacaagtattgctgtttttttgtttgttttgttttgttttgtttttgagacagagtctcgctctgtcgcccaggctggagtgcagtggcacaatctcggctcactgcaacctctgcctccgggttcacgccattctcctgcctcagcctcccaagcagctgggaccacaggggcccgccaccacgcctggctaattttttgtatttttagtagagacggggtttcaccatgctagccaggatggcctcgatctcctgacctcatgatccacctgcctcagcctcctaaagtgctgggattacaggcgtgagccaccgtgcccggccaacacaagtattgttattatccccattttacttatgagaaaactgaggataaagcagtggtaaagccaagtagattggaaataataactttgtacacaaaggaagaaaagttcgtatttgtttgagatgtgataataaccagtgttctcaaagctaggaataaaggaagaatcacatagactccagaggtaagcctacattcacttttattaccacaatctcccaagagattacgtgagctcaaaactaacgtaacaggttgcaaagtcacaagcagctgcttccgaagcttgtgctcttaaccatgacactatgctacttccagcagtcctccagacatgggtccctgacgcactccccagtagaaagcacaccaccgtcctctcctcaggcctttctgggccaggcatggggtctgcaaaattccatgccattgctcaccacaccatcctaccacagcatctcctcagaattc
